United States Patent Application Publication US 2005/0136395 A1 - sequence listing, part 6

SEQ ID NO: 199099 - DNA, 25 bp, SARS Virus
tctcatatcactctctgtagttttt

SEQ ID NO: 199100 - DNA, 25 bp, SARS Virus
ctcatatcacttcctgtagtttttg

SEQ ID NO: 199101 - DNA, 25 bp, SARS Virus
tcatatcactttctgtagtttttgt

SEQ ID NO: 199102 - DNA, 25 bp, SARS Virus
catatcactttccgtagtttttgtt

SEQ ID NO: 199103 - DNA, 25 bp, SARS Virus
atatcactttctctagtttttgttt

SEQ ID NO: 199104 - DNA, 25 bp, SARS Virus
tatcactttctgcagtttttgtttt

SEQ ID NO: 199105 - DNA, 25 bp, SARS Virus
atcactttctgtcgtttttgttttc

SEQ ID NO: 199106 - DNA, 25 bp, SARS Virus
tcactttctgtactttttgttttca

SEQ ID NO: 199107 - DNA, 25 bp, SARS Virus
cactttctgtagcttttgttttcac

SEQ ID NO: 199108 - DNA, 25 bp, SARS Virus
actttctgtagtctttgttttcacg

SEQ ID NO: 199109 - DNA, 25 bp, SARS Virus
ctttctgtagttcttgttttcacgt

SEQ ID NO: 199110 - DNA, 25 bp, SARS Virus
tttctgtagtttctgttttcacgta

SEQ ID NO: 199111 - DNA, 25 bp, SARS Virus
ttctgtagttttcgttttcacgtaa

SEQ ID NO: 199112 - DNA, 25 bp, SARS Virus
tctgtagtttttcttttcacgtaat

SEQ ID NO: 199113 - DNA, 25 bp, SARS Virus
ctgtagtttttgctttcacgtaatc

SEQ ID NO: 199114 - DNA, 25 bp, SARS Virus
tgtagtttttgtcttcacgtaatcg

SEQ ID NO: 199115 - DNA, 25 bp, SARS Virus
gtagtttttgttctcacgtaatcgt

SEQ ID NO: 199116 - DNA, 25 bp, SARS Virus
tagtttttgtttccacgtaatcgtc

SEQ ID NO: 199117 - DNA, 25 bp, SARS Virus
agtttttgttttcacgtaatcgtcg

SEQ ID NO: 199118 - DNA, 25 bp, SARS Virus
gtttttgttttcccgtaatcgtcgt

SEQ ID NO: 199119 - DNA, 25 bp, SARS Virus
tttttgttttcacgtaatcgtcgtt

SEQ ID NO: 199120 - DNA, 25 bp, SARS Virus
ttttgttttcacctaatcgtcgttg

SEQ ID NO: 199121 - DNA, 25 bp, SARS Virus
tttgttttcacgcaatcgtcgttgt

SEQ ID NO: 199122 - DNA, 25 bp, SARS Virus
ttgttttcacgtcatcgtcgttgtt

SEQ ID NO: 199123 - DNA, 25 bp, SARS Virus
tgttttcacgtactcgtcgttgttg

SEQ ID NO: 199124 - DNA, 25 bp, SARS Virus
gttttcacgtaaccgtcgttgttgt

SEQ ID NO: 199125 - DNA, 25 bp, SARS Virus
ttttcacgtaatcgtcgttgttgta

SEQ ID NO: 199126 - DNA, 25 bp, SARS Virus
tttcacgtaatcctcgttgttgtac

SEQ ID NO: 199127 - DNA, 25 bp, SARS Virus
ttcacgtaatcgccgttgttgtacc

SEQ ID NO: 199128 - DNA, 25 bp, SARS Virus
tcacgtaatcgtcgttgttgtacca

SEQ ID NO: 199129 - DNA, 25 bp, SARS Virus
cacgtaatcgtccttgttgtaccaa

SEQ ID NO: 199130 - DNA, 25 bp, SARS Virus
acgtaatcgtcgctgttgtaccaac

SEQ ID NO: 199131 - DNA, 25 bp, SARS Virus
cgtaatcgtcgtcgttgtaccaaca

SEQ ID NO: 199132 - DNA, 25 bp, SARS Virus
gtaatcgtcgttcttgtaccaacat

SEQ ID NO: 199133 - DNA, 25 bp, SARS Virus
taatcgtcgttgctgtaccaacatg

SEQ ID NO: 199134 - DNA, 25 bp, SARS Virus
aatcgtcgttgtcgtaccaacatga

SEQ ID NO: 199135 - DNA, 25 bp, SARS Virus
atcgtcgttgttctaccaacatgag

SEQ ID NO: 199136 - DNA, 25 bp, SARS Virus
tcgtcgttgttgcaccaacatgagt

SEQ ID NO: 199137 - DNA, 25 bp, SARS Virus
acgatttcagtagatctcggaaacg

SEQ ID NO: 199138 - DNA, 25 bp, SARS Virus
cgatttcagtaagtctcggaaacga

SEQ ID NO: 199139 - DNA, 25 bp, SARS Virus
gatttcagtaaagctcggaaacgat

SEQ ID NO: 199140 - DNA, 25 bp, SARS Virus
atttcagtaaatgtcggaaacgatt

SEQ ID NO: 199141 - DNA, 25 bp, SARS Virus
tttcagtaaatcgcggaaacgattc

SEQ ID NO: 199142 - DNA, 25 bp, SARS Virus
ttcagtaaatctgggaaacgattca

SEQ ID NO: 199143 - DNA, 25 bp, SARS Virus
tcagtaaatctcggaaacgattcac

SEQ ID NO: 199144 - DNA, 25 bp, SARS Virus
cagtaaatctcggaaacgattcacc

SEQ ID NO: 199145 - DNA, 25 bp, SARS Virus
agtaaatctcgggaacgattcaccg

SEQ ID NO: 199146 - DNA, 25 bp, SARS Virus
gtaaatctcggagacgattcaccgt

SEQ ID NO: 199147 - DNA, 25 bp, SARS Virus
taaatctcggaagcgattcaccgtc

SEQ ID NO: 199148 - DNA, 25 bp, SARS Virus
aaatctcggaaaggattcaccgtcg

SEQ ID NO: 199149 - DNA, 25 bp, SARS Virus
aatctcggaaacgattcaccgtcgt

SEQ ID NO: 199150 - DNA, 25 bp, SARS Virus
atctcggaaacggttcaccgtcgtt

SEQ ID NO: 199151 - DNA, 25 bp, SARS Virus
tctcggaaacgagtcaccgtcgttc

SEQ ID NO: 199152 - DNA, 25 bp, SARS Virus
ctcggaaacgatgcaccgtcgttcg

SEQ ID NO: 199153 - DNA, 25 bp, SARS Virus
tcggaaacgattgaccgtcgttcga

SEQ ID NO: 199154 - DNA, 25 bp, SARS Virus
cggaaacgattcgccgtcgttcgac

SEQ ID NO: 199155 - DNA, 25 bp, SARS Virus
ggaaacgattcagcgtcgttcgacg

SEQ ID NO: 199156 - DNA, 25 bp, SARS Virus
gaaacgattcacggtcgttcgacga

SEQ ID NO: 199157 - DNA, 25 bp, SARS Virus
aaacgattcaccgtcgttcgacgaa

SEQ ID NO: 199158 - DNA, 25 bp, SARS Virus
aacgattcaccggcgttcgacgaag

SEQ ID NO: 199159 - DNA, 25 bp, SARS Virus
acgattcaccgtggttcgacgaagt

SEQ ID NO: 199160 - DNA, 25 bp, SARS Virus
cgattcaccgtcgttcgacgaagtg

SEQ ID NO: 199161 - DNA, 25 bp, SARS Virus
gattcaccgtcggtcgacgaagtgc

SEQ ID NO: 199162 - DNA, 25 bp, SARS Virus
attcaccgtcgtgcgacgaagtgct

SEQ ID NO: 199163 - DNA, 25 bp, SARS Virus
ttcaccgtcgttggacgaagtgcta

SEQ ID NO: 199164 - DNA, 25 bp, SARS Virus
tcaccgtcgttcgacgaagtgctat

SEQ ID NO: 199165 - DNA, 25 bp, SARS Virus
caccgtcgttcggcgaagtgctatc

SEQ ID NO: 199166 - DNA, 25 bp, SARS Virus
accgtcgttcgaggaagtgctatcg

SEQ ID NO: 199167 - DNA, 25 bp, SARS Virus
ccgtcgttcgacgaagtgctatcga

SEQ ID NO: 199168 - DNA, 25 bp, SARS Virus
cgtcgttcgacggagtgctatcgac

SEQ ID NO: 199169 - DNA, 25 bp, SARS Virus
gtcgttcgacgaggtgctatcgacc

SEQ ID NO: 199170 - DNA, 25 bp, SARS Virus
tcgttcgacgaagtgctatcgacca

SEQ ID NO: 199171 - DNA, 25 bp, SARS Virus
cgttcgacgaagggctatcgaccat

SEQ ID NO: 199172 - DNA, 25 bp, SARS Virus
gttcgacgaagtgctatcgaccatc

SEQ ID NO: 199173 - DNA, 25 bp, SARS Virus
ttcgacgaagtggtatcgaccatca

SEQ ID NO: 199174 - DNA, 25 bp, SARS Virus
tcgacgaagtgcgatcgaccatcat

SEQ ID NO: 199175 - DNA, 25 bp, SARS Virus
cgacgaagtgctgtcgaccatcata

SEQ ID NO: 199176 - DNA, 25 bp, SARS Virus
gacgaagtgctagcgaccatcatag

SEQ ID NO: 199177 - DNA, 25 bp, SARS Virus
acgaagtgctatggaccatcataga

SEQ ID NO: 199178 - DNA, 25 bp, SARS Virus
cgaagtgctatcgaccatcatagat

SEQ ID NO: 199179 - DNA, 25 bp, SARS Virus
gaagtgctatcggccatcatagatt

SEQ ID NO: 199180 - DNA, 25 bp, SARS Virus
aagtgctatcgagcatcatagattc

SEQ ID NO: 199181 - DNA, 25 bp, SARS Virus
agtgctatcgacgatcatagattcc

SEQ ID NO: 199182 - DNA, 25 bp, SARS Virus
gtgctatcgaccgtcatagattccg

SEQ ID NO: 199183 - DNA, 25 bp, SARS Virus
tgctatcgaccagcatagattccga

SEQ ID NO: 199184 - DNA, 25 bp, SARS Virus
gctatcgaccatgatagattccgag

SEQ ID NO: 199185 - DNA, 25 bp, SARS Virus
ctatcgaccatcgtagattccgagg

SEQ ID NO: 199186 - DNA, 25 bp, SARS Virus
tatcgaccatcagagattccgaggt

SEQ ID NO: 199187 - DNA, 25 bp, SARS Virus
atcgaccatcatggattccgaggtg

SEQ ID NO: 199188 - DNA, 25 bp, SARS Virus
tcgaccatcatagattccgaggtga

SEQ ID NO: 199189 - DNA, 25 bp, SARS Virus
cgaccatcataggttccgaggtgac

SEQ ID NO: 199190 - DNA, 25 bp, SARS Virus
gaccatcatagagtccgaggtgact

SEQ ID NO: 199191 - DNA, 25 bp, SARS Virus
accatcatagatgccgaggtgactt

SEQ ID NO: 199192 - DNA, 25 bp, SARS Virus
ccatcatagattgcgaggtgacttt

SEQ ID NO: 199193 - DNA, 25 bp, SARS Virus
catcatagattcggaggtgacttta

SEQ ID NO: 199194 - DNA, 25 bp, SARS Virus
atcatagattccgaggtgactttat

SEQ ID NO: 199195 - DNA, 25 bp, SARS Virus
tcatagattccggggtgactttatg

SEQ ID NO: 199196 - DNA, 25 bp, SARS Virus
catagattccgaggtgactttatga

SEQ ID NO: 199197 - DNA, 25 bp, SARS Virus
atagattccgaggtgactttatgaa

SEQ ID NO: 199198 - DNA, 25 bp, SARS Virus
tagattccgaggggactttatgaac

SEQ ID NO: 199199 - DNA, 25 bp, SARS Virus
agattccgaggtgactttatgaaca

SEQ ID NO: 199200 - DNA, 25 bp, SARS Virus
gattccgaggtggctttatgaacat

SEQ ID NO: 199201 - DNA, 25 bp, SARS Virus
attccgaggtgagtttatgaacatg

SEQ ID NO: 199202 - DNA, 25 bp, SARS Virus
ttccgaggtgacgttatgaacatga

SEQ ID NO: 199203 - DNA, 25 bp, SARS Virus
tccgaggtgactgtatgaacatgaa

SEQ ID NO: 199204 - DNA, 25 bp, SARS Virus
ccgaggtgacttgatgaacatgaac

SEQ ID NO: 199205 - DNA, 25 bp, SARS Virus
cgaggtgactttgtgaacatgaaca

SEQ ID NO: 199206 - DNA, 25 bp, SARS Virus
gaggtgactttaggaacatgaacaa

SEQ ID NO: 199207 - DNA, 25 bp, SARS Virus
aggtgactttatgaacatgaacaat

SEQ ID NO: 199208 - DNA, 25 bp, SARS Virus
ggtgactttatggacatgaacaata

SEQ ID NO: 199209 - DNA, 25 bp, SARS Virus
gtgactttatgagcatgaacaatat

SEQ ID NO: 199210 - DNA, 25 bp, SARS Virus
tgactttatgaagatgaacaatata

SEQ ID NO: 199211 - DNA, 25 bp, SARS Virus
gactttatgaacgtgaacaatatat

SEQ ID NO: 199212 - DNA, 25 bp, SARS Virus
actttatgaacaggaacaatatatc

SEQ ID NO: 199213 - DNA, 25 bp, SARS Virus
ctttatgaacatgaacaatatatct

SEQ ID NO: 199214 - DNA, 25 bp, SARS Virus
tttatgaacatggacaatatatctc

SEQ ID NO: 199215 - DNA, 25 bp, SARS Virus
ttatgaacatgagcaatatatctcg

SEQ ID NO: 199216 - DNA, 25 bp, SARS Virus
tatgaacatgaagaatatatctcgt

SEQ ID NO: 199217 - DNA, 25 bp, SARS Virus
atgaacatgaacgatatatctcgtt

SEQ ID NO: 199218 - DNA, 25 bp, SARS Virus
tgaacatgaacagtatatctcgttc

SEQ ID NO: 199219 - DNA, 25 bp, SARS Virus
gaacatgaacaagatatctcgttct

SEQ ID NO: 199220 - DNA, 25 bp, SARS Virus
aacatgaacaatgtatctcgttcta

SEQ ID NO: 199221 - DNA, 25 bp, SARS Virus
acatgaacaatagatctcgttctat

SEQ ID NO: 199222 - DNA, 25 bp, SARS Virus
catgaacaatatgtctcgttctatg

SEQ ID NO: 199223 - DNA, 25 bp, SARS Virus
atgaacaatatagctcgttctatgg

SEQ ID NO: 199224 - DNA, 25 bp, SARS Virus
tgaacaatatatgtcgttctatgga

SEQ ID NO: 199225 - DNA, 25 bp, SARS Virus
gaacaatatatcgcgttctatggac

SEQ ID NO: 199226 - DNA, 25 bp, SARS Virus
aacaatatatctggttctatggaca

SEQ ID NO: 199227 - DNA, 25 bp, SARS Virus
acaatatatctcgttctatggacaa

SEQ ID NO: 199228 - DNA, 25 bp, SARS Virus
caatatatctcggtctatggacaat

SEQ ID NO: 199229 - DNA, 25 bp, SARS Virus
aatatatctcgtgctatggacaata

SEQ ID NO: 199230 - DNA, 25 bp, SARS Virus
atatatctcgttgtatggacaatat

SEQ ID NO: 199231 - DNA, 25 bp, SARS Virus
tatatctcgttcgatggacaatatg

SEQ ID NO: 199232 - DNA, 25 bp, SARS Virus
atatctcgttctgtggacaatatga

SEQ ID NO: 199233 - DNA, 25 bp, SARS Virus
tatctcgttctagggacaatatgac

SEQ ID NO: 199234 - DNA, 25 bp, SARS Virus
atctcgttctatggacaatatgaca

SEQ ID NO: 199235 - DNA, 25 bp, SARS Virus
tctcgttctatggacaatatgacac

SEQ ID NO: 199236 - DNA, 25 bp, SARS Virus
ctcgttctatgggcaatatgacaca

SEQ ID NO: 199237 - DNA, 25 bp, SARS Virus
tcgttctatggagaatatgacacat

SEQ ID NO: 199238 - DNA, 25 bp, SARS Virus
cgttctatggacgatatgacacatt

SEQ ID NO: 199239 - DNA, 25 bp, SARS Virus
gttctatggacagtatgacacattc

SEQ ID NO: 199240 - DNA, 25 bp, SARS Virus
ttctatggacaagatgacacattca

SEQ ID NO: 199241 - DNA, 25 bp, SARS Virus
tctatggacaatgtgacacattcac

SEQ ID NO: 199242 - DNA, 25 bp, SARS Virus
ctatggacaataggacacattcacc

SEQ ID NO: 199243 - DNA, 25 bp, SARS Virus
tatggacaatatgacacattcaccg

SEQ ID NO: 199244 - DNA, 25 bp, SARS Virus
atggacaatatggcacattcaccgt

SEQ ID NO: 199245 - DNA, 25 bp, SARS Virus
tggacaatatgagacattcaccgtt

SEQ ID NO: 199246 - DNA, 25 bp, SARS Virus
ggacaatatgacgcattcaccgttg

SEQ ID NO: 199247 - DNA, 25 bp, SARS Virus
gacaatatgacagattcaccgttgt

SEQ ID NO: 199248 - DNA, 25 bp, SARS Virus
acaatatgacacgttcaccgttgtc

SEQ ID NO: 199249 - DNA, 25 bp, SARS Virus
caatatgacacagtcaccgttgtca

SEQ ID NO: 199250 - DNA, 25 bp, SARS Virus
aatatgacacatgcaccgttgtcac

SEQ ID NO: 199251 - DNA, 25 bp, SARS Virus
atatgacacattgaccgttgtcaca

SEQ ID NO: 199252 - DNA, 25 bp, SARS Virus
tatgacacattcgccgttgtcacag

SEQ ID NO: 199253 - DNA, 25 bp, SARS Virus
atgacacattcagcgttgtcacaga

SEQ ID NO: 199254 - DNA, 25 bp, SARS Virus
tgacacattcacggttgtcacagag

SEQ ID NO: 199255 - DNA, 25 bp, SARS Virus
gacacattcaccgttgtcacagagc

SEQ ID NO: 199256 - DNA, 25 bp, SARS Virus
acacattcaccggtgtcacagagcg

SEQ ID NO: 199257 - DNA, 25 bp, SARS Virus
cacattcaccgtggtcacagagcga

SEQ ID NO: 199258 - DNA, 25 bp, SARS Virus
acattcaccgttgtcacagagcgat

SEQ ID NO: 199259 - DNA, 25 bp, SARS Virus
cattcaccgttggcacagagcgatg

SEQ ID NO: 199260 - DNA, 25 bp, SARS Virus
attcaccgttgtgacagagcgatgc

SEQ ID NO: 199261 - DNA, 25 bp, SARS Virus
ttcaccgttgtcgcagagcgatgcg

SEQ ID NO: 199262 - DNA, 25 bp, SARS Virus
tcaccgttgtcagagagcgatgcgt

SEQ ID NO: 199263 - DNA, 25 bp, SARS Virus
caccgttgtcacggagcgatgcgtt

SEQ ID NO: 199264 - DNA, 25 bp, SARS Virus
accgttgtcacagagcgatgcgtta

SEQ ID NO: 199265 - DNA, 25 bp, SARS Virus
ccgttgtcacagggcgatgcgttaa

SEQ ID NO: 199266 - DNA, 25 bp, SARS Virus
cgttgtcacagagcgatgcgttaaa

SEQ ID NO: 199267 - DNA, 25 bp, SARS Virus
gttgtcacagagggatgcgttaaaa

SEQ ID NO: 199268 - DNA, 25 bp, SARS Virus
ttgtcacagagcgatgcgttaaaat

SEQ ID NO: 199269 - DNA, 25 bp, SARS Virus
tgtcacagagcggtgcgttaaaatc

SEQ ID NO: 199270 - DNA, 25 bp, SARS Virus
gtcacagagcgaggcgttaaaatcc

SEQ ID NO: 199271 - DNA, 25 bp, SARS Virus
tcacagagcgatgcgttaaaatcca

SEQ ID NO: 199272 - DNA, 25 bp, SARS Virus
cacagagcgatgggttaaaatccat

SEQ ID NO: 199273 - DNA, 25 bp, SARS Virus
acagagcgatgcgttaaaatccatg

SEQ ID NO: 199274 - DNA, 25 bp, SARS Virus
cagagcgatgcggtaaaatccatgt

SEQ ID NO: 199275 - DNA, 25 bp, SARS Virus
agagcgatgcgtgaaaatccatgta

SEQ ID NO: 199276 - DNA, 25 bp, SARS Virus
gagcgatgcgttgaaatccatgtaa

SEQ ID NO: 199277 - DNA, 25 bp, SARS Virus
agcgatgcgttagaatccatgtaaa

SEQ ID NO: 199278 - DNA, 25 bp, SARS Virus
gcgatgcgttaagatccatgtaaag

SEQ ID NO: 199279 - DNA, 25 bp, SARS Virus
cgatgcgttaaagtccatgtaaagg

SEQ ID NO: 199280 - DNA, 25 bp, SARS Virus
gatgcgttaaaagccatgtaaagga

SEQ ID NO: 199281 - DNA, 25 bp, SARS Virus
atgcgttaaaatgcatgtaaaggaa

SEQ ID NO: 199282 - DNA, 25 bp, SARS Virus
tgcgttaaaatcgatgtaaaggaac

SEQ ID NO: 199283 - DNA, 25 bp, SARS Virus
gcgttaaaatccgtgtaaaggaaca

SEQ ID NO: 199284 - DNA, 25 bp, SARS Virus
cgttaaaatccaggtaaaggaacaa

SEQ ID NO: 199285 - DNA, 25 bp, SARS Virus
gttaaaatccatgtaaaggaacaac

SEQ ID NO: 199286 - DNA, 25 bp, SARS Virus
ttaaaatccatggaaaggaacaact

SEQ ID NO: 199287 - DNA, 25 bp, SARS Virus
taaaatccatgtgaaggaacaactc

SEQ ID NO: 199288 - DNA, 25 bp, SARS Virus
aaaatccatgtagaggaacaactcg

SEQ ID NO: 199289 - DNA, 25 bp, SARS Virus
aaatccatgtaagggaacaactcgt

SEQ ID NO: 199290 - DNA, 25 bp, SARS Virus
aatccatgtaaaggaacaactcgtt

SEQ ID NO: 199291 - DNA, 25 bp, SARS Virus
atccatgtaaaggaacaactcgttt

SEQ ID NO: 199292 - DNA, 25 bp, SARS Virus
tccatgtaaagggacaactcgtttt

SEQ ID NO: 199293 - DNA, 25 bp, SARS Virus
ccatgtaaaggagcaactcgttttt

SEQ ID NO: 199294 - DNA, 25 bp, SARS Virus
catgtaaaggaagaactcgtttttc

SEQ ID NO: 199295 - DNA, 25 bp, SARS Virus
atgtaaaggaacgactcgtttttcc

SEQ ID NO: 199296 - DNA, 25 bp, SARS Virus
tgtaaaggaacagctcgtttttcca

SEQ ID NO: 199297 - DNA, 25 bp, SARS Virus
gtaaaggaacaagtcgtttttccat

SEQ ID NO: 199298 - DNA, 25 bp, SARS Virus
taaaggaacaacgcgtttttccatg

SEQ ID NO: 199299 - DNA, 25 bp, SARS Virus
aaaggaacaactggtttttccatgt

SEQ ID NO: 199300 - DNA, 25 bp, SARS Virus
aaggaacaactcgtttttccatgtg

SEQ ID NO: 199301 - DNA, 25 bp, SARS Virus
aggaacaactcggttttccatgtgt

SEQ ID NO: 199302 - DNA, 25 bp, SARS Virus
ggaacaactcgtgtttccatgtgtt

SEQ ID NO: 199303 - DNA, 25 bp, SARS Virus
gaacaactcgttgttccatgtgttt

SEQ ID NO: 199304 - DNA, 25 bp, SARS Virus
aacaactcgtttgtccatgtgtttc

SEQ ID NO: 199305 - DNA, 25 bp, SARS Virus
acaactcgttttgccatgtgtttcg

SEQ ID NO: 199306 - DNA, 25 bp, SARS Virus
caactcgtttttgcatgtgtttcgt

SEQ ID NO: 199307 - DNA, 25 bp, SARS Virus
aactcgtttttcgatgtgtttcgtc

SEQ ID NO: 199308 - DNA, 25 bp, SARS Virus
actcgtttttccgtgtgtttcgtcg

SEQ ID NO: 199309 - DNA, 25 bp, SARS Virus
ctcgtttttccaggtgtttcgtcgg

SEQ ID NO: 199310 - DNA, 25 bp, SARS Virus
tcgtttttccatgtgtttcgtcgga

SEQ ID NO: 199311 - DNA, 25 bp, SARS Virus
cgtttttccatgggtttcgtcggag

SEQ ID NO: 199312 - DNA, 25 bp, SARS Virus
gtttttccatgtgtttcgtcggagg

SEQ ID NO: 199313 - DNA, 25 bp, SARS Virus
tttttccatgtggttcgtcggagga

SEQ ID NO: 199314 - DNA, 25 bp, SARS Virus
ttttccatgtgtgtcgtcggaggag

SEQ ID NO: 199315 - DNA, 25 bp, SARS Virus
tttccatgtgttgcgtcggaggagc

SEQ ID NO: 199316 - DNA, 25 bp, SARS Virus
ttccatgtgtttggtcggaggagct

SEQ ID NO: 199317 - DNA, 25 bp, SARS Virus
tccatgtgtttcgtcggaggagctt

SEQ ID NO: 199318 - DNA, 25 bp, SARS Virus
ccatgtgtttcggcggaggagcttc

SEQ ID NO: 199319 - DNA, 25 bp, SARS Virus
catgtgtttcgtgggaggagcttcc

SEQ ID NO: 199320 - DNA, 25 bp, SARS Virus
atgtgtttcgtcggaggagcttcca

SEQ ID NO: 199321 - DNA, 25 bp, SARS Virus
tgtgtttcgtcggaggagcttccat

SEQ ID NO: 199322 - DNA, 25 bp, SARS Virus
gtgtttcgtcgggggagcttccatg

SEQ ID NO: 199323 - DNA, 25 bp, SARS Virus
tgtttcgtcggaggagcttccatga

SEQ ID NO: 199324 - DNA, 25 bp, SARS Virus
gtttcgtcggaggagcttccatgat

SEQ ID NO: 199325 - DNA, 25 bp, SARS Virus
tttcgtcggaggggcttccatgatt

SEQ ID NO: 199326 - DNA, 25 bp, SARS Virus
ttcgtcggaggagcttccatgattt

SEQ ID NO: 199327 - DNA, 25 bp, SARS Virus
tcgtcggaggaggttccatgattta

SEQ ID NO: 199328 - DNA, 25 bp, SARS Virus
cgtcggaggagcgtccatgatttac

SEQ ID NO: 199329 - DNA, 25 bp, SARS Virus
gtcggaggagctgccatgatttaca

SEQ ID NO: 199330 - DNA, 25 bp, SARS Virus
tcggaggagcttgcatgatttacat

SEQ ID NO: 199331 - DNA, 25 bp, SARS Virus
cggaggagcttcgatgatttacatt

SEQ ID NO: 199332 - DNA, 25 bp, SARS Virus
ggaggagcttccgtgatttacattg

SEQ ID NO: 199333 - DNA, 25 bp, SARS Virus
gaggagcttccaggatttacattga

SEQ ID NO: 199334 - DNA, 25 bp, SARS Virus
aggagcttccatgatttacattgag

SEQ ID NO: 199335 - DNA, 25 bp, SARS Virus
ggagcttccatggtttacattgagg

SEQ ID NO: 199336 - DNA, 25 bp, SARS Virus
gagcttccatgagttacattgaggt

SEQ ID NO: 199337 - DNA, 25 bp, SARS Virus
agcttccatgatgtacattgaggta

SEQ ID NO: 199338 - DNA, 25 bp, SARS Virus
gcttccatgattgacattgaggtaa

SEQ ID NO: 199339 - DNA, 25 bp, SARS Virus
cttccatgatttgcattgaggtaat

SEQ ID NO: 199340 - DNA, 25 bp, SARS Virus
ttccatgatttagattgaggtaatt

SEQ ID NO: 199341 - DNA, 25 bp, SARS Virus
tccatgatttacgttgaggtaattt

SEQ ID NO: 199342 - DNA, 25 bp, SARS Virus
ccatgatttacagtgaggtaatttg

SEQ ID NO: 199343 - DNA, 25 bp, SARS Virus
catgatttacatggaggtaatttgt

SEQ ID NO: 199344 - DNA, 25 bp, SARS Virus
atgatttacattgaggtaatttgta

SEQ ID NO: 199345 - DNA, 25 bp, SARS Virus
tgatttacattggggtaatttgtac

SEQ ID NO: 199346 - DNA, 25 bp, SARS Virus
gatttacattgaggtaatttgtact

SEQ ID NO: 199347 - DNA, 25 bp, SARS Virus
atttacattgaggtaatttgtactg

SEQ ID NO: 199348 - DNA, 25 bp, SARS Virus
tttacattgagggaatttgtactga

SEQ ID NO: 199349 - DNA, 25 bp, SARS Virus
ttacattgaggtgatttgtactgag

SEQ ID NO: 199350 - DNA, 25 bp, SARS Virus
tacattgaggtagtttgtactgaga

SEQ ID NO: 199351 - DNA, 25 bp, SARS Virus
acattgaggtaagttgtactgagaa

SEQ ID NO: 199352 - DNA, 25 bp, SARS Virus
cattgaggtaatgtgtactgagaaa

SEQ ID NO: 199353 - DNA, 25 bp, SARS Virus
attgaggtaattggtactgagaaaa

SEQ ID NO: 199354 - DNA, 25 bp, SARS Virus
ttgaggtaatttgtactgagaaaag

SEQ ID NO: 199355 - DNA, 25 bp, SARS Virus
tgaggtaatttggactgagaaaagg

SEQ ID NO: 199356 - DNA, 25 bp, SARS Virus
gaggtaatttgtgctgagaaaagga

SEQ ID NO: 199357 - DNA, 25 bp, SARS Virus
aggtaatttgtagtgagaaaaggat

SEQ ID NO: 199358 - DNA, 25 bp, SARS Virus
ggtaatttgtacggagaaaaggatt

SEQ ID NO: 199359 - DNA, 25 bp, SARS Virus
gtaatttgtactgagaaaaggattc

SEQ ID NO: 199360 - DNA, 25 bp, SARS Virus
taatttgtactgggaaaaggattct

SEQ ID NO: 199361 - DNA, 25 bp, SARS Virus
aatttgtactgagaaaaggattcta

SEQ ID NO: 199362 - DNA, 25 bp, SARS Virus
atttgtactgaggaaaggattctat

SEQ ID NO: 199363 - DNA, 25 bp, SARS Virus
tttgtactgagagaaggattctatc

SEQ ID NO: 199364 - DNA, 25 bp, SARS Virus
ttgtactgagaagaggattctatca

SEQ ID NO: 199365 - DNA, 25 bp, SARS Virus
tgtactgagaaagggattctatcaa

SEQ ID NO: 199366 - DNA, 25 bp, SARS Virus
gtactgagaaaaggattctatcaac

SEQ ID NO: 199367 - DNA, 25 bp, SARS Virus
tactgagaaaaggattctatcaaca

SEQ ID NO: 199368 - DNA, 25 bp, SARS Virus
actgagaaaagggttctatcaacaa

SEQ ID NO: 199369 - DNA, 25 bp, SARS Virus
ctgagaaaaggagtctatcaacaat

SEQ ID NO: 199370 - DNA, 25 bp, SARS Virus
tgagaaaaggatgctatcaacaatt

SEQ ID NO: 199371 - DNA, 25 bp, SARS Virus
gagaaaaggattgtatcaacaattt

SEQ ID NO: 199372 - DNA, 25 bp, SARS Virus
agaaaaggattcgatcaacaatttc

SEQ ID NO: 199373 - DNA, 25 bp, SARS Virus
gaaaaggattctgtcaacaatttct

SEQ ID NO: 199374 - DNA, 25 bp, SARS Virus
aaaaggattctagcaacaatttctt

SEQ ID NO: 199375 - DNA, 25 bp, SARS Virus
aaaggattctatgaacaatttcttg

SEQ ID NO: 199376 - DNA, 25 bp, SARS Virus
aaggattctatcgacaatttcttgg

SEQ ID NO: 199377 - DNA, 25 bp, SARS Virus
aggattctatcagcaatttcttggt

SEQ ID NO: 199378 - DNA, 25 bp, SARS Virus
ggattctatcaagaatttcttggtt

SEQ ID NO: 199379 - DNA, 25 bp, SARS Virus
gattctatcaacgatttcttggtta

SEQ ID NO: 199380 - DNA, 25 bp, SARS Virus
attctatcaacagtttcttggttac

SEQ ID NO: 199381 - DNA, 25 bp, SARS Virus
ttctatcaacaagttcttggttacc

SEQ ID NO: 199382 - DNA, 25 bp, SARS Virus
tctatcaacaatgtcttggttaccg

SEQ ID NO: 199383 - DNA, 25 bp, SARS Virus
ctatcaacaattgcttggttaccgt

SEQ ID NO: 199384 - DNA, 25 bp, SARS Virus
tatcaacaatttgttggttaccgtc

SEQ ID NO: 199385 - DNA, 25 bp, SARS Virus
atcaacaatttcgtggttaccgtca

SEQ ID NO: 199386 - DNA, 25 bp, SARS Virus
tcaacaatttctgggttaccgtcac

SEQ ID NO: 199387 - DNA, 25 bp, SARS Virus
caacaatttcttggttaccgtcacg

SEQ ID NO: 199388 - DNA, 25 bp, SARS Virus
aacaatttcttggttaccgtcacga

SEQ ID NO: 199389 - DNA, 25 bp, SARS Virus
acaatttcttgggtaccgtcacgaa

SEQ ID NO: 199390 - DNA, 25 bp, SARS Virus
caatttcttggtgaccgtcacgaag

SEQ ID NO: 199391 - DNA, 25 bp, SARS Virus
aatttcttggttgccgtcacgaagt

SEQ ID NO: 199392 - DNA, 25 bp, SARS Virus
atttcttggttagcgtcacgaagtc

SEQ ID NO: 199393 - DNA, 25 bp, SARS Virus
tttcttggttacggtcacgaagtct

SEQ ID NO: 199394 - DNA, 25 bp, SARS Virus
ttcttggttaccgtcacgaagtctc

SEQ ID NO: 199395 - DNA, 25 bp, SARS Virus
tcttggttaccggcacgaagtctct

SEQ ID NO: 199396 - DNA, 25 bp, SARS Virus
cttggttaccgtgacgaagtctctt

SEQ ID NO: 199397 - DNA, 25 bp, SARS Virus
ttggttaccgtcgcgaagtctcttt

SEQ ID NO: 199398 - DNA, 25 bp, SARS Virus
tggttaccgtcaggaagtctcttta

SEQ ID NO: 199399 - DNA, 25 bp, SARS Virus
ggttaccgtcacgaagtctctttat

SEQ ID NO: 199400 - DNA, 25 bp, SARS Virus
gttaccgtcacggagtctctttatg

SEQ ID NO: 199401 - DNA, 25 bp, SARS Virus
ttaccgtcacgaggtctctttatgt

SEQ ID NO: 199402 - DNA, 25 bp, SARS Virus
taccgtcacgaagtctctttatgtc

SEQ ID NO: 199403 - DNA, 25 bp, SARS Virus
accgtcacgaaggctctttatgtct

SEQ ID NO: 199404 - DNA, 25 bp, SARS Virus
ccgtcacgaagtgtctttatgtctt

SEQ ID NO: 199405 - DNA, 25 bp, SARS Virus
cgtcacgaagtcgctttatgtctta

SEQ ID NO: 199406 - DNA, 25 bp, SARS Virus
gtcacgaagtctgtttatgtcttat

SEQ ID NO: 199407 - DNA, 25 bp, SARS Virus
tcacgaagtctcgttatgtcttatg

SEQ ID NO: 199408 - DNA, 25 bp, SARS Virus
cacgaagtctctgtatgtcttatgt

SEQ ID NO: 199409 - DNA, 25 bp, SARS Virus
acgaagtctcttgatgtcttatgta

SEQ ID NO: 199410 - DNA, 25 bp, SARS Virus
cgaagtctctttgtgtcttatgtat

SEQ ID NO: 199411 - DNA, 25 bp, SARS Virus
gaagtctctttaggtcttatgtatc

SEQ ID NO: 199412 - DNA, 25 bp, SARS Virus
aagtctctttatgtcttatgtatct

SEQ ID NO: 199413 - DNA, 25 bp, SARS Virus
agtctctttatggcttatgtatcta

SEQ ID NO: 199414 - DNA, 25 bp, SARS Virus
gtctctttatgtgttatgtatctaa

SEQ ID NO: 199415 - DNA, 25 bp, SARS Virus
tctctttatgtcgtatgtatctaac

SEQ ID NO: 199416 - DNA, 25 bp, SARS Virus
ctctttatgtctgatgtatctaacg

SEQ ID NO: 199417 - DNA, 25 bp, SARS Virus
tctttatgtcttgtgtatctaacga

SEQ ID NO: 199418 - DNA, 25 bp, SARS Virus
ctttatgtcttaggtatctaacgac

SEQ ID NO: 199419 - DNA, 25 bp, SARS Virus
tttatgtcttatgtatctaacgaca

SEQ ID NO: 199420 - DNA, 25 bp, SARS Virus
ttatgtcttatggatctaacgacaa

SEQ ID NO: 199421 - DNA, 25 bp, SARS Virus
tatgtcttatgtgtctaacgacaat

SEQ ID NO: 199422 - DNA, 25 bp, SARS Virus
atgtcttatgtagctaacgacaata

SEQ ID NO: 199423 - DNA, 25 bp, SARS Virus
tgtcttatgtatgtaacgacaatag

SEQ ID NO: 199424 - DNA, 25 bp, SARS Virus
gtcttatgtatcgaacgacaatagg

SEQ ID NO: 199425 - DNA, 25 bp, SARS Virus
tcttatgtatctgacgacaataggt

SEQ ID NO: 199426 - DNA, 25 bp, SARS Virus
cttatgtatctagcgacaataggtt

SEQ ID NO: 199427 - DNA, 25 bp, SARS Virus
ttatgtatctaaggacaataggttt

SEQ ID NO: 199428 - DNA, 25 bp, SARS Virus
tatgtatctaacgacaataggtttt

SEQ ID NO: 199429 - DNA, 25 bp, SARS Virus
atgtatctaacggcaataggttttt

SEQ ID NO: 199430 - DNA, 25 bp, SARS Virus
tgtatctaacgagaataggtttttc

SEQ ID NO: 199431 - DNA, 25 bp, SARS Virus
gtatctaacgacgataggtttttcc

SEQ ID NO: 199432 - DNA, 25 bp, SARS Virus
tatctaacgacagtaggtttttccg

SEQ ID NO: 199433 - DNA, 25 bp, SARS Virus
atctaacgacaagaggtttttccgt

SEQ ID NO: 199434 - DNA, 25 bp, SARS Virus
tctaacgacaatgggtttttccgtg

SEQ ID NO: 199435 - DNA, 25 bp, SARS Virus
ctaacgacaataggtttttccgtgt

SEQ ID NO: 199436 - DNA, 25 bp, SARS Virus
taacgacaataggtttttccgtgtt

SEQ ID NO: 199437 - DNA, 25 bp, SARS Virus
aacgacaatagggttttccgtgtta

SEQ ID NO: 199438 - DNA, 25 bp, SARS Virus
acgacaataggtgtttccgtgttat

SEQ ID NO: 199439 - DNA, 25 bp, SARS Virus
cgacaataggttgttccgtgttatc

SEQ ID NO: 199440 - DNA, 25 bp, SARS Virus
gacaataggtttgtccgtgttatcc

SEQ ID NO: 199441 - DNA, 25 bp, SARS Virus
acaataggttttgccgtgttatcct

SEQ ID NO: 199442 - DNA, 25 bp, SARS Virus
caataggtttttgcgtgttatcctc

SEQ ID NO: 199443 - DNA, 25 bp, SARS Virus
aataggtttttcggtgttatcctct

SEQ ID NO: 199444 - DNA, 25 bp, SARS Virus
ataggtttttccgtgttatcctctt

SEQ ID NO: 199445 - DNA, 25 bp, SARS Virus
taggtttttccgggttatcctcttt

SEQ ID NO: 199446 - DNA, 25 bp, SARS Virus
aggtttttccgtgttatcctctttt

SEQ ID NO: 199447 - DNA, 25 bp, SARS Virus
ggtttttccgtggtatcctcttttg

SEQ ID NO: 199448 - DNA, 25 bp, SARS Virus
gtttttccgtgtgatcctcttttgt

SEQ ID NO: 199449 - DNA, 25 bp, SARS Virus
tttttccgtgttgtcctcttttgta

SEQ ID NO: 199450 - DNA, 25 bp, SARS Virus
ttttccgtgttagcctcttttgtac

SEQ ID NO: 199451 - DNA, 25 bp, SARS Virus
tttccgtgttatgctcttttgtacc

SEQ ID NO: 199452 - DNA, 25 bp, SARS Virus
ttccgtgttatcgtcttttgtaccg

SEQ ID NO: 199453 - DNA, 25 bp, SARS Virus
tccgtgttatccgcttttgtaccgt

SEQ ID NO: 199454 - DNA, 25 bp, SARS Virus
ccgtgttatcctgttttgtaccgtt

SEQ ID NO: 199455 - DNA, 25 bp, SARS Virus
cgtgttatcctcgtttgtaccgttt

SEQ ID NO: 199456 - DNA, 25 bp, SARS Virus
gtgttatcctctgttgtaccgtttg

SEQ ID NO: 199457 - DNA, 25 bp, SARS Virus
tgttatcctcttgtgtaccgtttgg

SEQ ID NO: 199458 - DNA, 25 bp, SARS Virus
gttatcctctttggtaccgtttggt

SEQ ID NO: 199459 - DNA, 25 bp, SARS Virus
ttatcctcttttgtaccgtttggta

SEQ ID NO: 199460 - DNA, 25 bp, SARS Virus
tatcctcttttggaccgtttggtaa

SEQ ID NO: 199461 - DNA, 25 bp, SARS Virus
atcctcttttgtgccgtttggtaac

SEQ ID NO: 199462 - DNA, 25 bp, SARS Virus
tcctcttttgtagcgtttggtaact

SEQ ID NO: 199463 - DNA, 25 bp, SARS Virus
cctcttttgtacggtttggtaactt

SEQ ID NO: 199464 - DNA, 25 bp, SARS Virus
ctcttttgtaccgtttggtaacttc

SEQ ID NO: 199465 - DNA, 25 bp, SARS Virus
tcttttgtaccggttggtaacttcc

SEQ ID NO: 199466 - DNA, 25 bp, SARS Virus
cttttgtaccgtgtggtaacttcca

SEQ ID NO: 199467 - DNA, 25 bp, SARS Virus
ttttgtaccgttgggtaacttccac

SEQ ID NO: 199468 - DNA, 25 bp, SARS Virus
tttgtaccgtttggtaacttccact

SEQ ID NO: 199469 - DNA, 25 bp, SARS Virus
ttgtaccgtttggtaacttccactc

SEQ ID NO: 199470 - DNA, 25 bp, SARS Virus
tgtaccgtttgggaacttccactcg

SEQ ID NO: 199471 - DNA, 25 bp, SARS Virus
gtaccgtttggtgacttccactcgg

SEQ ID NO: 199472 - DNA, 25 bp, SARS Virus
taccgtttggtagcttccactcggt

SEQ ID NO: 199473 - DNA, 25 bp, SARS Virus
accgtttggtaagttccactcggtt

SEQ ID NO: 199474 - DNA, 25 bp, SARS Virus
ccgtttggtaacgtccactcggttc

SEQ ID NO: 199475 - DNA, 25 bp, SARS Virus
cgtttggtaactgccactcggttct

SEQ ID NO: 199476 - DNA, 25 bp, SARS Virus
gtttggtaacttgcactcggttctt

SEQ ID NO: 199477 - DNA, 25 bp, SARS Virus
tttggtaacttcgactcggttctta

SEQ ID NO: 199478 - DNA, 25 bp, SARS Virus
ttggtaacttccgctcggttcttac

SEQ ID NO: 199479 - DNA, 25 bp, SARS Virus
tggtaacttccagtcggttcttact

SEQ ID NO: 199480 - DNA, 25 bp, SARS Virus
ggtaacttccacgcggttcttactt

SEQ ID NO: 199481 - DNA, 25 bp, SARS Virus
gtaacttccactgggttcttacttt

SEQ ID NO: 199482 - DNA, 25 bp, SARS Virus
taacttccactcggttcttactttg

SEQ ID NO: 199483 - DNA, 25 bp, SARS Virus
aacttccactcggttcttactttgt

SEQ ID NO: 199484 - DNA, 25 bp, SARS Virus
acttccactcgggtcttactttgta

SEQ ID NO: 199485 - DNA, 25 bp, SARS Virus
cttccactcggtgcttactttgtag

SEQ ID NO: 199486 - DNA, 25 bp, SARS Virus
ttccactcggttgttactttgtagt

SEQ ID NO: 199487 - DNA, 25 bp, SARS Virus
tccactcggttcgtactttgtagta

SEQ ID NO: 199488 - DNA, 25 bp, SARS Virus
ccactcggttctgactttgtagtaa

SEQ ID NO: 199489 - DNA, 25 bp, SARS Virus
cactcggttcttgctttgtagtaac

SEQ ID NO: 199490 - DNA, 25 bp, SARS Virus
actcggttcttagtttgtagtaacc

SEQ ID NO: 199491 - DNA, 25 bp, SARS Virus
ctcggttcttacgttgtagtaacca

SEQ ID NO: 199492 - DNA, 25 bp, SARS Virus
tcggttcttactgtgtagtaaccac

SEQ ID NO: 199493 - DNA, 25 bp, SARS Virus
cggttcttacttggtagtaaccact

SEQ ID NO: 199494 - DNA, 25 bp, SARS Virus
ggttcttactttgtagtaaccactt

SEQ ID NO: 199495 - DNA, 25 bp, SARS Virus
gttcttactttggagtaaccacttt

SEQ ID NO: 199496 - DNA, 25 bp, SARS Virus
ttcttactttgtggtaaccacttta

SEQ ID NO: 199497 - DNA, 25 bp, SARS Virus
tcttactttgtagtaaccactttat

SEQ ID NO: 199498 - DNA, 25 bp, SARS Virus
cttactttgtaggaaccactttatc

SEQ ID NO: 199499 - DNA, 25 bp, SARS Virus
ttactttgtagtgaccactttatct

SEQ ID NO: 199500 - DNA, 25 bp, SARS Virus
tactttgtagtagccactttatctt

SEQ ID NO: 199501 - DNA, 25 bp, SARS Virus
actttgtagtaagcactttatctta

SEQ ID NO: 199502 - DNA, 25 bp, SARS Virus
ctttgtagtaacgactttatcttac

SEQ ID NO: 199503 - DNA, 25 bp, SARS Virus
tttgtagtaaccgctttatcttaca

SEQ ID NO: 199504 - DNA, 25 bp, SARS Virus
ttgtagtaaccagtttatcttacag

SEQ ID NO: 199505 - DNA, 25 bp, SARS Virus
tgtagtaaccacgttatcttacagt

SEQ ID NO: 199506 - DNA, 25 bp, SARS Virus
gtagtaaccactgtatcttacagtt

SEQ ID NO: 199507 - DNA, 25 bp, SARS Virus
tagtaaccacttgatcttacagttc

SEQ ID NO: 199508 - DNA, 25 bp, SARS Virus
agtaaccactttgtcttacagttca

SEQ ID NO: 199509 - DNA, 25 bp, SARS Virus
gtaaccactttagcttacagttcat

SEQ ID NO: 199510 - DNA, 25 bp, SARS Virus
taaccactttatgttacagttcatg

SEQ ID NO: 199511 - DNA, 25 bp, SARS Virus
aaccactttatcgtacagttcatgt

SEQ ID NO: 199512 - DNA, 25 bp, SARS Virus
accactttatctgacagttcatgtt

SEQ ID NO: 199513 - DNA, 25 bp, SARS Virus
ccactttatcttgcagttcatgttc

SEQ ID NO: 199514 - DNA, 25 bp, SARS Virus
cactttatcttagagttcatgttca

SEQ ID NO: 199515 - DNA, 25 bp, SARS Virus
actttatcttacggttcatgttcat

SEQ ID NO: 199516 - DNA, 25 bp, SARS Virus
ctttatcttacagttcatgttcatt

SEQ ID NO: 199517 - DNA, 25 bp, SARS Virus
tttatcttacaggtcatgttcattt

SEQ ID NO: 199518 - DNA, 25 bp, SARS Virus
ttatcttacagtgcatgttcatttt

SEQ ID NO: 199519 - DNA, 25 bp, SARS Virus
tatcttacagttgatgttcattttc

SEQ ID NO: 199520 - DNA, 25 bp, SARS Virus
atcttacagttcgtgttcattttct

SEQ ID NO: 199521 - DNA, 25 bp, SARS Virus
tcttacagttcaggttcattttctg

SEQ ID NO: 199522 - DNA, 25 bp, SARS Virus
cttacagttcatgttcattttctga

SEQ ID NO: 199523 - DNA, 25 bp, SARS Virus
ttacagttcatggtcattttctgac

SEQ ID NO: 199524 - DNA, 25 bp, SARS Virus
tacagttcatgtgcattttctgact

SEQ ID NO: 199525 - DNA, 25 bp, SARS Virus
acagttcatgttgattttctgactc

SEQ ID NO: 199526 - DNA, 25 bp, SARS Virus
cagttcatgttcgttttctgactca

SEQ ID NO: 199527 - DNA, 25 bp, SARS Virus
agttcatgttcagtttctgactcat

SEQ ID NO: 199528 - DNA, 25 bp, SARS Virus
gttcatgttcatgttctgactcatc

SEQ ID NO: 199529 - DNA, 25 bp, SARS Virus
ttcatgttcattgtctgactcatct

SEQ ID NO: 199530 - DNA, 25 bp, SARS Virus
tcatgttcatttgctgactcatctg

SEQ ID NO: 199531 - DNA, 25 bp, SARS Virus
catgttcattttgtgactcatctga

SEQ ID NO: 199532 - DNA, 25 bp, SARS Virus
atgttcattttcggactcatctgag

SEQ ID NO: 199533 - DNA, 25 bp, SARS Virus
tgttcattttctgactcatctgagg

SEQ ID NO: 199534 - DNA, 25 bp, SARS Virus
gttcattttctggctcatctgaggg

SEQ ID NO: 199535 - DNA, 25 bp, SARS Virus
ttcattttctgagtcatctgagggc

SEQ ID NO: 199536 - DNA, 25 bp, SARS Virus
tcattttctgacgcatctgagggcc

SEQ ID NO: 199537 - DNA, 25 bp, SARS Virus
cattttctgactgatctgagggccg

SEQ ID NO: 199538 - DNA, 25 bp, SARS Virus
attttctgactcgtctgagggccgt

SEQ ID NO: 199539 - DNA, 25 bp, SARS Virus
ttttctgactcagctgagggccgtc

SEQ ID NO: 199540 - DNA, 25 bp, SARS Virus
tttctgactcatgtgagggccgtct

SEQ ID NO: 199541 - DNA, 25 bp, SARS Virus
ttctgactcatcggagggccgtctt

SEQ ID NO: 199542 - DNA, 25 bp, SARS Virus
tctgactcatctgagggccgtcttt

SEQ ID NO: 199543 - DNA, 25 bp, SARS Virus
ctgactcatctgggggccgtctttc

SEQ ID NO: 199544 - DNA, 25 bp, SARS Virus
tgactcatctgagggccgtctttcg

SEQ ID NO: 199545 - DNA, 25 bp, SARS Virus
gactcatctgagggccgtctttcga

SEQ ID NO: 199546 - DNA, 25 bp, SARS Virus
actcatctgagggccgtctttcgac

SEQ ID NO: 199547 - DNA, 25 bp, SARS Virus
ctcatctgaggggcgtctttcgaca

SEQ ID NO: 199548 - DNA, 25 bp, SARS Virus
tcatctgagggcggtctttcgacat

SEQ ID NO: 199549 - DNA, 25 bp, SARS Virus
catctgagggccgtctttcgacatt

SEQ ID NO: 199550 - DNA, 25 bp, SARS Virus
atctgagggccggctttcgacattc

SEQ ID NO: 199551 - DNA, 25 bp, SARS Virus
tctgagggccgtgtttcgacattcg

SEQ ID NO: 199552 - DNA, 25 bp, SARS Virus
ctgagggccgtcgttcgacattcga

SEQ ID NO: 199553 - DNA, 25 bp, SARS Virus
tgagggccgtctgtcgacattcgac

SEQ ID NO: 199554 - DNA, 25 bp, SARS Virus
gagggccgtcttgcgacattcgacc

SEQ ID NO: 199555 - DNA, 25 bp, SARS Virus
agggccgtctttggacattcgacca

SEQ ID NO: 199556 - DNA, 25 bp, SARS Virus
gggccgtctttcgacattcgaccat

SEQ ID NO: 199557 - DNA, 25 bp, SARS Virus
ggccgtctttcggcattcgaccatg

SEQ ID NO: 199558 - DNA, 25 bp, SARS Virus
gccgtctttcgagattcgaccatgg

SEQ ID NO: 199559 - DNA, 25 bp, SARS Virus
ccgtctttcgacgttcgaccatggt

SEQ ID NO: 199560 - DNA, 25 bp, SARS Virus
cgtctttcgacagtcgaccatggtc

SEQ ID NO: 199561 - DNA, 25 bp, SARS Virus
gtctttcgacatgcgaccatggtct

SEQ ID NO: 199562 - DNA, 25 bp, SARS Virus
tctttcgacattggaccatggtctg

SEQ ID NO: 199563 - DNA, 25 bp, SARS Virus
ctttcgacattcgaccatggtctgt

SEQ ID NO: 199564 - DNA, 25 bp, SARS Virus
tttcgacattcggccatggtctgtc

SEQ ID NO: 199565 - DNA, 25 bp, SARS Virus
ttcgacattcgagcatggtctgtct

SEQ ID NO: 199566 - DNA, 25 bp, SARS Virus
tcgacattcgacgatggtctgtctc

SEQ ID NO: 199567 - DNA, 25 bp, SARS Virus
cgacattcgaccgtggtctgtctca

SEQ ID NO: 199568 - DNA, 25 bp, SARS Virus
gacattcgaccagggtctgtctcat

SEQ ID NO: 199569 - DNA, 25 bp, SARS Virus
acattcgaccatggtctgtctcata

SEQ ID NO: 199570 - DNA, 25 bp, SARS Virus
cattcgaccatggtctgtctcatat

SEQ ID NO: 199571 - DNA, 25 bp, SARS Virus
attcgaccatgggctgtctcatatc

SEQ ID NO: 199572 - DNA, 25 bp, SARS Virus
ttcgaccatggtgtgtctcatatca

SEQ ID NO: 199573 - DNA, 25 bp, SARS Virus
tcgaccatggtcggtctcatatcac

SEQ ID NO: 199574 - DNA, 25 bp, SARS Virus
cgaccatggtctgtctcatatcact

SEQ ID NO: 199575 - DNA, 25 bp, SARS Virus
gaccatggtctggctcatatcactt

SEQ ID NO: 199576 - DNA, 25 bp, SARS Virus
accatggtctgtgtcatatcacttt

SEQ ID NO: 199577 - DNA, 25 bp, SARS Virus
ccatggtctgtcgcatatcactttc

SEQ ID NO: 199578 - DNA, 25 bp, SARS Virus
catggtctgtctgatatcactttct

SEQ ID NO: 199579 - DNA, 25 bp, SARS Virus
atggtctgtctcgtatcactttctg

SEQ ID NO: 199580 - DNA, 25 bp, SARS Virus
tggtctgtctcagatcactttctgt

SEQ ID NO: 199581 - DNA, 25 bp, SARS Virus
ggtctgtctcatgtcactttctgta

SEQ ID NO: 199582 - DNA, 25 bp, SARS Virus
gtctgtctcatagcactttctgtag

SEQ ID NO: 199583 - DNA, 25 bp, SARS Virus
tctgtctcatatgactttctgtagt

SEQ ID NO: 199584 - DNA, 25 bp, SARS Virus
ctgtctcatatcgctttctgtagtt

SEQ ID NO: 199585 - DNA, 25 bp, SARS Virus
tgtctcatatcagtttctgtagttt

SEQ ID NO: 199586 - DNA, 25 bp, SARS Virus
gtctcatatcacgttctgtagtttt

SEQ ID NO: 199587 - DNA, 25 bp, SARS Virus
tctcatatcactgtctgtagttttt

SEQ ID NO: 199588 - DNA, 25 bp, SARS Virus
ctcatatcacttgctgtagtttttg

SEQ ID NO: 199589 - DNA, 25 bp, SARS Virus
tcatatcactttgtgtagtttttgt

SEQ ID NO: 199590 - DNA, 25 bp, SARS Virus
catatcactttcggtagtttttgtt

SEQ ID NO: 199591 - DNA, 25 bp, SARS Virus
atatcactttctgtagtttttgttt

SEQ ID NO: 199592 - DNA, 25 bp, SARS Virus
tatcactttctggagtttttgtttt

SEQ ID NO: 199593 - DNA, 25 bp, SARS Virus
atcactttctgtggtttttgttttc

SEQ ID NO: 199594 - DNA, 25 bp, SARS Virus
tcactttctgtagtttttgttttca

SEQ ID NO: 199595 - DNA, 25 bp, SARS Virus
cactttctgtaggttttgttttcac

SEQ ID NO: 199596 - DNA, 25 bp, SARS Virus
actttctgtagtgtttgttttcacg

SEQ ID NO: 199597 - DNA, 25 bp, SARS Virus
ctttctgtagttgttgttttcacgt

SEQ ID NO: 199598 - DNA, 25 bp, SARS Virus
tttctgtagtttgtgttttcacgta

SEQ ID NO: 199599 - DNA, 25 bp, SARS Virus
ttctgtagttttggttttcacgtaa

SEQ ID NO: 199600 - DNA, 25 bp, SARS Virus
tctgtagtttttgttttcacgtaat

SEQ ID NO: 199601 - DNA, 25 bp, SARS Virus
ctgtagtttttggtttcacgtaatc

SEQ ID NO: 199602 - DNA, 25 bp, SARS Virus
tgtagtttttgtgttcacgtaatcg

SEQ ID NO: 199603 - DNA, 25 bp, SARS Virus
gtagtttttgttgtcacgtaatcgt

SEQ ID NO: 199604 - DNA, 25 bp, SARS Virus
tagtttttgtttgcacgtaatcgtc

SEQ ID NO: 199605 - DNA, 25 bp, SARS Virus
agtttttgttttgacgtaatcgtcg

SEQ ID NO: 199606 - DNA, 25 bp, SARS Virus
gtttttgttttcgcgtaatcgtcgt

SEQ ID NO: 199607 - DNA, 25 bp, SARS Virus
tttttgttttcaggtaatcgtcgtt

SEQ ID NO: 199608 - DNA, 25 bp, SARS Virus
ttttgttttcacgtaatcgtcgttg

SEQ ID NO: 199609 - DNA, 25 bp, SARS Virus
tttgttttcacggaatcgtcgttgt

SEQ ID NO: 199610 - DNA, 25 bp, SARS Virus
ttgttttcacgtgatcgtcgttgtt

SEQ ID NO: 199611 - DNA, 25 bp, SARS Virus
tgttttcacgtagtcgtcgttgttg

SEQ ID NO: 199612 - DNA, 25 bp, SARS Virus
gttttcacgtaagcgtcgttgttgt

SEQ ID NO: 199613 - DNA, 25 bp, SARS Virus
ttttcacgtaatggtcgttgttgta

SEQ ID NO: 199614 - DNA, 25 bp, SARS Virus
tttcacgtaatcgtcgttgttgtac

SEQ ID NO: 199615 - DNA, 25 bp, SARS Virus
ttcacgtaatcggcgttgttgtacc

SEQ ID NO: 199616 - DNA, 25 bp, SARS Virus
tcacgtaatcgtggttgttgtacca

SEQ ID NO: 199617 - DNA, 25 bp, SARS Virus
cacgtaatcgtcgttgttgtaccaa

SEQ ID NO: 199618 - DNA, 25 bp, SARS Virus
acgtaatcgtcggtgttgtaccaac

SEQ ID NO: 199619 - DNA, 25 bp, SARS Virus
cgtaatcgtcgtggttgtaccaaca

SEQ ID NO: 199620 - DNA, 25 bp, SARS Virus
gtaatcgtcgttgttgtaccaacat

SEQ ID NO: 199621 - DNA, 25 bp, SARS Virus
taatcgtcgttggtgtaccaacatg

SEQ ID NO: 199622 - DNA, 25 bp, SARS Virus
aatcgtcgttgtggtaccaacatga

SEQ ID NO: 199623 - DNA, 25 bp, SARS Virus
atcgtcgttgttgtaccaacatgag

SEQ ID NO: 199624 - DNA, 25 bp, SARS Virus
tcgtcgttgttggaccaacatgagt

SEQ ID NO: 199625 - DNA, 25 bp, SARS Virus
acgatttcagtatatctcggaaacg

SEQ ID NO: 199626 - DNA, 25 bp, SARS Virus
cgatttcagtaattctcggaaacga

SEQ ID NO: 199627 - DNA, 25 bp, SARS Virus
gatttcagtaaatctcggaaacgat

SEQ ID NO: 199628 - DNA, 25 bp, SARS Virus
atttcagtaaatttcggaaacgatt

SEQ ID NO: 199629 - DNA, 25 bp, SARS Virus
tttcagtaaatctcggaaacgattc

SEQ ID NO: 199630 - DNA, 25 bp, SARS Virus
ttcagtaaatcttggaaacgattca

SEQ ID NO: 199631 - DNA, 25 bp, SARS Virus
tcagtaaatctctgaaacgattcac

SEQ ID NO: 199632 - DNA, 25 bp, SARS Virus
cagtaaatctcgtaaacgattcacc

SEQ ID NO: 199633 - DNA, 25 bp, SARS Virus
agtaaatctcggtaacgattcaccg

SEQ ID NO: 199634 - DNA, 25 bp, SARS Virus
gtaaatctcggatacgattcaccgt

SEQ ID NO: 199635 - DNA, 25 bp, SARS Virus
taaatctcggaatcgattcaccgtc

SEQ ID NO: 199636 - DNA, 25 bp, SARS Virus
aaatctcggaaatgattcaccgtcg

SEQ ID NO: 199637 - DNA, 25 bp, SARS Virus
aatctcggaaactattcaccgtcgt

SEQ ID NO: 199638 - DNA, 25 bp, SARS Virus
atctcggaaacgtttcaccgtcgtt

SEQ ID NO: 199639 - DNA, 25 bp, SARS Virus
tctcggaaacgattcaccgtcgttc

SEQ ID NO: 199640 - DNA, 25 bp, SARS Virus
ctcggaaacgattcaccgtcgttcg

SEQ ID NO: 199641 - DNA, 25 bp, SARS Virus
tcggaaacgatttaccgtcgttcga

SEQ ID NO: 199642 - DNA, 25 bp, SARS Virus
cggaaacgattctccgtcgttcgac

SEQ ID NO: 199643 - DNA, 25 bp, SARS Virus
ggaaacgattcatcgtcgttcgacg

SEQ ID NO: 199644 - DNA, 25 bp, SARS Virus
gaaacgattcactgtcgttcgacga

SEQ ID NO: 199645 - DNA, 25 bp, SARS Virus
aaacgattcaccttcgttcgacgaa

SEQ ID NO: 199646 - DNA, 25 bp, SARS Virus
aacgattcaccgtcgttcgacgaag

SEQ ID NO: 199647 - DNA, 25 bp, SARS Virus
acgattcaccgttgttcgacgaagt

SEQ ID NO: 199648 - DNA, 25 bp, SARS Virus
cgattcaccgtctttcgacgaagtg

SEQ ID NO: 199649 - DNA, 25 bp, SARS Virus
gattcaccgtcgttcgacgaagtgc

SEQ ID NO: 199650 - DNA, 25 bp, SARS Virus
attcaccgtcgttcgacgaagtgct

SEQ ID NO: 199651 - DNA, 25 bp, SARS Virus
ttcaccgtcgtttgacgaagtgcta

SEQ ID NO: 199652 - DNA, 25 bp, SARS Virus
tcaccgtcgttctacgaagtgctat

SEQ ID NO: 199653 - DNA, 25 bp, SARS Virus
caccgtcgttcgtcgaagtgctatc

SEQ ID NO: 199654 - DNA, 25 bp, SARS Virus
accgtcgttcgatgaagtgctatcg

SEQ ID NO: 199655 - DNA, 25 bp, SARS Virus
ccgtcgttcgactaagtgctatcga

SEQ ID NO: 199656 - DNA, 25 bp, SARS Virus
cgtcgttcgacgtagtgctatcgac

SEQ ID NO: 199657 - DNA, 25 bp, SARS Virus
gtcgttcgacgatgtgctatcgacc

SEQ ID NO: 199658 - DNA, 25 bp, SARS Virus
tcgttcgacgaattgctatcgacca

SEQ ID NO: 199659 - DNA, 25 bp, SARS Virus
cgttcgacgaagtgctatcgaccat

SEQ ID NO: 199660 - DNA, 25 bp, SARS Virus
gttcgacgaagttctatcgaccatc

SEQ ID NO: 199661 - DNA, 25 bp, SARS Virus
ttcgacgaagtgttatcgaccatca

SEQ ID NO: 199662 - DNA, 25 bp, SARS Virus
tcgacgaagtgctatcgaccatcat

SEQ ID NO: 199663 - DNA, 25 bp, SARS Virus
cgacgaagtgctttcgaccatcata

SEQ ID NO: 199664 - DNA, 25 bp, SARS Virus
gacgaagtgctatcgaccatcatag

SEQ ID NO: 199665 - DNA, 25 bp, SARS Virus
acgaagtgctattgaccatcataga

SEQ ID NO: 199666 - DNA, 25 bp, SARS Virus
cgaagtgctatctaccatcatagat

SEQ ID NO: 199667 - DNA, 25 bp, SARS Virus
gaagtgctatcgtccatcatagatt

SEQ ID NO: 199668 - DNA, 25 bp, SARS Virus
aagtgctatcgatcatcatagattc

SEQ ID NO: 199669 - DNA, 25 bp, SARS Virus
agtgctatcgactatcatagattcc

SEQ ID NO: 199670 - DNA, 25 bp, SARS Virus
gtgctatcgaccttcatagattccg

SEQ ID NO: 199671 - DNA, 25 bp, SARS Virus
tgctatcgaccatcatagattccga

SEQ ID NO: 199672 - DNA, 25 bp, SARS Virus
gctatcgaccattatagattccgag

SEQ ID NO: 199673 - DNA, 25 bp, SARS Virus
ctatcgaccatcttagattccgagg

SEQ ID NO: 199674 - DNA, 25 bp, SARS Virus
tatcgaccatcatagattccgaggt

SEQ ID NO: 199675 - DNA, 25 bp, SARS Virus
atcgaccatcattgattccgaggtg

SEQ ID NO: 199676 - DNA, 25 bp, SARS Virus
tcgaccatcatatattccgaggtga

SEQ ID NO: 199677 - DNA, 25 bp, SARS Virus
cgaccatcatagtttccgaggtgac

SEQ ID NO: 199678 - DNA, 25 bp, SARS Virus
gaccatcatagattccgaggtgact

SEQ ID NO: 199679 - DNA, 25 bp, SARS Virus
accatcatagattccgaggtgactt

SEQ ID NO: 199680 - DNA, 25 bp, SARS Virus
ccatcatagatttcgaggtgacttt

SEQ ID NO: 199681 - DNA, 25 bp, SARS Virus
catcatagattctgaggtgacttta

SEQ ID NO: 199682 - DNA, 25 bp, SARS Virus
atcatagattcctaggtgactttat

SEQ ID NO: 199683 - DNA, 25 bp, SARS Virus
tcatagattccgtggtgactttatg

SEQ ID NO: 199684 - DNA, 25 bp, SARS Virus
catagattccgatgtgactttatga

SEQ ID NO: 199685 - DNA, 25 bp, SARS Virus
atagattccgagttgactttatgaa

SEQ ID NO: 199686 - DNA, 25 bp, SARS Virus
tagattccgaggtgactttatgaac

SEQ ID NO: 199687 - DNA, 25 bp, SARS Virus
agattccgaggttactttatgaaca

SEQ ID NO: 199688 - DNA, 25 bp, SARS Virus
gattccgaggtgtctttatgaacat

SEQ ID NO: 199689 - DNA, 25 bp, SARS Virus
attccgaggtgattttatgaacatg

SEQ ID NO: 199690 - DNA, 25 bp, SARS Virus
ttccgaggtgactttatgaacatga

SEQ ID NO: 199691 - DNA, 25 bp, SARS Virus
tccgaggtgactttatgaacatgaa

SEQ ID NO: 199692 - DNA, 25 bp, SARS Virus
ccgaggtgactttatgaacatgaac

SEQ ID NO: 199693 - DNA, 25 bp, SARS Virus
cgaggtgactttttgaacatgaaca

SEQ ID NO: 199694 - DNA, 25 bp, SARS Virus
gaggtgactttatgaacatgaacaa

SEQ ID NO: 199695 - DNA, 25 bp, SARS Virus
aggtgactttattaacatgaacaat

SEQ ID NO: 199696 - DNA, 25 bp, SARS Virus
ggtgactttatgtacatgaacaata

SEQ ID NO: 199697 - DNA, 25 bp, SARS Virus
gtgactttatgatcatgaacaatat

SEQ ID NO: 199698 - DNA, 25 bp, SARS Virus
tgactttatgaatatgaacaatata

SEQ ID NO: 199699 - DNA, 25 bp, SARS Virus
gactttatgaacttgaacaatatat

SEQ ID NO: 199700 - DNA, 25 bp, SARS Virus
actttatgaacatgaacaatatatc

SEQ ID NO: 199701 - DNA, 25 bp, SARS Virus
ctttatgaacattaacaatatatct

SEQ ID NO: 199702 - DNA, 25 bp, SARS Virus
tttatgaacatgtacaatatatctc

SEQ ID NO: 199703 - DNA, 25 bp, SARS Virus
ttatgaacatgatcaatatatctcg

SEQ ID NO: 199704 - DNA, 25 bp, SARS Virus
tatgaacatgaataatatatctcgt

SEQ ID NO: 199705 - DNA, 25 bp, SARS Virus
atgaacatgaactatatatctcgtt

SEQ ID NO: 199706 - DNA, 25 bp, SARS Virus
tgaacatgaacattatatctcgttc

SEQ ID NO: 199707 - DNA, 25 bp, SARS Virus
gaacatgaacaatatatctcgttct

SEQ ID NO: 199708 - DNA, 25 bp, SARS Virus
aacatgaacaatttatctcgttcta

SEQ ID NO: 199709 - DNA, 25 bp, SARS Virus
acatgaacaatatatctcgttctat

SEQ ID NO: 199710 - DNA, 25 bp, SARS Virus
catgaacaatatttctcgttctatg

SEQ ID NO: 199711 - DNA, 25 bp, SARS Virus
atgaacaatatatctcgttctatgg

SEQ ID NO: 199712 - DNA, 25 bp, SARS Virus
tgaacaatatatttcgttctatgga

SEQ ID NO: 199713 - DNA, 25 bp, SARS Virus
gaacaatatatctcgttctatggac

SEQ ID NO: 199714 - DNA, 25 bp, SARS Virus
aacaatatatcttgttctatggaca

SEQ ID NO: 199715 - DNA, 25 bp, SARS Virus
acaatatatctctttctatggacaa

SEQ ID NO: 199716 - DNA, 25 bp, SARS Virus
caatatatctcgttctatggacaat

SEQ ID NO: 199717 - DNA, 25 bp, SARS Virus
aatatatctcgttctatggacaata

SEQ ID NO: 199718 - DNA, 25 bp, SARS Virus
atatatctcgttttatggacaatat

SEQ ID NO: 199719 - DNA, 25 bp, SARS Virus
tatatctcgttctatggacaatatg

SEQ ID NO: 199720 - DNA, 25 bp, SARS Virus
atatctcgttctttggacaatatga

SEQ ID NO: 199721 - DNA, 25 bp, SARS Virus
tatctcgttctatggacaatatgac

SEQ ID NO: 199722 - DNA, 25 bp, SARS Virus
atctcgttctattgacaatatgaca

SEQ ID NO: 199723 - DNA, 25 bp, SARS Virus
tctcgttctatgtacaatatgacac

SEQ ID NO: 199724 - DNA, 25 bp, SARS Virus
ctcgttctatggtcaatatgacaca

SEQ ID NO: 199725 - DNA, 25 bp, SARS Virus
tcgttctatggataatatgacacat

SEQ ID NO: 199726 - DNA, 25 bp, SARS Virus
cgttctatggactatatgacacatt

SEQ ID NO: 199727 - DNA, 25 bp, SARS Virus
gttctatggacattatgacacattc

SEQ ID NO: 199728 - DNA, 25 bp, SARS Virus
ttctatggacaatatgacacattca

SEQ ID NO: 199729 - DNA, 25 bp, SARS Virus
tctatggacaatttgacacattcac

SEQ ID NO: 199730 - DNA, 25 bp, SARS Virus
ctatggacaatatgacacattcacc

SEQ ID NO: 199731 - DNA, 25 bp, SARS Virus
tatggacaatattacacattcaccg

SEQ ID NO: 199732 - DNA, 25 bp, SARS Virus
atggacaatatgtcacattcaccgt

SEQ ID NO: 199733 - DNA, 25 bp, SARS Virus
tggacaatatgatacattcaccgtt

SEQ ID NO: 199734 - DNA, 25 bp, SARS Virus
ggacaatatgactcattcaccgttg

SEQ ID NO: 199735 - DNA, 25 bp, SARS Virus
gacaatatgacatattcaccgttgt

SEQ ID NO: 199736 - DNA, 25 bp, SARS Virus
acaatatgacactttcaccgttgtc

SEQ ID NO: 199737 - DNA, 25 bp, SARS Virus
caatatgacacattcaccgttgtca

SEQ ID NO: 199738 - DNA, 25 bp, SARS Virus
aatatgacacattcaccgttgtcac

SEQ ID NO: 199739 - DNA, 25 bp, SARS Virus
atatgacacatttaccgttgtcaca

SEQ ID NO: 199740 - DNA, 25 bp, SARS Virus
tatgacacattctccgttgtcacag

SEQ ID NO: 199741 - DNA, 25 bp, SARS Virus
atgacacattcatcgttgtcacaga

SEQ ID NO: 199742 - DNA, 25 bp, SARS Virus
tgacacattcactgttgtcacagag

SEQ ID NO: 199743 - DNA, 25 bp, SARS Virus
gacacattcacctttgtcacagagc

SEQ ID NO: 199744 - DNA, 25 bp, SARS Virus
acacattcaccgttgtcacagagcg

SEQ ID NO: 199745 - DNA, 25 bp, SARS Virus
cacattcaccgttgtcacagagcga

SEQ ID NO: 199746 - DNA, 25 bp, SARS Virus
acattcaccgttttcacagagcgat

SEQ ID NO: 199747 - DNA, 25 bp, SARS Virus
cattcaccgttgtcacagagcgatg

SEQ ID NO: 199748 - DNA, 25 bp, SARS Virus
attcaccgttgttacagagcgatgc

SEQ ID NO: 199749 - DNA, 25 bp, SARS Virus
ttcaccgttgtctcagagcgatgcg

SEQ ID NO: 199750 - DNA, 25 bp, SARS Virus
tcaccgttgtcatagagcgatgcgt

SEQ ID NO: 199751 - DNA, 25 bp, SARS Virus
caccgttgtcactgagcgatgcgtt

SEQ ID NO: 199752 - DNA, 25 bp, SARS Virus
accgttgtcacatagcgatgcgtta

SEQ ID NO: 199753 - DNA, 25 bp, SARS Virus
ccgttgtcacagtgcgatgcgttaa

SEQ ID NO: 199754 - DNA, 25 bp, SARS Virus
cgttgtcacagatcgatgcgttaaa

SEQ ID NO: 199755 - DNA, 25 bp, SARS Virus
gttgtcacagagtgatgcgttaaaa

SEQ ID NO: 199756 - DNA, 25 bp, SARS Virus
ttgtcacagagctatgcgttaaaat

SEQ ID NO: 199757 - DNA, 25 bp, SARS Virus
tgtcacagagcgttgcgttaaaatc

SEQ ID NO: 199758 - DNA, 25 bp, SARS Virus
gtcacagagcgatgcgttaaaatcc

SEQ ID NO: 199759 - DNA, 25 bp, SARS Virus
tcacagagcgattcgttaaaatcca

SEQ ID NO: 199760 - DNA, 25 bp, SARS Virus
cacagagcgatgtgttaaaatccat

SEQ ID NO: 199761 - DNA, 25 bp, SARS Virus
acagagcgatgctttaaaatccatg

SEQ ID NO: 199762 - DNA, 25 bp, SARS Virus
cagagcgatgcgttaaaatccatgt

SEQ ID NO: 199763 - DNA, 25 bp, SARS Virus
agagcgatgcgttaaaatccatgta

SEQ ID NO: 199764 - DNA, 25 bp, SARS Virus
gagcgatgcgtttaaatccatgtaa

SEQ ID NO: 199765 - DNA, 25 bp, SARS Virus
agcgatgcgttataatccatgtaaa

SEQ ID NO: 199766 - DNA, 25 bp, SARS Virus
gcgatgcgttaatatccatgtaaag

SEQ ID NO: 199767 - DNA, 25 bp, SARS Virus
cgatgcgttaaattccatgtaaagg

SEQ ID NO: 199768 - DNA, 25 bp, SARS Virus
gatgcgttaaaatccatgtaaagga

SEQ ID NO: 199769 - DNA, 25 bp, SARS Virus
atgcgttaaaattcatgtaaaggaa

SEQ ID NO: 199770 - DNA, 25 bp, SARS Virus
tgcgttaaaatctatgtaaaggaac

SEQ ID NO: 199771 - DNA, 25 bp, SARS Virus
gcgttaaaatccttgtaaaggaaca

SEQ ID NO: 199772 - DNA, 25 bp, SARS Virus
cgttaaaatccatgtaaaggaacaa

SEQ ID NO: 199773 - DNA, 25 bp, SARS Virus
gttaaaatccatttaaaggaacaac

SEQ ID NO: 199774 - DNA, 25 bp, SARS Virus
ttaaaatccatgtaaaggaacaact

SEQ ID NO: 199775 - DNA, 25 bp, SARS Virus
taaaatccatgttaaggaacaactc

SEQ ID NO: 199776 - DNA, 25 bp, SARS Virus
aaaatccatgtataggaacaactcg

SEQ ID NO: 199777 - DNA, 25 bp, SARS Virus
aaatccatgtaatggaacaactcgt

SEQ ID NO: 199778 - DNA, 25 bp, SARS Virus
aatccatgtaaatgaacaactcgtt

SEQ ID NO: 199779 - DNA, 25 bp, SARS Virus
atccatgtaaagtaacaactcgttt

SEQ ID NO: 199780 - DNA, 25 bp, SARS Virus
tccatgtaaaggtacaactcgtttt

SEQ ID NO: 199781 - DNA, 25 bp, SARS Virus
ccatgtaaaggatcaactcgttttt

SEQ ID NO: 199782 - DNA, 25 bp, SARS Virus
catgtaaaggaataactcgtttttc

SEQ ID NO: 199783 - DNA, 25 bp, SARS Virus
atgtaaaggaactactcgtttttcc

SEQ ID NO: 199784 - DNA, 25 bp, SARS Virus
tgtaaaggaacatctcgtttttcca

SEQ ID NO: 199785 - DNA, 25 bp, SARS Virus
gtaaaggaacaattcgtttttccat

SEQ ID NO: 199786 - DNA, 25 bp, SARS Virus
taaaggaacaactcgtttttccatg

SEQ ID NO: 199787 - DNA, 25 bp, SARS Virus
aaaggaacaacttgtttttccatgt

SEQ ID NO: 199788 - DNA, 25 bp, SARS Virus
aaggaacaactcttttttccatgtg

SEQ ID NO: 199789 - DNA, 25 bp, SARS Virus
aggaacaactcgtttttccatgtgt

SEQ ID NO: 199790 - DNA, 25 bp, SARS Virus
ggaacaactcgtttttccatgtgtt

SEQ ID NO: 199791 - DNA, 25 bp, SARS Virus
gaacaactcgtttttccatgtgttt

SEQ ID NO: 199792 - DNA, 25 bp, SARS Virus
aacaactcgtttttccatgtgtttc

SEQ ID NO: 199793 - DNA, 25 bp, SARS Virus
acaactcgtttttccatgtgtttcg

SEQ ID NO: 199794 - DNA, 25 bp, SARS Virus
caactcgttttttcatgtgtttcgt

SEQ ID NO: 199795 - DNA, 25 bp, SARS Virus
aactcgtttttctatgtgtttcgtc

SEQ ID NO: 199796 - DNA, 25 bp, SARS Virus
actcgtttttccttgtgtttcgtcg

SEQ ID NO: 199797 - DNA, 25 bp, SARS Virus
ctcgtttttccatgtgtttcgtcgg

SEQ ID NO: 199798 - DNA, 25 bp, SARS Virus
tcgtttttccatttgtttcgtcgga

SEQ ID NO: 199799 - DNA, 25 bp, SARS Virus
cgtttttccatgtgtttcgtcggag

SEQ ID NO: 199800 - DNA, 25 bp, SARS Virus
gtttttccatgtttttcgtcggagg

SEQ ID NO: 199801 - DNA, 25 bp, SARS Virus
tttttccatgtgtttcgtcggagga

SEQ ID NO: 199802 - DNA, 25 bp, SARS Virus
ttttccatgtgtttcgtcggaggag

SEQ ID NO: 199803 - DNA, 25 bp, SARS Virus
tttccatgtgtttcgtcggaggagc

SEQ ID NO: 199804 - DNA, 25 bp, SARS Virus
ttccatgtgttttgtcggaggagct

SEQ ID NO: 199805 - DNA, 25 bp, SARS Virus
tccatgtgtttcttcggaggagctt

SEQ ID NO: 199806 - DNA, 25 bp, SARS Virus
ccatgtgtttcgtcggaggagcttc

SEQ ID NO: 199807 - DNA, 25 bp, SARS Virus
catgtgtttcgttggaggagcttcc

SEQ ID NO: 199808 - DNA, 25 bp, SARS Virus
atgtgtttcgtctgaggagcttcca

SEQ ID NO: 199809 - DNA, 25 bp, SARS Virus
tgtgtttcgtcgtaggagcttccat

SEQ ID NO: 199810 - DNA, 25 bp, SARS Virus
gtgtttcgtcggtggagcttccatg

SEQ ID NO: 199811 - DNA, 25 bp, SARS Virus
tgtttcgtcggatgagcttccatga

SEQ ID NO: 199812 - DNA, 25 bp, SARS Virus
gtttcgtcggagtagcttccatgat

SEQ ID NO: 199813 - DNA, 25 bp, SARS Virus
tttcgtcggaggtgcttccatgatt

SEQ ID NO: 199814 - DNA, 25 bp, SARS Virus
ttcgtcggaggatcttccatgattt

SEQ ID NO: 199815 - DNA, 25 bp, SARS Virus
tcgtcggaggagtttccatgattta

SEQ ID NO: 199816 - DNA, 25 bp, SARS Virus
cgtcggaggagcttccatgatttac

SEQ ID NO: 199817 - DNA, 25 bp, SARS Virus
gtcggaggagcttccatgatttaca

SEQ ID NO: 199818 - DNA, 25 bp, SARS Virus
tcggaggagctttcatgatttacat

SEQ ID NO: 199819 - DNA, 25 bp, SARS Virus
cggaggagcttctatgatttacatt

SEQ ID NO: 199820 - DNA, 25 bp, SARS Virus
ggaggagcttccttgatttacattg

SEQ ID NO: 199821 - DNA, 25 bp, SARS Virus
gaggagcttccatgatttacattga

SEQ ID NO: 199822 - DNA, 25 bp, SARS Virus
aggagcttccattatttacattgag

SEQ ID NO: 199823 - DNA, 25 bp, SARS Virus
ggagcttccatgttttacattgagg

SEQ ID NO: 199824 - DNA, 25 bp, SARS Virus
gagcttccatgatttacattgaggt

SEQ ID NO: 199825 - DNA, 25 bp, SARS Virus
agcttccatgatttacattgaggta

SEQ ID NO: 199826 - DNA, 25 bp, SARS Virus
gcttccatgatttacattgaggtaa

SEQ ID NO: 199827 - DNA, 25 bp, SARS Virus
cttccatgattttcattgaggtaat

SEQ ID NO: 199828 - DNA, 25 bp, SARS Virus
ttccatgatttatattgaggtaatt

SEQ ID NO: 199829 - DNA, 25 bp, SARS Virus
tccatgatttactttgaggtaattt

SEQ ID NO: 199830 - DNA, 25 bp, SARS Virus
ccatgatttacattgaggtaatttg

SEQ ID NO: 199831 - DNA, 25 bp, SARS Virus
catgatttacattgaggtaatttgt

SEQ ID NO: 199832 - DNA, 25 bp, SARS Virus
atgatttacatttaggtaatttgta

SEQ ID NO: 199833 - DNA, 25 bp, SARS Virus
tgatttacattgtggtaatttgtac

SEQ ID NO: 199834 - DNA, 25 bp, SARS Virus
gatttacattgatgtaatttgtact

SEQ ID NO: 199835 - DNA, 25 bp, SARS Virus
atttacattgagttaatttgtactg

SEQ ID NO: 199836 - DNA, 25 bp, SARS Virus
tttacattgaggtaatttgtactga

SEQ ID NO: 199837 - DNA, 25 bp, SARS Virus
ttacattgaggttatttgtactgag

SEQ ID NO: 199838 - DNA, 25 bp, SARS Virus
tacattgaggtattttgtactgaga

SEQ ID NO: 199839 - DNA, 25 bp, SARS Virus
acattgaggtaatttgtactgagaa

SEQ ID NO: 199840 - DNA, 25 bp, SARS Virus
cattgaggtaatttgtactgagaaa

SEQ ID NO: 199841 - DNA, 25 bp, SARS Virus
attgaggtaatttgtactgagaaaa

SEQ ID NO: 199842 - DNA, 25 bp, SARS Virus
ttgaggtaatttttactgagaaaag

SEQ ID NO: 199843 - DNA, 25 bp, SARS Virus
tgaggtaatttgtactgagaaaagg

SEQ ID NO: 199844 - DNA, 25 bp, SARS Virus
gaggtaatttgttctgagaaaagga

SEQ ID NO: 199845 - DNA, 25 bp, SARS Virus
aggtaatttgtattgagaaaaggat

SEQ ID NO: 199846 - DNA, 25 bp, SARS Virus
ggtaatttgtactgagaaaaggatt

SEQ ID NO: 199847 - DNA, 25 bp, SARS Virus
gtaatttgtacttagaaaaggattc

SEQ ID NO: 199848 - DNA, 25 bp, SARS Virus
taatttgtactgtgaaaaggattct

SEQ ID NO: 199849 - DNA, 25 bp, SARS Virus
aatttgtactgataaaaggattcta

SEQ ID NO: 199850 - DNA, 25 bp, SARS Virus
atttgtactgagtaaaggattctat

SEQ ID NO: 199851 - DNA, 25 bp, SARS Virus
tttgtactgagataaggattctatc

SEQ ID NO: 199852 - DNA, 25 bp, SARS Virus
ttgtactgagaataggattctatca

SEQ ID NO: 199853 - DNA, 25 bp, SARS Virus
tgtactgagaaatggattctatcaa

SEQ ID NO: 199854 - DNA, 25 bp, SARS Virus
gtactgagaaaatgattctatcaac

SEQ ID NO: 199855 - DNA, 25 bp, SARS Virus
tactgagaaaagtattctatcaaca

SEQ ID NO: 199856 - DNA, 25 bp, SARS Virus
actgagaaaaggtttctatcaacaa

SEQ ID NO: 199857 - DNA, 25 bp, SARS Virus
ctgagaaaaggattctatcaacaat

SEQ ID NO: 199858 - DNA, 25 bp, SARS Virus
tgagaaaaggattctatcaacaatt

SEQ ID NO: 199859 - DNA, 25 bp, SARS Virus
gagaaaaggattttatcaacaattt

SEQ ID NO: 199860 - DNA, 25 bp, SARS Virus
agaaaaggattctatcaacaatttc

SEQ ID NO: 199861 - DNA, 25 bp, SARS Virus
gaaaaggattctttcaacaatttct

SEQ ID NO: 199862 - DNA, 25 bp, SARS Virus
aaaaggattctatcaacaatttctt

SEQ ID NO: 199863 - DNA, 25 bp, SARS Virus
aaaggattctattaacaatttcttg

SEQ ID NO: 199864 - DNA, 25 bp, SARS Virus
aaggattctatctacaatttcttgg

SEQ ID NO: 199865 - DNA, 25 bp, SARS Virus
aggattctatcatcaatttcttggt

SEQ ID NO: 199866 - DNA, 25 bp, SARS Virus
ggattctatcaataatttcttggtt

SEQ ID NO: 199867 - DNA, 25 bp, SARS Virus
gattctatcaactatttcttggtta

SEQ ID NO: 199868 - DNA, 25 bp, SARS Virus
attctatcaacattttcttggttac

SEQ ID NO: 199869 - DNA, 25 bp, SARS Virus
ttctatcaacaatttcttggttacc

SEQ ID NO: 199870 - DNA, 25 bp, SARS Virus
tctatcaacaatttcttggttaccg

SEQ ID NO: 199871 - DNA, 25 bp, SARS Virus
ctatcaacaatttcttggttaccgt

SEQ ID NO: 199872 - DNA, 25 bp, SARS Virus
tatcaacaattttttggttaccgtc

SEQ ID NO: 199873 - DNA, 25 bp, SARS Virus
atcaacaatttcttggttaccgtca

SEQ ID NO: 199874 - DNA, 25 bp, SARS Virus
tcaacaatttcttggttaccgtcac

SEQ ID NO: 199875 - DNA, 25 bp, SARS Virus
caacaatttctttgttaccgtcacg

SEQ ID NO: 199876 - DNA, 25 bp, SARS Virus
aacaatttcttgtttaccgtcacga

SEQ ID NO: 199877 - DNA, 25 bp, SARS Virus
acaatttcttggttaccgtcacgaa

SEQ ID NO: 199878 - DNA, 25 bp, SARS Virus
caatttcttggttaccgtcacgaag

SEQ ID NO: 199879 - DNA, 25 bp, SARS Virus
aatttcttggtttccgtcacgaagt

SEQ ID NO: 199880 - DNA, 25 bp, SARS Virus
atttcttggttatcgtcacgaagtc

SEQ ID NO: 199881 - DNA, 25 bp, SARS Virus
tttcttggttactgtcacgaagtct

SEQ ID NO: 199882 - DNA, 25 bp, SARS Virus
ttcttggttaccttcacgaagtctc

SEQ ID NO: 199883 - DNA, 25 bp, SARS Virus
tcttggttaccgtcacgaagtctct

SEQ ID NO: 199884 - DNA, 25 bp, SARS Virus
cttggttaccgttacgaagtctctt

SEQ ID NO: 199885 - DNA, 25 bp, SARS Virus
ttggttaccgtctcgaagtctcttt

SEQ ID NO: 199886 - DNA, 25 bp, SARS Virus
tggttaccgtcatgaagtctcttta

SEQ ID NO: 199887 - DNA, 25 bp, SARS Virus
ggttaccgtcactaagtctctttat

SEQ ID NO: 199888 - DNA, 25 bp, SARS Virus
gttaccgtcacgtagtctctttatg

SEQ ID NO: 199889 - DNA, 25 bp, SARS Virus
ttaccgtcacgatgtctctttatgt

SEQ ID NO: 199890 - DNA, 25 bp, SARS Virus
taccgtcacgaattctctttatgtc

SEQ ID NO: 199891 - DNA, 25 bp, SARS Virus
accgtcacgaagtctctttatgtct

SEQ ID NO: 199892 - DNA, 25 bp, SARS Virus
ccgtcacgaagtttctttatgtctt

SEQ ID NO: 199893 - DNA, 25 bp, SARS Virus
cgtcacgaagtctctttatgtctta

SEQ ID NO: 199894 - DNA, 25 bp, SARS Virus
gtcacgaagtctttttatgtcttat

SEQ ID NO: 199895 - DNA, 25 bp, SARS Virus
tcacgaagtctctttatgtcttatg

SEQ ID NO: 199896 - DNA, 25 bp, SARS Virus
cacgaagtctctttatgtcttatgt

SEQ ID NO: 199897 - DNA, 25 bp, SARS Virus
acgaagtctctttatgtcttatgta

SEQ ID NO: 199898 - DNA, 25 bp, SARS Virus
cgaagtctctttttgtcttatgtat

SEQ ID NO: 199899 - DNA, 25 bp, SARS Virus
gaagtctctttatgtcttatgtatc

SEQ ID NO: 199900 - DNA, 25 bp, SARS Virus
aagtctctttatttcttatgtatct

SEQ ID NO: 199901 - DNA, 25 bp, SARS Virus
agtctctttatgtcttatgtatcta

SEQ ID NO: 199902 - DNA, 25 bp, SARS Virus
gtctctttatgttttatgtatctaa

SEQ ID NO: 199903 - DNA, 25 bp, SARS Virus
tctctttatgtcttatgtatctaac

SEQ ID NO: 199904 - DNA, 25 bp, SARS Virus
ctctttatgtcttatgtatctaacg

SEQ ID NO: 199905 - DNA, 25 bp, SARS Virus
tctttatgtcttttgtatctaacga

SEQ ID NO: 199906 - DNA, 25 bp, SARS Virus
ctttatgtcttatgtatctaacgac

SEQ ID NO: 199907 - DNA, 25 bp, SARS Virus
tttatgtcttatttatctaacgaca

SEQ ID NO: 199908 - DNA, 25 bp, SARS Virus
ttatgtcttatgtatctaacgacaa

SEQ ID NO: 199909 - DNA, 25 bp, SARS Virus
tatgtcttatgtttctaacgacaat

SEQ ID NO: 199910 - DNA, 25 bp, SARS Virus
atgtcttatgtatctaacgacaata

SEQ ID NO: 199911 - DNA, 25 bp, SARS Virus
tgtcttatgtatttaacgacaatag

SEQ ID NO: 199912 - DNA, 25 bp, SARS Virus
gtcttatgtatctaacgacaatagg

SEQ ID NO: 199913 - DNA, 25 bp, SARS Virus
tcttatgtatcttacgacaataggt

SEQ ID NO: 199914 - DNA, 25 bp, SARS Virus
cttatgtatctatcgacaataggtt

SEQ ID NO: 199915 - DNA, 25 bp, SARS Virus
ttatgtatctaatgacaataggttt

SEQ ID NO: 199916 - DNA, 25 bp, SARS Virus
tatgtatctaactacaataggtttt

SEQ ID NO: 199917 - DNA, 25 bp, SARS Virus
atgtatctaacgtcaataggttttt

SEQ ID NO: 199918 - DNA, 25 bp, SARS Virus
tgtatctaacgataataggtttttc

SEQ ID NO: 199919 - DNA, 25 bp, SARS Virus
gtatctaacgactataggtttttcc

SEQ ID NO: 199920 - DNA, 25 bp, SARS Virus
tatctaacgacattaggtttttccg

SEQ ID NO: 199921 - DNA, 25 bp, SARS Virus
atctaacgacaataggtttttccgt

SEQ ID NO: 199922 - DNA, 25 bp, SARS Virus
tctaacgacaattggtttttccgtg

SEQ ID NO: 199923 - DNA, 25 bp, SARS Virus
ctaacgacaatatgtttttccgtgt

SEQ ID NO: 199924 - DNA, 25 bp, SARS Virus
taacgacaatagttttttccgtgtt

SEQ ID NO: 199925 - DNA, 25 bp, SARS Virus
aacgacaataggtttttccgtgtta

SEQ ID NO: 199926 - DNA, 25 bp, SARS Virus
acgacaataggtttttccgtgttat

SEQ ID NO: 199927 - DNA, 25 bp, SARS Virus
cgacaataggtttttccgtgttatc

SEQ ID NO: 199928 - DNA, 25 bp, SARS Virus
gacaataggtttttccgtgttatcc

SEQ ID NO: 199929 - DNA, 25 bp, SARS Virus
acaataggtttttccgtgttatcct

SEQ ID NO: 199930 - DNA, 25 bp, SARS Virus
caataggttttttcgtgttatcctc

SEQ ID NO: 199931 - DNA, 25 bp, SARS Virus
aataggtttttctgtgttatcctct

SEQ ID NO: 199932 - DNA, 25 bp, SARS Virus
ataggtttttccttgttatcctctt

SEQ ID NO: 199933 - DNA, 25 bp, SARS Virus
taggtttttccgtgttatcctcttt

SEQ ID NO: 199934 - DNA, 25 bp, SARS Virus
aggtttttccgttttatcctctttt

SEQ ID NO: 199935 - DNA, 25 bp, SARS Virus
ggtttttccgtgttatcctcttttg

SEQ ID NO: 199936 - DNA, 25 bp, SARS Virus
gtttttccgtgttatcctcttttgt

SEQ ID NO: 199937 - DNA, 25 bp, SARS Virus
tttttccgtgttttcctcttttgta

SEQ ID NO: 199938 - DNA, 25 bp, SARS Virus
ttttccgtgttatcctcttttgtac

SEQ ID NO: 199939 - DNA, 25 bp, SARS Virus
tttccgtgttattctcttttgtacc

SEQ ID NO: 199940 - DNA, 25 bp, SARS Virus
ttccgtgttatcttcttttgtaccg

SEQ ID NO: 199941 - DNA, 25 bp, SARS Virus
tccgtgttatcctcttttgtaccgt

SEQ ID NO: 199942 - DNA, 25 bp, SARS Virus
ccgtgttatccttttttgtaccgtt

SEQ ID NO: 199943 - DNA, 25 bp, SARS Virus
cgtgttatcctcttttgtaccgttt

SEQ ID NO: 199944 - DNA, 25 bp, SARS Virus
gtgttatcctcttttgtaccgtttg

SEQ ID NO: 199945 - DNA, 25 bp, SARS Virus
tgttatcctcttttgtaccgtttgg

SEQ ID NO: 199946 - DNA, 25 bp, SARS Virus
gttatcctcttttgtaccgtttggt

SEQ ID NO: 199947 - DNA, 25 bp, SARS Virus
ttatcctcttttttaccgtttggta

SEQ ID NO: 199948 - DNA, 25 bp, SARS Virus
tatcctcttttgtaccgtttggtaa

SEQ ID NO: 199949 - DNA, 25 bp, SARS Virus
atcctcttttgttccgtttggtaac

SEQ ID NO: 199950 - DNA, 25 bp, SARS Virus
tcctcttttgtatcgtttggtaact

SEQ ID NO: 199951 - DNA, 25 bp, SARS Virus
cctcttttgtactgtttggtaactt

SEQ ID NO: 199952 - DNA, 25 bp, SARS Virus
ctcttttgtaccttttggtaacttc

SEQ ID NO: 199953 - DNA, 25 bp, SARS Virus
tcttttgtaccgtttggtaacttcc

SEQ ID NO: 199954 - DNA, 25 bp, SARS Virus
cttttgtaccgtttggtaacttcca

SEQ ID NO: 199955 - DNA, 25 bp, SARS Virus
ttttgtaccgtttggtaacttccac

SEQ ID NO: 199956 - DNA, 25 bp, SARS Virus
tttgtaccgttttgtaacttccact

SEQ ID NO: 199957 - DNA, 25 bp, SARS Virus
ttgtaccgtttgttaacttccactc

SEQ ID NO: 199958 - DNA, 25 bp, SARS Virus
tgtaccgtttggtaacttccactcg

SEQ ID NO: 199959 - DNA, 25 bp, SARS Virus
gtaccgtttggttacttccactcgg

SEQ ID NO: 199960 - DNA, 25 bp, SARS Virus
taccgtttggtatcttccactcggt

SEQ ID NO: 199961 - DNA, 25 bp, SARS Virus
accgtttggtaatttccactcggtt

SEQ ID NO: 199962 - DNA, 25 bp, SARS Virus
ccgtttggtaacttccactcggttc

SEQ ID NO: 199963 - DNA, 25 bp, SARS Virus
cgtttggtaacttccactcggttct

SEQ ID NO: 199964 - DNA, 25 bp, SARS Virus
gtttggtaactttcactcggttctt

SEQ ID NO: 199965 - DNA, 25 bp, SARS Virus
tttggtaacttctactcggttctta

SEQ ID NO: 199966 - DNA, 25 bp, SARS Virus
ttggtaacttcctctcggttcttac

SEQ ID NO: 199967 - DNA, 25 bp, SARS Virus
tggtaacttccattcggttcttact

SEQ ID NO: 199968 - DNA, 25 bp, SARS Virus
ggtaacttccactcggttcttactt

SEQ ID NO: 199969 - DNA, 25 bp, SARS Virus
gtaacttccacttggttcttacttt

SEQ ID NO: 199970 - DNA, 25 bp, SARS Virus
taacttccactctgttcttactttg

SEQ ID NO: 199971 - DNA, 25 bp, SARS Virus
aacttccactcgtttcttactttgt

SEQ ID NO: 199972 - DNA, 25 bp, SARS Virus
acttccactcggttcttactttgta

SEQ ID NO: 199973 - DNA, 25 bp, SARS Virus
cttccactcggttcttactttgtag

SEQ ID NO: 199974 - DNA, 25 bp, SARS Virus
ttccactcggtttttactttgtagt

SEQ ID NO: 199975 - DNA, 25 bp, SARS Virus
tccactcggttcttactttgtagta

SEQ ID NO: 199976 - DNA, 25 bp, SARS Virus
ccactcggttcttactttgtagtaa

SEQ ID NO: 199977 - DNA, 25 bp, SARS Virus
cactcggttctttctttgtagtaac

SEQ ID NO: 199978 - DNA, 25 bp, SARS Virus
actcggttcttattttgtagtaacc

SEQ ID NO: 199979 - DNA, 25 bp, SARS Virus
ctcggttcttactttgtagtaacca

SEQ ID NO: 199980 - DNA, 25 bp, SARS Virus
tcggttcttactttgtagtaaccac

SEQ ID NO: 199981 - DNA, 25 bp, SARS Virus
cggttcttactttgtagtaaccact

SEQ ID NO: 199982 - DNA, 25 bp, SARS Virus
ggttcttactttttagtaaccactt

SEQ ID NO: 199983 - DNA, 25 bp, SARS Virus
gttcttactttgtagtaaccacttt

SEQ ID NO: 199984 - DNA, 25 bp, SARS Virus
ttcttactttgttgtaaccacttta

SEQ ID NO: 199985 - DNA, 25 bp, SARS Virus
tcttactttgtattaaccactttat

SEQ ID NO: 199986 - DNA, 25 bp, SARS Virus
cttactttgtagtaaccactttatc

SEQ ID NO: 199987 - DNA, 25 bp, SARS Virus
ttactttgtagttaccactttatct

SEQ ID NO: 199988 - DNA, 25 bp, SARS Virus
tactttgtagtatccactttatctt

SEQ ID NO: 199989 - DNA, 25 bp, SARS Virus
actttgtagtaatcactttatctta

SEQ ID NO: 199990 - DNA, 25 bp, SARS Virus
ctttgtagtaactactttatcttac

SEQ ID NO: 199991 - DNA, 25 bp, SARS Virus
tttgtagtaacctctttatcttaca

SEQ ID NO: 199992 - DNA, 25 bp, SARS Virus
ttgtagtaaccattttatcttacag

SEQ ID NO: 199993 - DNA, 25 bp, SARS Virus
tgtagtaaccactttatcttacagt

SEQ ID NO: 199994 - DNA, 25 bp, SARS Virus
gtagtaaccactttatcttacagtt

SEQ ID NO: 199995 - DNA, 25 bp, SARS Virus
tagtaaccactttatcttacagttc

SEQ ID NO: 199996 - DNA, 25 bp, SARS Virus
agtaaccactttttcttacagttca

SEQ ID NO: 199997 - DNA, 25 bp, SARS Virus
gtaaccactttatcttacagttcat

SEQ ID NO: 199998 - DNA, 25 bp, SARS Virus
taaccactttattttacagttcatg

SEQ ID NO: 199999 - DNA, 25 bp, SARS Virus
aaccactttatcttacagttcatgt

SEQ ID NO: 200000 - DNA, 25 bp, SARS Virus
accactttatcttacagttcatgtt

SEQ ID NO: 200001 - DNA, 25 bp, SARS Virus
ccactttatctttcagttcatgttc

SEQ ID NO: 200002 - DNA, 25 bp, SARS Virus
cactttatcttatagttcatgttca

SEQ ID NO: 200003 - DNA, 25 bp, SARS Virus
actttatcttactgttcatgttcat

SEQ ID NO: 200004 - DNA, 25 bp, SARS Virus
ctttatcttacatttcatgttcatt

SEQ ID NO: 200005 - DNA, 25 bp, SARS Virus
tttatcttacagttcatgttcattt

SEQ ID NO: 200006 - DNA, 25 bp, SARS Virus
ttatcttacagttcatgttcatttt

SEQ ID NO: 200007 - DNA, 25 bp, SARS Virus
tatcttacagtttatgttcattttc

SEQ ID NO: 200008 - DNA, 25 bp, SARS Virus
atcttacagttcttgttcattttct

SEQ ID NO: 200009 - DNA, 25 bp, SARS Virus
tcttacagttcatgttcattttctg

SEQ ID NO: 200010 - DNA, 25 bp, SARS Virus
cttacagttcattttcattttctga

SEQ ID NO: 200011 - DNA, 25 bp, SARS Virus
ttacagttcatgttcattttctgac

SEQ ID NO: 200012 - DNA, 25 bp, SARS Virus
tacagttcatgttcattttctgact

SEQ ID NO: 200013 - DNA, 25 bp, SARS Virus
acagttcatgtttattttctgactc

SEQ ID NO: 200014 - DNA, 25 bp, SARS Virus
cagttcatgttctttttctgactca

SEQ ID NO: 200015 - DNA, 25 bp, SARS Virus
agttcatgttcattttctgactcat

SEQ ID NO: 200016 - DNA, 25 bp, SARS Virus
gttcatgttcattttctgactcatc

SEQ ID NO: 200017 - DNA, 25 bp, SARS Virus
ttcatgttcattttctgactcatct

SEQ ID NO: 200018 - DNA, 25 bp, SARS Virus
tcatgttcattttctgactcatctg

SEQ ID NO: 200019 - DNA, 25 bp, SARS Virus
catgttcattttttgactcatctga

SEQ ID NO: 200020 - DNA, 25 bp, SARS Virus
atgttcattttctgactcatctgag

SEQ ID NO: 200021 - DNA, 25 bp, SARS Virus
tgttcattttcttactcatctgagg

SEQ ID NO: 200022 - DNA, 25 bp, SARS Virus
gttcattttctgtctcatctgaggg

SEQ ID NO: 200023 - DNA, 25 bp, SARS Virus
ttcattttctgattcatctgagggc

SEQ ID NO: 200024 - DNA, 25 bp, SARS Virus
tcattttctgactcatctgagggcc

SEQ ID NO: 200025 - DNA, 25 bp, SARS Virus
cattttctgacttatctgagggccg

SEQ ID NO: 200026 - DNA, 25 bp, SARS Virus
attttctgactcttctgagggccgt

SEQ ID NO: 200027 - DNA, 25 bp, SARS Virus
ttttctgactcatctgagggccgtc

SEQ ID NO: 200028 - DNA, 25 bp, SARS Virus
tttctgactcatttgagggccgtct

SEQ ID NO: 200029 - DNA, 25 bp, SARS Virus
ttctgactcatctgagggccgtctt

SEQ ID NO: 200030 - DNA, 25 bp, SARS Virus
tctgactcatcttagggccgtcttt

SEQ ID NO: 200031 - DNA, 25 bp, SARS Virus
ctgactcatctgtgggccgtctttc

SEQ ID NO: 200032 - DNA, 25 bp, SARS Virus
tgactcatctgatggccgtctttcg

SEQ ID NO: 200033 - DNA, 25 bp, SARS Virus
gactcatctgagtgccgtctttcga

SEQ ID NO: 200034 - DNA, 25 bp, SARS Virus
actcatctgaggtccgtctttcgac

SEQ ID NO: 200035 - DNA, 25 bp, SARS Virus
ctcatctgagggtcgtctttcgaca

SEQ ID NO: 200036 - DNA, 25 bp, SARS Virus
tcatctgagggctgtctttcgacat

SEQ ID NO: 200037 - DNA, 25 bp, SARS Virus
catctgagggccttctttcgacatt

SEQ ID NO: 200038 - DNA, 25 bp, SARS Virus
atctgagggccgtctttcgacattc

SEQ ID NO: 200039 - DNA, 25 bp, SARS Virus
tctgagggccgtttttcgacattcg

SEQ ID NO: 200040 - DNA, 25 bp, SARS Virus
ctgagggccgtctttcgacattcga

SEQ ID NO: 200041 - DNA, 25 bp, SARS Virus
tgagggccgtctttcgacattcgac

SEQ ID NO: 200042 - DNA, 25 bp, SARS Virus
gagggccgtctttcgacattcgacc

SEQ ID NO: 200043 - DNA, 25 bp, SARS Virus
agggccgtcttttgacattcgacca

SEQ ID NO: 200044 - DNA, 25 bp, SARS Virus
gggccgtctttctacattcgaccat

SEQ ID NO: 200045 - DNA, 25 bp, SARS Virus
ggccgtctttcgtcattcgaccatg

SEQ ID NO: 200046 - DNA, 25 bp, SARS Virus
gccgtctttcgatattcgaccatgg

SEQ ID NO: 200047 - DNA, 25 bp, SARS Virus
ccgtctttcgactttcgaccatggt

SEQ ID NO: 200048 - DNA, 25 bp, SARS Virus
cgtctttcgacattcgaccatggtc

SEQ ID NO: 200049 - DNA, 25 bp, SARS Virus
gtctttcgacattcgaccatggtct

SEQ ID NO: 200050 - DNA, 25 bp, SARS Virus
tctttcgacatttgaccatggtctg

SEQ ID NO: 200051 - DNA, 25 bp, SARS Virus
ctttcgacattctaccatggtctgt

SEQ ID NO: 200052 - DNA, 25 bp, SARS Virus
tttcgacattcgtccatggtctgtc

SEQ ID NO: 200053 - DNA, 25 bp, SARS Virus
ttcgacattcgatcatggtctgtct

SEQ ID NO: 200054 - DNA, 25 bp, SARS Virus
tcgacattcgactatggtctgtctc

SEQ ID NO: 200055 - DNA, 25 bp, SARS Virus
cgacattcgaccttggtctgtctca

SEQ ID NO: 200056 - DNA, 25 bp, SARS Virus
gacattcgaccatggtctgtctcat

SEQ ID NO: 200057 - DNA, 25 bp, SARS Virus
acattcgaccattgtctgtctcata

SEQ ID NO: 200058 - DNA, 25 bp, SARS Virus
cattcgaccatgttctgtctcatat

SEQ ID NO: 200059 - DNA, 25 bp, SARS Virus
attcgaccatggtctgtctcatatc

SEQ ID NO: 200060 - DNA, 25 bp, SARS Virus
ttcgaccatggtttgtctcatatca

SEQ ID NO: 200061 - DNA, 25 bp, SARS Virus
tcgaccatggtctgtctcatatcac

SEQ ID NO: 200062 - DNA, 25 bp, SARS Virus
cgaccatggtctttctcatatcact

SEQ ID NO: 200063 - DNA, 25 bp, SARS Virus
gaccatggtctgtctcatatcactt

SEQ ID NO: 200064 - DNA, 25 bp, SARS Virus
accatggtctgtttcatatcacttt

SEQ ID NO: 200065 - DNA, 25 bp, SARS Virus
ccatggtctgtctcatatcactttc

SEQ ID NO: 200066 - DNA, 25 bp, SARS Virus
catggtctgtcttatatcactttct

SEQ ID NO: 200067 - DNA, 25 bp, SARS Virus
atggtctgtctcttatcactttctg

SEQ ID NO: 200068 - DNA, 25 bp, SARS Virus
tggtctgtctcatatcactttctgt

SEQ ID NO: 200069 - DNA, 25 bp, SARS Virus
ggtctgtctcatttcactttctgta

SEQ ID NO: 200070 - DNA, 25 bp, SARS Virus
gtctgtctcatatcactttctgtag

SEQ ID NO: 200071 - DNA, 25 bp, SARS Virus
tctgtctcatattactttctgtagt

SEQ ID NO: 200072 - DNA, 25 bp, SARS Virus
ctgtctcatatctctttctgtagtt

SEQ ID NO: 200073 - DNA, 25 bp, SARS Virus
tgtctcatatcattttctgtagttt

SEQ ID NO: 200074 - DNA, 25 bp, SARS Virus
gtctcatatcactttctgtagtttt

SEQ ID NO: 200075 - DNA, 25 bp, SARS Virus
tctcatatcactttctgtagttttt

SEQ ID NO: 200076 - DNA, 25 bp, SARS Virus
ctcatatcactttctgtagtttttg

SEQ ID NO: 200077 - DNA, 25 bp, SARS Virus
tcatatcactttttgtagtttttgt

SEQ ID NO: 200078 - DNA, 25 bp, SARS Virus
catatcactttctgtagtttttgtt

SEQ ID NO: 200079 - DNA, 25 bp, SARS Virus
atatcactttctttagtttttgttt

SEQ ID NO: 200080 - DNA, 25 bp, SARS Virus
tatcactttctgtagtttttgtttt

SEQ ID NO: 200081 - DNA, 25 bp, SARS Virus
atcactttctgttgtttttgttttc

SEQ ID NO: 200082 - DNA, 25 bp, SARS Virus
tcactttctgtattttttgttttca

SEQ ID NO: 200083 - DNA, 25 bp, SARS Virus
cactttctgtagtttttgttttcac

SEQ ID NO: 200084 - DNA, 25 bp, SARS Virus
actttctgtagtttttgttttcacg

SEQ ID NO: 200085 - DNA, 25 bp, SARS Virus
ctttctgtagtttttgttttcacgt

SEQ ID NO: 200086 - DNA, 25 bp, SARS Virus
tttctgtagtttttgttttcacgta

SEQ ID NO: 200087 - DNA, 25 bp, SARS Virus
ttctgtagtttttgttttcacgtaa

SEQ ID NO: 200088 - DNA, 25 bp, SARS Virus
tctgtagttttttttttcacgtaat

SEQ ID NO: 200089 - DNA, 25 bp, SARS Virus
ctgtagtttttgttttcacgtaatc

SEQ ID NO: 200090 - DNA, 25 bp, SARS Virus
tgtagtttttgttttcacgtaatcg

SEQ ID NO: 200091 - DNA, 25 bp, SARS Virus
gtagtttttgttttcacgtaatcgt

SEQ ID NO: 200092 - DNA, 25 bp, SARS Virus
tagtttttgttttcacgtaatcgtc

SEQ ID NO: 200093 - DNA, 25 bp, SARS Virus
agtttttgtttttacgtaatcgtcg

SEQ ID NO: 200094 - DNA, 25 bp, SARS Virus
gtttttgttttctcgtaatcgtcgt

SEQ ID NO: 200095 - DNA, 25 bp, SARS Virus
tttttgttttcatgtaatcgtcgtt

SEQ ID NO: 200096 - DNA, 25 bp, SARS Virus
ttttgttttcacttaatcgtcgttg

SEQ ID NO: 200097 - DNA, 25 bp, SARS Virus
tttgttttcacgtaatcgtcgttgt

SEQ ID NO: 200098 - DNA, 25 bp, SARS Virus
ttgttttcacgttatcgtcgttgtt

SEQ ID NO: 200099 - DNA, 25 bp, SARS Virus
tgttttcacgtattcgtcgttgttg

SEQ ID NO: 200100 - DNA, 25 bp, SARS Virus
gttttcacgtaatcgtcgttgttgt

SEQ ID NO: 200101 - DNA, 25 bp, SARS Virus
ttttcacgtaattgtcgttgttgta

SEQ ID NO: 200102 - DNA, 25 bp, SARS Virus
tttcacgtaatcttcgttgttgtac

SEQ ID NO: 200103 - DNA, 25 bp, SARS Virus
ttcacgtaatcgtcgttgttgtacc

SEQ ID NO: 200104 - DNA, 25 bp, SARS Virus
tcacgtaatcgttgttgttgtacca

SEQ ID NO: 200105 - DNA, 25 bp, SARS Virus
cacgtaatcgtctttgttgtaccaa

SEQ ID NO: 200106 - DNA, 25 bp, SARS Virus
acgtaatcgtcgttgttgtaccaac

SEQ ID NO: 200107 - DNA, 25 bp, SARS Virus
cgtaatcgtcgttgttgtaccaaca

SEQ ID NO: 200108 - DNA, 25 bp, SARS Virus
gtaatcgtcgtttttgtaccaacat

SEQ ID NO: 200109 - DNA, 25 bp, SARS Virus
taatcgtcgttgttgtaccaacatg

SEQ ID NO: 200110 - DNA, 25 bp, SARS Virus
aatcgtcgttgttgtaccaacatga

SEQ ID NO: 200111 - DNA, 25 bp, SARS Virus
atcgtcgttgttttaccaacatgag

SEQ ID NO: 200112 - DNA, 25 bp, SARS Virus
tcgtcgttgttgtaccaacatgagt

SEQ ID NO: 200113 - DNA, 25 bp, SARS Virus
cgtcgttgttgtaccaacatgagtg

SEQ ID NO: 200114 - DNA, 25 bp, SARS Virus
gtcgttgttgtaacaacatgagtgg

SEQ ID NO: 200115 - DNA, 25 bp, SARS Virus
tcgttgttgtacaaacatgagtggt

SEQ ID NO: 200116 - DNA, 25 bp, SARS Virus
cgttgttgtaccaacatgagtggtt

SEQ ID NO: 200117 - DNA, 25 bp, SARS Virus
gttgttgtaccaacatgagtggttt

SEQ ID NO: 200118 - DNA, 25 bp, SARS Virus
ttgttgtaccaaaatgagtggtttt

SEQ ID NO: 200119 - DNA, 25 bp, SARS Virus
tgttgtaccaacatgagtggttttt

SEQ ID NO: 200120 - DNA, 25 bp, SARS Virus
gttgtaccaacaagagtggtttttg

SEQ ID NO: 200121 - DNA, 25 bp, SARS Virus
ttgtaccaacataagtggtttttgt

SEQ ID NO: 200122 - DNA, 25 bp, SARS Virus
tgtaccaacatgagtggtttttgtg

SEQ ID NO: 200123 - DNA, 25 bp, SARS Virus
gtaccaacatgaatggtttttgtgc

SEQ ID NO: 200124 - DNA, 25 bp, SARS Virus
taccaacatgagaggtttttgtgca

SEQ ID NO: 200125 - DNA, 25 bp, SARS Virus
accaacatgagtagtttttgtgcag

SEQ ID NO: 200126 - DNA, 25 bp, SARS Virus
ccaacatgagtgatttttgtgcaga

SEQ ID NO: 200127 - DNA, 25 bp, SARS Virus
caacatgagtggattttgtgcagac

SEQ ID NO: 200128 - DNA, 25 bp, SARS Virus
aacatgagtggtatttgtgcagact

SEQ ID NO: 200129 - DNA, 25 bp, SARS Virus
acatgagtggttattgtgcagactt

SEQ ID NO: 200130 - DNA, 25 bp, SARS Virus
catgagtggtttatgtgcagactta

SEQ ID NO: 200131 - DNA, 25 bp, SARS Virus
atgagtggttttagtgcagacttaa

SEQ ID NO: 200132 - DNA, 25 bp, SARS Virus
tgagtggtttttatgcagacttaaa

SEQ ID NO: 200133 - DNA, 25 bp, SARS Virus
gagtggtttttgagcagacttaaag

SEQ ID NO: 200134 - DNA, 25 bp, SARS Virus
agtggtttttgtacagacttaaagt

SEQ ID NO: 200135 - DNA, 25 bp, SARS Virus
gtggtttttgtgaagacttaaagta

SEQ ID NO: 200136 - DNA, 25 bp, SARS Virus
tggtttttgtgcagacttaaagtat

SEQ ID NO: 200137 - DNA, 25 bp, SARS Virus
ggtttttgtgcaaacttaaagtatt

SEQ ID NO: 200138 - DNA, 25 bp, SARS Virus
gtttttgtgcagacttaaagtattt

SEQ ID NO: 200139 - DNA, 25 bp, SARS Virus
tttttgtgcagaattaaagtatttc

SEQ ID NO: 200140 - DNA, 25 bp, SARS Virus
ttttgtgcagacataaagtatttca

SEQ ID NO: 200141 - DNA, 25 bp, SARS Virus
tttgtgcagactaaaagtatttcat

SEQ ID NO: 200142 - DNA, 25 bp, SARS Virus
ttgtgcagacttaaagtatttcatc

SEQ ID NO: 200143 - DNA, 25 bp, SARS Virus
tgtgcagacttaaagtatttcatca

SEQ ID NO: 200144 - DNA, 25 bp, SARS Virus
gtgcagacttaaagtatttcatcat

SEQ ID NO: 200145 - DNA, 25 bp, SARS Virus
tgcagacttaaaatatttcatcatc

SEQ ID NO: 200146 - DNA, 25 bp, SARS Virus
gcagacttaaagaatttcatcatcc

SEQ ID NO: 200147 - DNA, 25 bp, SARS Virus
cagacttaaagtatttcatcatccg

SEQ ID NO: 200148 - DNA, 25 bp, SARS Virus
agacttaaagtaattcatcatccgt

SEQ ID NO: 200149 - DNA, 25 bp, SARS Virus
gacttaaagtatatcatcatccgtc

SEQ ID NO: 200150 - DNA, 25 bp, SARS Virus
acttaaagtattacatcatccgtcg

SEQ ID NO: 200151 - DNA, 25 bp, SARS Virus
cttaaagtatttaatcatccgtcgt

SEQ ID NO: 200152 - DNA, 25 bp, SARS Virus
ttaaagtatttcatcatccgtcgtg

SEQ ID NO: 200153 - DNA, 25 bp, SARS Virus
taaagtatttcaacatccgtcgtgt

SEQ ID NO: 200154 - DNA, 25 bp, SARS Virus
aaagtatttcataatccgtcgtgtt

SEQ ID NO: 200155 - DNA, 25 bp, SARS Virus
aagtatttcatcatccgtcgtgttc

SEQ ID NO: 200156 - DNA, 25 bp, SARS Virus
agtatttcatcaaccgtcgtgttca

SEQ ID NO: 200157 - DNA, 25 bp, SARS Virus
gtatttcatcatacgtcgtgttcag

SEQ ID NO: 200158 - DNA, 25 bp, SARS Virus
tatttcatcatcagtcgtgttcagt

SEQ ID NO: 200159 - DNA, 25 bp, SARS Virus
atttcatcatccatcgtgttcagtg

SEQ ID NO: 200160 - DNA, 25 bp, SARS Virus
tttcatcatccgacgtgttcagtgg

SEQ ID NO: 200161 - DNA, 25 bp, SARS Virus
ttcatcatccgtagtgttcagtggt

SEQ ID NO: 200162 - DNA, 25 bp, SARS Virus
tcatcatccgtcatgttcagtggtt

SEQ ID NO: 200163 - DNA, 25 bp, SARS Virus
catcatccgtcgagttcagtggtta

SEQ ID NO: 200164 - DNA, 25 bp, SARS Virus
atcatccgtcgtattcagtggttat

SEQ ID NO: 200165 - DNA, 25 bp, SARS Virus
tcatccgtcgtgatcagtggttata

SEQ ID NO: 200166 - DNA, 25 bp, SARS Virus
catccgtcgtgtacagtggttatac

SEQ ID NO: 200167 - DNA, 25 bp, SARS Virus
atccgtcgtgttaagtggttatacc

SEQ ID NO: 200168 - DNA, 25 bp, SARS Virus
tccgtcgtgttcagtggttataccg

SEQ ID NO: 200169 - DNA, 25 bp, SARS Virus
ccgtcgtgttcaatggttataccgt

SEQ ID NO: 200170 - DNA, 25 bp, SARS Virus
cgtcgtgttcagaggttataccgtt

SEQ ID NO: 200171 - DNA, 25 bp, SARS Virus
gtcgtgttcagtagttataccgtta

SEQ ID NO: 200172 - DNA, 25 bp, SARS Virus
tcgtgttcagtgattataccgttat

SEQ ID NO: 200173 - DNA, 25 bp, SARS Virus
cgtgttcagtggatataccgttatt

SEQ ID NO: 200174 - DNA, 25 bp, SARS Virus
gtgttcagtggtaataccgttatta

SEQ ID NO: 200175 - DNA, 25 bp, SARS Virus
tgttcagtggttataccgttattat

SEQ ID NO: 200176 - DNA, 25 bp, SARS Virus
gttcagtggttaaaccgttattatg

SEQ ID NO: 200177 - DNA, 25 bp, SARS Virus
ttcagtggttataccgttattatgg

SEQ ID NO: 200178 - DNA, 25 bp, SARS Virus
tcagtggttataacgttattatggt

SEQ ID NO: 200179 - DNA, 25 bp, SARS Virus
cagtggttatacagttattatggtg

SEQ ID NO: 200180 - DNA, 25 bp, SARS Virus
agtggttataccattattatggtgg

SEQ ID NO: 200181 - DNA, 25 bp, SARS Virus
gtggttataccgatattatggtggt

SEQ ID NO: 200182 - DNA, 25 bp, SARS Virus
tggttataccgtaattatggtggtc

SEQ ID NO: 200183 - DNA, 25 bp, SARS Virus
ggttataccgttattatggtggtcg

SEQ ID NO: 200184 - DNA, 25 bp, SARS Virus
gttataccgttaatatggtggtcgg

SEQ ID NO: 200185 - DNA, 25 bp, SARS Virus
ttataccgttataatggtggtcggt

SEQ ID NO: 200186 - DNA, 25 bp, SARS Virus
tataccgttattatggtggtcggtg

SEQ ID NO: 200187 - DNA, 25 bp, SARS Virus
ataccgttattaaggtggtcggtga

SEQ ID NO: 200188 - DNA, 25 bp, SARS Virus
taccgttattatagtggtcggtgat

SEQ ID NO: 200189 - DNA, 25 bp, SARS Virus
accgttattatgatggtcggtgatg

SEQ ID NO: 200190 - DNA, 25 bp, SARS Virus
ccgttattatggaggtcggtgatga

SEQ ID NO: 200191 - DNA, 25 bp, SARS Virus
cgttattatggtagtcggtgatgac

SEQ ID NO: 200192 - DNA, 25 bp, SARS Virus
gttattatggtgatcggtgatgact

SEQ ID NO: 200193 - DNA, 25 bp, SARS Virus
ttattatggtggacggtgatgactt

SEQ ID NO: 200194 - DNA, 25 bp, SARS Virus
tattatggtggtaggtgatgacttc

SEQ ID NO: 200195 - DNA, 25 bp, SARS Virus
attatggtggtcagtgatgacttcg

SEQ ID NO: 200196 - DNA, 25 bp, SARS Virus
ttatggtggtcgatgatgacttcgt

SEQ ID NO: 200197 - DNA, 25 bp, SARS Virus
tatggtggtcggagatgacttcgtc

SEQ ID NO: 200198 - DNA, 25 bp, SARS Virus
atggtggtcggtaatgacttcgtct

SEQ ID NO: 200199 - DNA, 25 bp, SARS Virus
tggtggtcggtgatgacttcgtctg

SEQ ID NO: 200200 - DNA, 25 bp, SARS Virus
ggtggtcggtgaagacttcgtctgt

SEQ ID NO: 200201 - DNA, 25 bp, SARS Virus
gtggtcggtgataacttcgtctgtg

SEQ ID NO: 200202 - DNA, 25 bp, SARS Virus
tggtcggtgatgacttcgtctgtgt

SEQ ID NO: 200203 - DNA, 25 bp, SARS Virus
ggtcggtgatgaattcgtctgtgta

SEQ ID NO: 200204 - DNA, 25 bp, SARS Virus
gtcggtgatgacatcgtctgtgtag

SEQ ID NO: 200205 - DNA, 25 bp, SARS Virus
tcggtgatgactacgtctgtgtaga

SEQ ID NO: 200206 - DNA, 25 bp, SARS Virus
cggtgatgacttagtctgtgtagat

SEQ ID NO: 200207 - DNA, 25 bp, SARS Virus
ggtgatgacttcatctgtgtagatt

SEQ ID NO: 200208 - DNA, 25 bp, SARS Virus
gtgatgacttcgactgtgtagattt

SEQ ID NO: 200209 - DNA, 25 bp, SARS Virus
tgatgacttcgtatgtgtagatttc

SEQ ID NO: 200210 - DNA, 25 bp, SARS Virus
gatgacttcgtcagtgtagatttcg

SEQ ID NO: 200211 - DNA, 25 bp, SARS Virus
atgacttcgtctatgtagatttcgt

SEQ ID NO: 200212 - DNA, 25 bp, SARS Virus
tgacttcgtctgagtagatttcgtg

SEQ ID NO: 200213 - DNA, 25 bp, SARS Virus
gacttcgtctgtatagatttcgtgg

SEQ ID NO: 200214 - DNA, 25 bp, SARS Virus
acttcgtctgtgaagatttcgtggg

SEQ ID NO: 200215 - DNA, 25 bp, SARS Virus
cttcgtctgtgtagatttcgtgggt

SEQ ID NO: 200216 - DNA, 25 bp, SARS Virus
ttcgtctgtgtaaatttcgtgggtg

SEQ ID NO: 200217 - DNA, 25 bp, SARS Virus
tcgtctgtgtagatttcgtgggtgt

SEQ ID NO: 200218 - DNA, 25 bp, SARS Virus
cgtctgtgtagaattcgtgggtgtc

SEQ ID NO: 200219 - DNA, 25 bp, SARS Virus
gtctgtgtagatatcgtgggtgtcc

SEQ ID NO: 200220 - DNA, 25 bp, SARS Virus
tctgtgtagattacgtgggtgtcca

SEQ ID NO: 200221 - DNA, 25 bp, SARS Virus
ctgtgtagatttagtgggtgtccaa

SEQ ID NO: 200222 - DNA, 25 bp, SARS Virus
tgtgtagatttcatgggtgtccaac

SEQ ID NO: 200223 - DNA, 25 bp, SARS Virus
gtgtagatttcgagggtgtccaacg

SEQ ID NO: 200224 - DNA, 25 bp, SARS Virus
tgtagatttcgtaggtgtccaacgt

SEQ ID NO: 200225 - DNA, 25 bp, SARS Virus
gtagatttcgtgagtgtccaacgtg

SEQ ID NO: 200226 - DNA, 25 bp, SARS Virus
tagatttcgtggatgtccaacgtgt

SEQ ID NO: 200227 - DNA, 25 bp, SARS Virus
agatttcgtgggagtccaacgtgtt

SEQ ID NO: 200228 - DNA, 25 bp, SARS Virus
gatttcgtgggtatccaacgtgttc

SEQ ID NO: 200229 - DNA, 25 bp, SARS Virus
atttcgtgggtgaccaacgtgttct

SEQ ID NO: 200230 - DNA, 25 bp, SARS Virus
tttcgtgggtgtacaacgtgttctc

SEQ ID NO: 200231 - DNA, 25 bp, SARS Virus
ttcgtgggtgtcaaacgtgttctcc

SEQ ID NO: 200232 - DNA, 25 bp, SARS Virus
tcgtgggtgtccaacgtgttctcct

SEQ ID NO: 200233 - DNA, 25 bp, SARS Virus
cgtgggtgtccaacgtgttctcctc

SEQ ID NO: 200234 - DNA, 25 bp, SARS Virus
gtgggtgtccaaagtgttctcctca

SEQ ID NO: 200235 - DNA, 25 bp, SARS Virus
tgggtgtccaacatgttctcctcat

SEQ ID NO: 200236 - DNA, 25 bp, SARS Virus
gggtgtccaacgagttctcctcatt

SEQ ID NO: 200237 - DNA, 25 bp, SARS Virus
ggtgtccaacgtattctcctcattt

SEQ ID NO: 200238 - DNA, 25 bp, SARS Virus
gtgtccaacgtgatctcctcatttc

SEQ ID NO: 200239 - DNA, 25 bp, SARS Virus
tgtccaacgtgtactcctcatttct

SEQ ID NO: 200240 - DNA, 25 bp, SARS Virus
gtccaacgtgttatcctcatttcta

SEQ ID NO: 200241 - DNA, 25 bp, SARS Virus
tccaacgtgttcacctcatttctac

SEQ ID NO: 200242 - DNA, 25 bp, SARS Virus
ccaacgtgttctactcatttctaca

SEQ ID NO: 200243 - DNA, 25 bp, SARS Virus
caacgtgttctcatcatttctacaa

SEQ ID NO: 200244 - DNA, 25 bp, SARS Virus
aacgtgttctccacatttctacaat

SEQ ID NO: 200245 - DNA, 25 bp, SARS Virus
acgtgttctcctaatttctacaatc

SEQ ID NO: 200246 - DNA, 25 bp, SARS Virus
cgtgttctcctcatttctacaatcg

SEQ ID NO: 200247 - DNA, 25 bp, SARS Virus
gtgttctcctcaattctacaatcga

SEQ ID NO: 200248 - DNA, 25 bp, SARS Virus
tgttctcctcatatctacaatcgat

SEQ ID NO: 200249 - DNA, 25 bp, SARS Virus
gttctcctcattactacaatcgata

SEQ ID NO: 200250 - DNA, 25 bp, SARS Virus
ttctcctcatttatacaatcgatac

SEQ ID NO: 200251 - DNA, 25 bp, SARS Virus
tctcctcatttcaacaatcgatact

SEQ ID NO: 200252 - DNA, 25 bp, SARS Virus
ctcctcatttctacaatcgatactc

SEQ ID NO: 200253 - DNA, 25 bp, SARS Virus
tcctcatttctaaaatcgatactct

SEQ ID NO: 200254 - DNA, 25 bp, SARS Virus
cctcatttctacaatcgatactcta

SEQ ID NO: 200255 - DNA, 25 bp, SARS Virus
ctcatttctacaatcgatactctaa

SEQ ID NO: 200256 - DNA, 25 bp, SARS Virus
tcatttctacaaacgatactctaag

SEQ ID NO: 200257 - DNA, 25 bp, SARS Virus
catttctacaatagatactctaagt

SEQ ID NO: 200258 - DNA, 25 bp, SARS Virus
atttctacaatcaatactctaagta

SEQ ID NO: 200259 - DNA, 25 bp, SARS Virus
tttctacaatcgatactctaagtag

SEQ ID NO: 200260 - DNA, 25 bp, SARS Virus
ttctacaatcgaaactctaagtagc

SEQ ID NO: 200261 - DNA, 25 bp, SARS Virus
tctacaatcgatactctaagtagcg

SEQ ID NO: 200262 - DNA, 25 bp, SARS Virus
ctacaatcgataatctaagtagcgt

SEQ ID NO: 200263 - DNA, 25 bp, SARS Virus
tacaatcgatacactaagtagcgta

SEQ ID NO: 200264 - DNA, 25 bp, SARS Virus
acaatcgatactataagtagcgtag

SEQ ID NO: 200265 - DNA, 25 bp, SARS Virus
caatcgatactcaaagtagcgtagt

SEQ ID NO: 200266 - DNA, 25 bp, SARS Virus
aatcgatactctaagtagcgtagtt

SEQ ID NO: 200267 - DNA, 25 bp, SARS Virus
atcgatactctaagtagcgtagttg

SEQ ID NO: 200268 - DNA, 25 bp, SARS Virus
tcgatactctaaatagcgtagttgt

SEQ ID NO: 200269 - DNA, 25 bp, SARS Virus
cgatactctaagaagcgtagttgtg

SEQ ID NO: 200270 - DNA, 25 bp, SARS Virus
gatactctaagtagcgtagttgtgg

SEQ ID NO: 200271 - DNA, 25 bp, SARS Virus
atactctaagtaacgtagttgtggt

SEQ ID NO: 200272 - DNA, 25 bp, SARS Virus
tactctaagtagagtagttgtggtg

SEQ ID NO: 200273 - DNA, 25 bp, SARS Virus
actctaagtagcatagttgtggtgt

SEQ ID NO: 200274 - DNA, 25 bp, SARS Virus
ctctaagtagcgaagttgtggtgtc

SEQ ID NO: 200275 - DNA, 25 bp, SARS Virus
tctaagtagcgtagttgtggtgtct

SEQ ID NO: 200276 - DNA, 25 bp, SARS Virus
ctaagtagcgtaattgtggtgtctt

SEQ ID NO: 200277 - DNA, 25 bp, SARS Virus
taagtagcgtagatgtggtgtcttt

SEQ ID NO: 200278 - DNA, 25 bp, SARS Virus
aagtagcgtagtagtggtgtctttt

SEQ ID NO: 200279 - DNA, 25 bp, SARS Virus
agtagcgtagttatggtgtcttttg

SEQ ID NO: 200280 - DNA, 25 bp, SARS Virus
gtagcgtagttgaggtgtcttttga

SEQ ID NO: 200281 - DNA, 25 bp, SARS Virus
tagcgtagttgtagtgtcttttgag

SEQ ID NO: 200282 - DNA, 25 bp, SARS Virus
agcgtagttgtgatgtcttttgagg

SEQ ID NO: 200283 - DNA, 25 bp, SARS Virus
gcgtagttgtggagtcttttgagga

SEQ ID NO: 200284 - DNA, 25 bp, SARS Virus
cgtagttgtggtatcttttgaggac

SEQ ID NO: 200285 - DNA, 25 bp, SARS Virus
gtagttgtggtgacttttgaggact

SEQ ID NO: 200286 - DNA, 25 bp, SARS Virus
tagttgtggtgtattttgaggacta

SEQ ID NO: 200287 - DNA, 25 bp, SARS Virus
agttgtggtgtcatttgaggactat

SEQ ID NO: 200288 - DNA, 25 bp, SARS Virus
gttgtggtgtctattgaggactatc

SEQ ID NO: 200289 - DNA, 25 bp, SARS Virus
ttgtggtgtcttatgaggactatct

SEQ ID NO: 200290 - DNA, 25 bp, SARS Virus
tgtggtgtctttagaggactatctc

SEQ ID NO: 200291 - DNA, 25 bp, SARS Virus
gtggtgtcttttaaggactatctcg

SEQ ID NO: 200292 - DNA, 25 bp, SARS Virus
tggtgtcttttgaggactatctcga

SEQ ID NO: 200293 - DNA, 25 bp, SARS Virus
ggtgtcttttgaagactatctcgag

SEQ ID NO: 200294 - DNA, 25 bp, SARS Virus
gtgtcttttgagaactatctcgaga

SEQ ID NO: 200295 - DNA, 25 bp, SARS Virus
tgtcttttgaggactatctcgagac

SEQ ID NO: 200296 - DNA, 25 bp, SARS Virus
gtcttttgaggaatatctcgagaca

SEQ ID NO: 200297 - DNA, 25 bp, SARS Virus
tcttttgaggacaatctcgagacat

SEQ ID NO: 200298 - DNA, 25 bp, SARS Virus
cttttgaggactatctcgagacatt

SEQ ID NO: 200299 - DNA, 25 bp, SARS Virus
ttttgaggactaactcgagacatta

SEQ ID NO: 200300 - DNA, 25 bp, SARS Virus
tttgaggactatatcgagacattac

SEQ ID NO: 200301 - DNA, 25 bp, SARS Virus
ttgaggactatcacgagacattacg

SEQ ID NO: 200302 - DNA, 25 bp, SARS Virus
tgaggactatctagagacattacga

SEQ ID NO: 200303 - DNA, 25 bp, SARS Virus
gaggactatctcaagacattacgag

SEQ ID NO: 200304 - DNA, 25 bp, SARS Virus
aggactatctcgagacattacgagt

SEQ ID NO: 200305 - DNA, 25 bp, SARS Virus
ggactatctcgaaacattacgagta

SEQ ID NO: 200306 - DNA, 25 bp, SARS Virus
gactatctcgagacattacgagtaa

SEQ ID NO: 200307 - DNA, 25 bp, SARS Virus
actatctcgagaaattacgagtaat

SEQ ID NO: 200308 - DNA, 25 bp, SARS Virus
ctatctcgagacattacgagtaata

SEQ ID NO: 200309 - DNA, 25 bp, SARS Virus
tatctcgagacaatacgagtaataa

SEQ ID NO: 200310 - DNA, 25 bp, SARS Virus
atctcgagacataacgagtaataat

SEQ ID NO: 200311 - DNA, 25 bp, SARS Virus
tctcgagacattacgagtaataatt

SEQ ID NO: 200312 - DNA, 25 bp, SARS Virus
ctcgagacattaagagtaataattc

SEQ ID NO: 200313 - DNA, 25 bp, SARS Virus
tcgagacattacaagtaataattct

SEQ ID NO: 200314 - DNA, 25 bp, SARS Virus
cgagacattacgagtaataattctt

SEQ ID NO: 200315 - DNA, 25 bp, SARS Virus
gagacattacgaataataattcttg

SEQ ID NO: 200316 - DNA, 25 bp, SARS Virus
agacattacgagaaataattcttgg

SEQ ID NO: 200317 - DNA, 25 bp, SARS Virus
gacattacgagtaataattcttggg

SEQ ID NO: 200318 - DNA, 25 bp, SARS Virus
acattacgagtaataattcttgggt

SEQ ID NO: 200319 - DNA, 25 bp, SARS Virus
cattacgagtaaaaattcttgggta

SEQ ID NO: 200320 - DNA, 25 bp, SARS Virus
attacgagtaataattcttgggtag

SEQ ID NO: 200321 - DNA, 25 bp, SARS Virus
ttacgagtaataattcttgggtaga

SEQ ID NO: 200322 - DNA, 25 bp, SARS Virus
tacgagtaataaatcttgggtagat

SEQ ID NO: 200323 - DNA, 25 bp, SARS Virus
acgagtaataatacttgggtagatg

SEQ ID NO: 200324 - DNA, 25 bp, SARS Virus
cgagtaataattattgggtagatgg

SEQ ID NO: 200325 - DNA, 25 bp, SARS Virus
gagtaataattcatgggtagatggt

SEQ ID NO: 200326 - DNA, 25 bp, SARS Virus
agtaataattctagggtagatggtg

SEQ ID NO: 200327 - DNA, 25 bp, SARS Virus
gtaataattcttaggtagatggtga

SEQ ID NO: 200328 - DNA, 25 bp, SARS Virus
taataattcttgagtagatggtgac

SEQ ID NO: 200329 - DNA, 25 bp, SARS Virus
aataattcttggatagatggtgacc

SEQ ID NO: 200330 - DNA, 25 bp, SARS Virus
ataattcttgggaagatggtgacca

SEQ ID NO: 200331 - DNA, 25 bp, SARS Virus
taattcttgggtagatggtgaccat

SEQ ID NO: 200332 - DNA, 25 bp, SARS Virus
aattcttgggtaaatggtgaccatc

SEQ ID NO: 200333 - DNA, 25 bp, SARS Virus
attcttgggtagatggtgaccatct

SEQ ID NO: 200334 - DNA, 25 bp, SARS Virus
ttcttgggtagaaggtgaccatcta

SEQ ID NO: 200335 - DNA, 25 bp, SARS Virus
tcttgggtagatagtgaccatctat

SEQ ID NO: 200336 - DNA, 25 bp, SARS Virus
cttgggtagatgatgaccatctatc

SEQ ID NO: 200337 - DNA, 25 bp, SARS Virus
ttgggtagatggagaccatctatcc

SEQ ID NO: 200338 - DNA, 25 bp, SARS Virus
tgggtagatggtaaccatctatccg

SEQ ID NO: 200339 - DNA, 25 bp, SARS Virus
gggtagatggtgaccatctatccgt

SEQ ID NO: 200340 - DNA, 25 bp, SARS Virus
ggtagatggtgaacatctatccgtt

SEQ ID NO: 200341 - DNA, 25 bp, SARS Virus
gtagatggtgacaatctatccgttt

SEQ ID NO: 200342 - DNA, 25 bp, SARS Virus
tagatggtgaccatctatccgttta

SEQ ID NO: 200343 - DNA, 25 bp, SARS Virus
agatggtgaccaactatccgtttat

SEQ ID NO: 200344 - DNA, 25 bp, SARS Virus
gatggtgaccatatatccgtttatg

SEQ ID NO: 200345 - DNA, 25 bp, SARS Virus
atggtgaccatcaatccgtttatgg

SEQ ID NO: 200346 - DNA, 25 bp, SARS Virus
tggtgaccatctatccgtttatgga

SEQ ID NO: 200347 - DNA, 25 bp, SARS Virus
ggtgaccatctaaccgtttatggat

SEQ ID NO: 200348 - DNA, 25 bp, SARS Virus
gtgaccatctatacgtttatggatg

SEQ ID NO: 200349 - DNA, 25 bp, SARS Virus
tgaccatctatcagtttatggatga

SEQ ID NO: 200350 - DNA, 25 bp, SARS Virus
gaccatctatccatttatggatgaa

SEQ ID NO: 200351 - DNA, 25 bp, SARS Virus
accatctatccgattatggatgaag

SEQ ID NO: 200352 - DNA, 25 bp, SARS Virus
ccatctatccgtatatggatgaaga

SEQ ID NO: 200353 - DNA, 25 bp, SARS Virus
catctatccgttaatggatgaagac

SEQ ID NO: 200354 - DNA, 25 bp, SARS Virus
atctatccgtttatggatgaagact

SEQ ID NO: 200355 - DNA, 25 bp, SARS Virus
tctatccgtttaaggatgaagactg

SEQ ID NO: 200356 - DNA, 25 bp, SARS Virus
ctatccgtttatagatgaagactgg

SEQ ID NO: 200357 - DNA, 25 bp, SARS Virus
tatccgtttatgaatgaagactgga

SEQ ID NO: 200358 - DNA, 25 bp, SARS Virus
atccgtttatggatgaagactggaa

SEQ ID NO: 200359 - DNA, 25 bp, SARS Virus
tccgtttatggaagaagactggaaa

SEQ ID NO: 200360 - DNA, 25 bp, SARS Virus
ccgtttatggataaagactggaaag

SEQ ID NO: 200361 - DNA, 25 bp, SARS Virus
cgtttatggatgaagactggaaagc

SEQ ID NO: 200362 - DNA, 25 bp, SARS Virus
gtttatggatgaagactggaaagcg

SEQ ID NO: 200363 - DNA, 25 bp, SARS Virus
tttatggatgaaaactggaaagcgt

SEQ ID NO: 200364 - DNA, 25 bp, SARS Virus
ttatggatgaagactggaaagcgta

SEQ ID NO: 200365 - DNA, 25 bp, SARS Virus
tatggatgaagaatggaaagcgtac

SEQ ID NO: 200366 - DNA, 25 bp, SARS Virus
atggatgaagacaggaaagcgtaca

SEQ ID NO: 200367 - DNA, 25 bp, SARS Virus
tggatgaagactagaaagcgtacat

SEQ ID NO: 200368 - DNA, 25 bp, SARS Virus
ggatgaagactgaaaagcgtacatg

SEQ ID NO: 200369 - DNA, 25 bp, SARS Virus
gatgaagactggaaagcgtacatgg

SEQ ID NO: 200370 - DNA, 25 bp, SARS Virus
atgaagactggaaagcgtacatggt

SEQ ID NO: 200371 - DNA, 25 bp, SARS Virus
tgaagactggaaagcgtacatggta

SEQ ID NO: 200372 - DNA, 25 bp, SARS Virus
gaagactggaaaacgtacatggtac

SEQ ID NO: 200373 - DNA, 25 bp, SARS Virus
aagactggaaagagtacatggtaca

SEQ ID NO: 200374 - DNA, 25 bp, SARS Virus
agactggaaagcatacatggtacag

SEQ ID NO: 200375 - DNA, 25 bp, SARS Virus
gactggaaagcgaacatggtacaga

SEQ ID NO: 200376 - DNA, 25 bp, SARS Virus
actggaaagcgtacatggtacagat

SEQ ID NO: 200377 - DNA, 25 bp, SARS Virus
ctggaaagcgtaaatggtacagatg

SEQ ID NO: 200378 - DNA, 25 bp, SARS Virus
tggaaagcgtacatggtacagatgt

SEQ ID NO: 200379 - DNA, 25 bp, SARS Virus
ggaaagcgtacaaggtacagatgtc

SEQ ID NO: 200380 - DNA, 25 bp, SARS Virus
gaaagcgtacatagtacagatgtca

SEQ ID NO: 200381 - DNA, 25 bp, SARS Virus
aaagcgtacatgatacagatgtcat

SEQ ID NO: 200382 - DNA, 25 bp, SARS Virus
aagcgtacatggaacagatgtcatg

SEQ ID NO: 200383 - DNA, 25 bp, SARS Virus
agcgtacatggtacagatgtcatga

SEQ ID NO: 200384 - DNA, 25 bp, SARS Virus
gcgtacatggtaaagatgtcatgag

SEQ ID NO: 200385 - DNA, 25 bp, SARS Virus
cgtacatggtacagatgtcatgagt

SEQ ID NO: 200386 - DNA, 25 bp, SARS Virus
gtacatggtacaaatgtcatgagtc

SEQ ID NO: 200387 - DNA, 25 bp, SARS Virus
tacatggtacagatgtcatgagtcg

SEQ ID NO: 200388 - DNA, 25 bp, SARS Virus
acatggtacagaagtcatgagtcgt

SEQ ID NO: 200389 - DNA, 25 bp, SARS Virus
catggtacagatatcatgagtcgta

SEQ ID NO: 200390 - DNA, 25 bp, SARS Virus
atggtacagatgacatgagtcgtag

SEQ ID NO: 200391 - DNA, 25 bp, SARS Virus
tggtacagatgtaatgagtcgtagt

SEQ ID NO: 200392 - DNA, 25 bp, SARS Virus
ggtacagatgtcatgagtcgtagtt

SEQ ID NO: 200393 - DNA, 25 bp, SARS Virus
gtacagatgtcaagagtcgtagttt

SEQ ID NO: 200394 - DNA, 25 bp, SARS Virus
tacagatgtcataagtcgtagtttt

SEQ ID NO: 200395 - DNA, 25 bp, SARS Virus
acagatgtcatgagtcgtagttttc

SEQ ID NO: 200396 - DNA, 25 bp, SARS Virus
cagatgtcatgaatcgtagttttca

SEQ ID NO: 200397 - DNA, 25 bp, SARS Virus
agatgtcatgagacgtagttttcaa

SEQ ID NO: 200398 - DNA, 25 bp, SARS Virus
gatgtcatgagtagtagttttcaac

SEQ ID NO: 200399 - DNA, 25 bp, SARS Virus
atgtcatgagtcatagttttcaaca

SEQ ID NO: 200400 - DNA, 25 bp, SARS Virus
tgtcatgagtcgaagttttcaacaa

SEQ ID NO: 200401 - DNA, 25 bp, SARS Virus
gtcatgagtcgtagttttcaacaat

SEQ ID NO: 200402 - DNA, 25 bp, SARS Virus
tcatgagtcgtaattttcaacaatg

SEQ ID NO: 200403 - DNA, 25 bp, SARS Virus
catgagtcgtagatttcaacaatga

SEQ ID NO: 200404 - DNA, 25 bp, SARS Virus
atgagtcgtagtattcaacaatgat

SEQ ID NO: 200405 - DNA, 25 bp, SARS Virus
tgagtcgtagttatcaacaatgatg

SEQ ID NO: 200406 - DNA, 25 bp, SARS Virus
gagtcgtagtttacaacaatgatga

SEQ ID NO: 200407 - DNA, 25 bp, SARS Virus
agtcgtagttttaaacaatgatgag

SEQ ID NO: 200408 - DNA, 25 bp, SARS Virus
gtcgtagttttcaacaatgatgaga

SEQ ID NO: 200409 - DNA, 25 bp, SARS Virus
tcgtagttttcaacaatgatgagat

SEQ ID NO: 200410 - DNA, 25 bp, SARS Virus
cgtagttttcaaaaatgatgagatt

SEQ ID NO: 200411 - DNA, 25 bp, SARS Virus
gtagttttcaacaatgatgagattg

SEQ ID NO: 200412 - DNA, 25 bp, SARS Virus
tagttttcaacaatgatgagattgt

SEQ ID NO: 200413 - DNA, 25 bp, SARS Virus
agttttcaacaaagatgagattgtc

SEQ ID NO: 200414 - DNA, 25 bp, SARS Virus
gttttcaacaataatgagattgtct

SEQ ID NO: 200415 - DNA, 25 bp, SARS Virus
ttttcaacaatgatgagattgtctt

SEQ ID NO: 200416 - DNA, 25 bp, SARS Virus
tttcaacaatgaagagattgtcttg

SEQ ID NO: 200417 - DNA, 25 bp, SARS Virus
ttcaacaatgataagattgtcttgg

SEQ ID NO: 200418 - DNA, 25 bp, SARS Virus
tcaacaatgatgagattgtcttggg

SEQ ID NO: 200419 - DNA, 25 bp, SARS Virus
caacaatgatgaaattgtcttggga

SEQ ID NO: 200420 - DNA, 25 bp, SARS Virus
aacaatgatgagattgtcttgggag

SEQ ID NO: 200421 - DNA, 25 bp, SARS Virus
acaatgatgagaatgtcttgggagg

SEQ ID NO: 200422 - DNA, 25 bp, SARS Virus
caatgatgagatagtcttgggaggt

SEQ ID NO: 200423 - DNA, 25 bp, SARS Virus
aatgatgagattatcttgggaggtc

SEQ ID NO: 200424 - DNA, 25 bp, SARS Virus
atgatgagattgacttgggaggtcc

SEQ ID NO: 200425 - DNA, 25 bp, SARS Virus
tgatgagattgtattgggaggtcca

SEQ ID NO: 200426 - DNA, 25 bp, SARS Virus
gatgagattgtcatgggaggtccat

SEQ ID NO: 200427 - DNA, 25 bp, SARS Virus
atgagattgtctagggaggtccatt

SEQ ID NO: 200428 - DNA, 25 bp, SARS Virus
tgagattgtcttaggaggtccattc

SEQ ID NO: 200429 - DNA, 25 bp, SARS Virus
gagattgtcttgagaggtccattca

SEQ ID NO: 200430 - DNA, 25 bp, SARS Virus
agattgtcttggaaggtccattcac

SEQ ID NO: 200431 - DNA, 25 bp, SARS Virus
gattgtcttgggaggtccattcaca

SEQ ID NO: 200432 - DNA, 25 bp, SARS Virus
attgtcttgggaagtccattcacaa

SEQ ID NO: 200433 - DNA, 25 bp, SARS Virus
ttgtcttgggagatccattcacaat

SEQ ID NO: 200434 - DNA, 25 bp, SARS Virus
tgtcttgggaggaccattcacaatc

SEQ ID NO: 200435 - DNA, 25 bp, SARS Virus
gtcttgggaggtacattcacaatcc

SEQ ID NO: 200436 - DNA, 25 bp, SARS Virus
tcttgggaggtcaattcacaatcct

SEQ ID NO: 200437 - DNA, 25 bp, SARS Virus
cttgggaggtccattcacaatcctt

SEQ ID NO: 200438 - DNA, 25 bp, SARS Virus
ttgggaggtccaatcacaatccttt

SEQ ID NO: 200439 - DNA, 25 bp, SARS Virus
tgggaggtccatacacaatcctttg

SEQ ID NO: 200440 - DNA, 25 bp, SARS Virus
gggaggtccattaacaatcctttga

SEQ ID NO: 200441 - DNA, 25 bp, SARS Virus
ggaggtccattcacaatcctttgac

SEQ ID NO: 200442 - DNA, 25 bp, SARS Virus
gaggtccattcaaaatcctttgaca

SEQ ID NO: 200443 - DNA, 25 bp, SARS Virus
aggtccattcacaatcctttgacat

SEQ ID NO: 200444 - DNA, 25 bp, SARS Virus
ggtccattcacaatcctttgacata

SEQ ID NO: 200445 - DNA, 25 bp, SARS Virus
gtccattcacaaacctttgacatac

SEQ ID NO: 200446 - DNA, 25 bp, SARS Virus
tccattcacaatactttgacatact

SEQ ID NO: 200447 - DNA, 25 bp, SARS Virus
ccattcacaatcatttgacatacta

SEQ ID NO: 200448 - DNA, 25 bp, SARS Virus
cattcacaatccattgacatactac

SEQ ID NO: 200449 - DNA, 25 bp, SARS Virus
attcacaatcctatgacatactacc

SEQ ID NO: 200450 - DNA, 25 bp, SARS Virus
ttcacaatccttagacatactacct

SEQ ID NO: 200451 - DNA, 25 bp, SARS Virus
tcacaatcctttaacatactacctt

SEQ ID NO: 200452 - DNA, 25 bp, SARS Virus
cacaatcctttgacatactaccttg

SEQ ID NO: 200453 - DNA, 25 bp, SARS Virus
acaatcctttgaaatactaccttgg

SEQ ID NO: 200454 - DNA, 25 bp, SARS Virus
caatcctttgacatactaccttggt

SEQ ID NO: 200455 - DNA, 25 bp, SARS Virus
aatcctttgacaaactaccttggta

SEQ ID NO: 200456 - DNA, 25 bp, SARS Virus
atcctttgacatactaccttggtag

SEQ ID NO: 200457 - DNA, 25 bp, SARS Virus
tcctttgacataataccttggtagg

SEQ ID NO: 200458 - DNA, 25 bp, SARS Virus
cctttgacatacaaccttggtaggt

SEQ ID NO: 200459 - DNA, 25 bp, SARS Virus
ctttgacatactaccttggtaggta

SEQ ID NO: 200460 - DNA, 25 bp, SARS Virus
tttgacatactaacttggtaggtat

SEQ ID NO: 200461 - DNA, 25 bp, SARS Virus
ttgacatactacattggtaggtatt

SEQ ID NO: 200462 - DNA, 25 bp, SARS Virus
tgacatactaccatggtaggtattc

SEQ ID NO: 200463 - DNA, 25 bp, SARS Virus
gacatactacctaggtaggtattcg

SEQ ID NO: 200464 - DNA, 25 bp, SARS Virus
acatactaccttagtaggtattcgt

SEQ ID NO: 200465 - DNA, 25 bp, SARS Virus
catactaccttgataggtattcgtg

SEQ ID NO: 200466 - DNA, 25 bp, SARS Virus
atactaccttggaaggtattcgtgt

SEQ ID NO: 200467 - DNA, 25 bp, SARS Virus
tactaccttggtaggtattcgtgta

SEQ ID NO: 200468 - DNA, 25 bp, SARS Virus
actaccttggtaagtattcgtgtat

SEQ ID NO: 200469 - DNA, 25 bp, SARS Virus
ctaccttggtagatattcgtgtatt

SEQ ID NO: 200470 - DNA, 25 bp, SARS Virus
taccttggtaggaattcgtgtattg

SEQ ID NO: 200471 - DNA, 25 bp, SARS Virus
accttggtaggtattcgtgtattgc

SEQ ID NO: 200472 - DNA, 25 bp, SARS Virus
ccttggtaggtaatcgtgtattgct

SEQ ID NO: 200473 - DNA, 25 bp, SARS Virus
cttggtaggtatacgtgtattgctc

SEQ ID NO: 200474 - DNA, 25 bp, SARS Virus
ttggtaggtattagtgtattgctca

SEQ ID NO: 200475 - DNA, 25 bp, SARS Virus
tggtaggtattcatgtattgctcac

SEQ ID NO: 200476 - DNA, 25 bp, SARS Virus
ggtaggtattcgagtattgctcaca

SEQ ID NO: 200477 - DNA, 25 bp, SARS Virus
gtaggtattcgtatattgctcacag

SEQ ID NO: 200478 - DNA, 25 bp, SARS Virus
taggtattcgtgaattgctcacaga

SEQ ID NO: 200479 - DNA, 25 bp, SARS Virus
aggtattcgtgtattgctcacagac

SEQ ID NO: 200480 - DNA, 25 bp, SARS Virus
ggtattcgtgtaatgctcacagacc

SEQ ID NO: 200481 - DNA, 25 bp, SARS Virus
gtattcgtgtatagctcacagacct

SEQ ID NO: 200482 - DNA, 25 bp, SARS Virus
tattcgtgtattactcacagacctg

SEQ ID NO: 200483 - DNA, 25 bp, SARS Virus
attcgtgtattgatcacagacctgc

SEQ ID NO: 200484 - DNA, 25 bp, SARS Virus
ttcgtgtattgcacacagacctgct

SEQ ID NO: 200485 - DNA, 25 bp, SARS Virus
tcgtgtattgctaacagacctgctt

SEQ ID NO: 200486 - DNA, 25 bp, SARS Virus
cgtgtattgctcacagacctgcttc

SEQ ID NO: 200487 - DNA, 25 bp, SARS Virus
gtgtattgctcaaagacctgcttcg

SEQ ID NO: 200488 - DNA, 25 bp, SARS Virus
tgtattgctcacagacctgcttcga

SEQ ID NO: 200489 - DNA, 25 bp, SARS Virus
gtattgctcacaaacctgcttcgag

SEQ ID NO: 200490 - DNA, 25 bp, SARS Virus
tattgctcacagacctgcttcgagt

SEQ ID NO: 200491 - DNA, 25 bp, SARS Virus
attgctcacagaactgcttcgagtg

SEQ ID NO: 200492 - DNA, 25 bp, SARS Virus
ttgctcacagacatgcttcgagtga

SEQ ID NO: 200493 - DNA, 25 bp, SARS Virus
tgctcacagaccagcttcgagtgat

SEQ ID NO: 200494 - DNA, 25 bp, SARS Virus
gctcacagacctacttcgagtgata

SEQ ID NO: 200495 - DNA, 25 bp, SARS Virus
ctcacagacctgattcgagtgatat

SEQ ID NO: 200496 - DNA, 25 bp, SARS Virus
tcacagacctgcatcgagtgatatt

SEQ ID NO: 200497 - DNA, 25 bp, SARS Virus
cacagacctgctacgagtgatattc

SEQ ID NO: 200498 - DNA, 25 bp, SARS Virus
acagacctgcttagagtgatattct

SEQ ID NO: 200499 - DNA, 25 bp, SARS Virus
cagacctgcttcaagtgatattctt

SEQ ID NO: 200500 - DNA, 25 bp, SARS Virus
agacctgcttcgagtgatattcttt

SEQ ID NO: 200501 - DNA, 25 bp, SARS Virus
gacctgcttcgaatgatattcttta

SEQ ID NO: 200502 - DNA, 25 bp, SARS Virus
acctgcttcgagagatattctttat

SEQ ID NO: 200503 - DNA, 25 bp, SARS Virus
cctgcttcgagtaatattctttatc

SEQ ID NO: 200504 - DNA, 25 bp, SARS Virus
ctgcttcgagtgatattctttatct

SEQ ID NO: 200505 - DNA, 25 bp, SARS Virus
tgcttcgagtgaaattctttatctt

SEQ ID NO: 200506 - DNA, 25 bp, SARS Virus
gcttcgagtgatattctttatcttg

SEQ ID NO: 200507 - DNA, 25 bp, SARS Virus
cttcgagtgataatctttatcttgg

SEQ ID NO: 200508 - DNA, 25 bp, SARS Virus
ttcgagtgatatactttatcttggg

SEQ ID NO: 200509 - DNA, 25 bp, SARS Virus
tcgagtgatattatttatcttggga

SEQ ID NO: 200510 - DNA, 25 bp, SARS Virus
cgagtgatattcattatcttgggag

SEQ ID NO: 200511 - DNA, 25 bp, SARS Virus
gagtgatattctatatcttgggaga

SEQ ID NO: 200512 - DNA, 25 bp, SARS Virus
agtgatattcttaatcttgggagat

SEQ ID NO: 200513 - DNA, 25 bp, SARS Virus
gtgatattctttatcttgggagatc

SEQ ID NO: 200514 - DNA, 25 bp, SARS Virus
tgatattctttaacttgggagatcg

SEQ ID NO: 200515 - DNA, 25 bp, SARS Virus
gatattctttatattgggagatcgt

SEQ ID NO: 200516 - DNA, 25 bp, SARS Virus
atattctttatcatgggagatcgtt

SEQ ID NO: 200517 - DNA, 25 bp, SARS Virus
tattctttatctagggagatcgttt

SEQ ID NO: 200518 - DNA, 25 bp, SARS Virus
attctttatcttaggagatcgttta

SEQ ID NO: 200519 - DNA, 25 bp, SARS Virus
ttctttatcttgagagatcgtttaa

SEQ ID NO: 200520 - DNA, 25 bp, SARS Virus
tctttatcttggaagatcgtttaat

SEQ ID NO: 200521 - DNA, 25 bp, SARS Virus
ctttatcttgggagatcgtttaatc

SEQ ID NO: 200522 - DNA, 25 bp, SARS Virus
tttatcttgggaaatcgtttaatca

SEQ ID NO: 200523 - DNA, 25 bp, SARS Virus
ttatcttgggagatcgtttaatcac

SEQ ID NO: 200524 - DNA, 25 bp, SARS Virus
tatcttgggagaacgtttaatcaca

SEQ ID NO: 200525 - DNA, 25 bp, SARS Virus
atcttgggagatagtttaatcacag

SEQ ID NO: 200526 - DNA, 25 bp, SARS Virus
tcttgggagatcatttaatcacagt

SEQ ID NO: 200527 - DNA, 25 bp, SARS Virus
cttgggagatcgattaatcacagta

SEQ ID NO: 200528 - DNA, 25 bp, SARS Virus
ttgggagatcgtataatcacagtat

SEQ ID NO: 200529 - DNA, 25 bp, SARS Virus
tgggagatcgttaaatcacagtatt

SEQ ID NO: 200530 - DNA, 25 bp, SARS Virus
gggagatcgtttaatcacagtattg

SEQ ID NO: 200531 - DNA, 25 bp, SARS Virus
ggagatcgtttaatcacagtattgt

SEQ ID NO: 200532 - DNA, 25 bp, SARS Virus
gagatcgtttaaacacagtattgtt

SEQ ID NO: 200533 - DNA, 25 bp, SARS Virus
agatcgtttaataacagtattgtta

SEQ ID NO: 200534 - DNA, 25 bp, SARS Virus
gatcgtttaatcacagtattgttat

SEQ ID NO: 200535 - DNA, 25 bp, SARS Virus
atcgtttaatcaaagtattgttata

SEQ ID NO: 200536 - DNA, 25 bp, SARS Virus
tcgtttaatcacagtattgttatac

SEQ ID NO: 200537 - DNA, 25 bp, SARS Virus
cgtttaatcacaatattgttatacc

SEQ ID NO: 200538 - DNA, 25 bp, SARS Virus
gtttaatcacagaattgttataccg

SEQ ID NO: 200539 - DNA, 25 bp, SARS Virus
tttaatcacagtattgttataccgt

SEQ ID NO: 200540 - DNA, 25 bp, SARS Virus
ttaatcacagtaatgttataccgtg

SEQ ID NO: 200541 - DNA, 25 bp, SARS Virus
taatcacagtatagttataccgtgt

SEQ ID NO: 200542 - DNA, 25 bp, SARS Virus
aatcacagtattattataccgtgtc

SEQ ID NO: 200543 - DNA, 25 bp, SARS Virus
atcacagtattgatataccgtgtcc

SEQ ID NO: 200544 - DNA, 25 bp, SARS Virus
tcacagtattgtaataccgtgtcca

SEQ ID NO: 200545 - DNA, 25 bp, SARS Virus
cacagtattgttataccgtgtccaa

SEQ ID NO: 200546 - DNA, 25 bp, SARS Virus
acagtattgttaaaccgtgtccaaa

SEQ ID NO: 200547 - DNA, 25 bp, SARS Virus
cagtattgttataccgtgtccaaac

SEQ ID NO: 200548 - DNA, 25 bp, SARS Virus
agtattgttataacgtgtccaaacg

SEQ ID NO: 200549 - DNA, 25 bp, SARS Virus
gtattgttatacagtgtccaaacgg

SEQ ID NO: 200550 - DNA, 25 bp, SARS Virus
tattgttataccatgtccaaacggg

SEQ ID NO: 200551 - DNA, 25 bp, SARS Virus
attgttataccgagtccaaacgggt

SEQ ID NO: 200552 - DNA, 25 bp, SARS Virus
ttgttataccgtatccaaacgggta

SEQ ID NO: 200553 - DNA, 25 bp, SARS Virus
tgttataccgtgaccaaacgggtat

SEQ ID NO: 200554 - DNA, 25 bp, SARS Virus
gttataccgtgtacaaacgggtatc

SEQ ID NO: 200555 - DNA, 25 bp, SARS Virus
ttataccgtgtcaaaacgggtatcg

SEQ ID NO: 200556 - DNA, 25 bp, SARS Virus
tataccgtgtccaaacgggtatcgt

SEQ ID NO: 200557 - DNA, 25 bp, SARS Virus
ataccgtgtccaaacgggtatcgta

SEQ ID NO: 200558 - DNA, 25 bp, SARS Virus
taccgtgtccaaacgggtatcgtag

SEQ ID NO: 200559 - DNA, 25 bp, SARS Virus
accgtgtccaaaagggtatcgtagg

SEQ ID NO: 200560 - DNA, 25 bp, SARS Virus
ccgtgtccaaacaggtatcgtagga

SEQ ID NO: 200561 - DNA, 25 bp, SARS Virus
cgtgtccaaacgagtatcgtaggaa

SEQ ID NO: 200562 - DNA, 25 bp, SARS Virus
gtgtccaaacggatatcgtaggaat

SEQ ID NO: 200563 - DNA, 25 bp, SARS Virus
tgtccaaacgggaatcgtaggaatt

SEQ ID NO: 200564 - DNA, 25 bp, SARS Virus
gtccaaacgggtatcgtaggaattt

SEQ ID NO: 200565 - DNA, 25 bp, SARS Virus
tccaaacgggtaacgtaggaatttt

SEQ ID NO: 200566 - DNA, 25 bp, SARS Virus
ccaaacgggtatagtaggaattttt

SEQ ID NO: 200567 - DNA, 25 bp, SARS Virus
caaacgggtatcataggaattttta

SEQ ID NO: 200568 - DNA, 25 bp, SARS Virus
aaacgggtatcgaaggaatttttaa

SEQ ID NO: 200569 - DNA, 25 bp, SARS Virus
aacgggtatcgtaggaatttttaac

SEQ ID NO: 200570 - DNA, 25 bp, SARS Virus
acgggtatcgtaagaatttttaaca

SEQ ID NO: 200571 - DNA, 25 bp, SARS Virus
cgggtatcgtagaaatttttaacat

SEQ ID NO: 200572 - DNA, 25 bp, SARS Virus
gggtatcgtaggaatttttaacatg

SEQ ID NO: 200573 - DNA, 25 bp, SARS Virus
ggtatcgtaggaatttttaacatgt

SEQ ID NO: 200574 - DNA, 25 bp, SARS Virus
gtatcgtaggaaattttaacatgtg

SEQ ID NO: 200575 - DNA, 25 bp, SARS Virus
tatcgtaggaatatttaacatgtga

SEQ ID NO: 200576 - DNA, 25 bp, SARS Virus
atcgtaggaattattaacatgtgag

SEQ ID NO: 200577 - DNA, 25 bp, SARS Virus
tcgtaggaatttataacatgtgagt

SEQ ID NO: 200578 - DNA, 25 bp, SARS Virus
cgtaggaattttaaacatgtgagtc

SEQ ID NO: 200579 - DNA, 25 bp, SARS Virus
gtaggaatttttaacatgtgagtcg

SEQ ID NO: 200580 - DNA, 25 bp, SARS Virus
taggaatttttaacatgtgagtcgt

SEQ ID NO: 200581 - DNA, 25 bp, SARS Virus
aggaatttttaaaatgtgagtcgtc

SEQ ID NO: 200582 - DNA, 25 bp, SARS Virus
ggaatttttaacatgtgagtcgtcg

SEQ ID NO: 200583 - DNA, 25 bp, SARS Virus
gaatttttaacaagtgagtcgtcgt

SEQ ID NO: 200584 - DNA, 25 bp, SARS Virus
aatttttaacatatgagtcgtcgtt

SEQ ID NO: 200585 - DNA, 25 bp, SARS Virus
atttttaacatgagagtcgtcgttc

SEQ ID NO: 200586 - DNA, 25 bp, SARS Virus
tttttaacatgtaagtcgtcgttct

SEQ ID NO: 200587 - DNA, 25 bp, SARS Virus
ttttaacatgtgagtcgtcgttctt

SEQ ID NO: 200588 - DNA, 25 bp, SARS Virus
tttaacatgtgaatcgtcgttcttg

SEQ ID NO: 200589 - DNA, 25 bp, SARS Virus
ttaacatgtgagacgtcgttcttgc

SEQ ID NO: 200590 - DNA, 25 bp, SARS Virus
taacatgtgagtagtcgttcttgcg

SEQ ID NO: 200591 - DNA, 25 bp, SARS Virus
aacatgtgagtcatcgttcttgcgt

SEQ ID NO: 200592 - DNA, 25 bp, SARS Virus
acatgtgagtcgacgttcttgcgtt

SEQ ID NO: 200593 - DNA, 25 bp, SARS Virus
catgtgagtcgtagttcttgcgttc

SEQ ID NO: 200594 - DNA, 25 bp, SARS Virus
atgtgagtcgtcattcttgcgttcg

SEQ ID NO: 200595 - DNA, 25 bp, SARS Virus
tgtgagtcgtcgatcttgcgttcgt

SEQ ID NO: 200596 - DNA, 25 bp, SARS Virus
gtgagtcgtcgtacttgcgttcgtc

SEQ ID NO: 200597 - DNA, 25 bp, SARS Virus
tgagtcgtcgttattgcgttcgtct

SEQ ID NO: 200598 - DNA, 25 bp, SARS Virus
gagtcgtcgttcatgcgttcgtctc

SEQ ID NO: 200599 - DNA, 25 bp, SARS Virus
agtcgtcgttctagcgttcgtctcc

SEQ ID NO: 200600 - DNA, 25 bp, SARS Virus
gtcgtcgttcttacgttcgtctcca

SEQ ID NO: 200601 - DNA, 25 bp, SARS Virus
cgtcgttgttgtcccaacatgagtg

SEQ ID NO: 200602 - DNA, 25 bp, SARS Virus
gtcgttgttgtaccaacatgagtgg

SEQ ID NO: 200603 - DNA, 25 bp, SARS Virus
tcgttgttgtaccaacatgagtggt

SEQ ID NO: 200604 - DNA, 25 bp, SARS Virus
cgttgttgtacccacatgagtggtt

SEQ ID NO: 200605 - DNA, 25 bp, SARS Virus
gttgttgtaccaccatgagtggttt

SEQ ID NO: 200606 - DNA, 25 bp, SARS Virus
ttgttgtaccaacatgagtggtttt

SEQ ID NO: 200607 - DNA, 25 bp, SARS Virus
tgttgtaccaacctgagtggttttt

SEQ ID NO: 200608 - DNA, 25 bp, SARS Virus
gttgtaccaacacgagtggtttttg

SEQ ID NO: 200609 - DNA, 25 bp, SARS Virus
ttgtaccaacatcagtggtttttgt

SEQ ID NO: 200610 - DNA, 25 bp, SARS Virus
tgtaccaacatgcgtggtttttgtg

SEQ ID NO: 200611 - DNA, 25 bp, SARS Virus
gtaccaacatgactggtttttgtgc

SEQ ID NO: 200612 - DNA, 25 bp, SARS Virus
taccaacatgagcggtttttgtgca

SEQ ID NO: 200613 - DNA, 25 bp, SARS Virus
accaacatgagtcgtttttgtgcag

SEQ ID NO: 200614 - DNA, 25 bp, SARS Virus
ccaacatgagtgctttttgtgcaga

SEQ ID NO: 200615 - DNA, 25 bp, SARS Virus
caacatgagtggcttttgtgcagac

SEQ ID NO: 200616 - DNA, 25 bp, SARS Virus
aacatgagtggtctttgtgcagact

SEQ ID NO: 200617 - DNA, 25 bp, SARS Virus
acatgagtggttcttgtgcagactt

SEQ ID NO: 200618 - DNA, 25 bp, SARS Virus
catgagtggtttctgtgcagactta

SEQ ID NO: 200619 - DNA, 25 bp, SARS Virus
atgagtggttttcgtgcagacttaa

SEQ ID NO: 200620 - DNA, 25 bp, SARS Virus
tgagtggtttttctgcagacttaaa

SEQ ID NO: 200621 - DNA, 25 bp, SARS Virus
gagtggtttttgcgcagacttaaag

SEQ ID NO: 200622 - DNA, 25 bp, SARS Virus
agtggtttttgtccagacttaaagt

SEQ ID NO: 200623 - DNA, 25 bp, SARS Virus
gtggtttttgtgcagacttaaagta

SEQ ID NO: 200624 - DNA, 25 bp, SARS Virus
tggtttttgtgccgacttaaagtat

SEQ ID NO: 200625 - DNA, 25 bp, SARS Virus
ggtttttgtgcacacttaaagtatt

SEQ ID NO: 200626 - DNA, 25 bp, SARS Virus
gtttttgtgcagccttaaagtattt

SEQ ID NO: 200627 - DNA, 25 bp, SARS Virus
tttttgtgcagacttaaagtatttc

SEQ ID NO: 200628 - DNA, 25 bp, SARS Virus
ttttgtgcagacctaaagtatttca

SEQ ID NO: 200629 - DNA, 25 bp, SARS Virus
tttgtgcagactcaaagtatttcat

SEQ ID NO: 200630 - DNA, 25 bp, SARS Virus
ttgtgcagacttcaagtatttcatc

SEQ ID NO: 200631 - DNA, 25 bp, SARS Virus
tgtgcagacttacagtatttcatca

SEQ ID NO: 200632 - DNA, 25 bp, SARS Virus
gtgcagacttaacgtatttcatcat

SEQ ID NO: 200633 - DNA, 25 bp, SARS Virus
tgcagacttaaactatttcatcatc

SEQ ID NO: 200634 - DNA, 25 bp, SARS Virus
gcagacttaaagcatttcatcatcc

SEQ ID NO: 200635 - DNA, 25 bp, SARS Virus
cagacttaaagtctttcatcatccg

SEQ ID NO: 200636 - DNA, 25 bp, SARS Virus
agacttaaagtacttcatcatccgt

SEQ ID NO: 200637 - DNA, 25 bp, SARS Virus
gacttaaagtatctcatcatccgtc

SEQ ID NO: 200638 - DNA, 25 bp, SARS Virus
acttaaagtattccatcatccgtcg

SEQ ID NO: 200639 - DNA, 25 bp, SARS Virus
cttaaagtatttcatcatccgtcgt

SEQ ID NO: 200640 - DNA, 25 bp, SARS Virus
ttaaagtatttcctcatccgtcgtg

SEQ ID NO: 200641 - DNA, 25 bp, SARS Virus
taaagtatttcaccatccgtcgtgt

SEQ ID NO: 200642 - DNA, 25 bp, SARS Virus
aaagtatttcatcatccgtcgtgtt

SEQ ID NO: 200643 - DNA, 25 bp, SARS Virus
aagtatttcatcctccgtcgtgttc

SEQ ID NO: 200644 - DNA, 25 bp, SARS Virus
agtatttcatcacccgtcgtgttca

SEQ ID NO: 200645 - DNA, 25 bp, SARS Virus
gtatttcatcatccgtcgtgttcag

SEQ ID NO: 200646 - DNA, 25 bp, SARS Virus
tatttcatcatccgtcgtgttcagt

SEQ ID NO: 200647 - DNA, 25 bp, SARS Virus
atttcatcatccctcgtgttcagtg

SEQ ID NO: 200648 - DNA, 25 bp, SARS Virus
tttcatcatccgccgtgttcagtgg

SEQ ID NO: 200649 - DNA, 25 bp, SARS Virus
ttcatcatccgtcgtgttcagtggt

SEQ ID NO: 200650 - DNA, 25 bp, SARS Virus
tcatcatccgtcctgttcagtggtt

SEQ ID NO: 200651 - DNA, 25 bp, SARS Virus
catcatccgtcgcgttcagtggtta

SEQ ID NO: 200652 - DNA, 25 bp, SARS Virus
atcatccgtcgtcttcagtggttat

SEQ ID NO: 200653 - DNA, 25 bp, SARS Virus
tcatccgtcgtgctcagtggttata

SEQ ID NO: 200654 - DNA, 25 bp, SARS Virus
catccgtcgtgtccagtggttatac

SEQ ID NO: 200655 - DNA, 25 bp, SARS Virus
atccgtcgtgttcagtggttatacc

SEQ ID NO: 200656 - DNA, 25 bp, SARS Virus
tccgtcgtgttccgtggttataccg

SEQ ID NO: 200657 - DNA, 25 bp, SARS Virus
ccgtcgtgttcactggttataccgt

SEQ ID NO: 200658 - DNA, 25 bp, SARS Virus
cgtcgtgttcagcggttataccgtt

SEQ ID NO: 200659 - DNA, 25 bp, SARS Virus
gtcgtgttcagtcgttataccgtta

SEQ ID NO: 200660 - DNA, 25 bp, SARS Virus
tcgtgttcagtgcttataccgttat

SEQ ID NO: 200661 - DNA, 25 bp, SARS Virus
cgtgttcagtggctataccgttatt

SEQ ID NO: 200662 - DNA, 25 bp, SARS Virus
gtgttcagtggtcataccgttatta

SEQ ID NO: 200663 - DNA, 25 bp, SARS Virus
tgttcagtggttctaccgttattat

SEQ ID NO: 200664 - DNA, 25 bp, SARS Virus
gttcagtggttacaccgttattatg

SEQ ID NO: 200665 - DNA, 25 bp, SARS Virus
ttcagtggttatcccgttattatgg

SEQ ID NO: 200666 - DNA, 25 bp, SARS Virus
tcagtggttataccgttattatggt

SEQ ID NO: 200667 - DNA, 25 bp, SARS Virus
cagtggttataccgttattatggtg

SEQ ID NO: 200668 - DNA, 25 bp, SARS Virus
agtggttatacccttattatggtgg

SEQ ID NO: 200669 - DNA, 25 bp, SARS Virus
gtggttataccgctattatggtggt

SEQ ID NO: 200670 - DNA, 25 bp, SARS Virus
tggttataccgtcattatggtggtc

SEQ ID NO: 200671 - DNA, 25 bp, SARS Virus
ggttataccgttcttatggtggtcg

SEQ ID NO: 200672 - DNA, 25 bp, SARS Virus
gttataccgttactatggtggtcgg

SEQ ID NO: 200673 - DNA, 25 bp, SARS Virus
ttataccgttatcatggtggtcggt

SEQ ID NO: 200674 - DNA, 25 bp, SARS Virus
tataccgttattctggtggtcggtg

SEQ ID NO: 200675 - DNA, 25 bp, SARS Virus
ataccgttattacggtggtcggtga

SEQ ID NO: 200676 - DNA, 25 bp, SARS Virus
taccgttattatcgtggtcggtgat

SEQ ID NO: 200677 - DNA, 25 bp, SARS Virus
accgttattatgctggtcggtgatg

SEQ ID NO: 200678 - DNA, 25 bp, SARS Virus
ccgttattatggcggtcggtgatga

SEQ ID NO: 200679 - DNA, 25 bp, SARS Virus
cgttattatggtcgtcggtgatgac

SEQ ID NO: 200680 - DNA, 25 bp, SARS Virus
gttattatggtgctcggtgatgact

SEQ ID NO: 200681 - DNA, 25 bp, SARS Virus
ttattatggtggccggtgatgactt

SEQ ID NO: 200682 - DNA, 25 bp, SARS Virus
tattatggtggtcggtgatgacttc

SEQ ID NO: 200683 - DNA, 25 bp, SARS Virus
attatggtggtccgtgatgacttcg

SEQ ID NO: 200684 - DNA, 25 bp, SARS Virus
ttatggtggtcgctgatgacttcgt

SEQ ID NO: 200685 - DNA, 25 bp, SARS Virus
tatggtggtcggcgatgacttcgtc

SEQ ID NO: 200686 - DNA, 25 bp, SARS Virus
atggtggtcggtcatgacttcgtct

SEQ ID NO: 200687 - DNA, 25 bp, SARS Virus
tggtggtcggtgctgacttcgtctg

SEQ ID NO: 200688 - DNA, 25 bp, SARS Virus
ggtggtcggtgacgacttcgtctgt

SEQ ID NO: 200689 - DNA, 25 bp, SARS Virus
gtggtcggtgatcacttcgtctgtg

SEQ ID NO: 200690 - DNA, 25 bp, SARS Virus
tggtcggtgatgccttcgtctgtgt

SEQ ID NO: 200691 - DNA, 25 bp, SARS Virus
ggtcggtgatgacttcgtctgtgta

SEQ ID NO: 200692 - DNA, 25 bp, SARS Virus
gtcggtgatgacctcgtctgtgtag

SEQ ID NO: 200693 - DNA, 25 bp, SARS Virus
tcggtgatgactccgtctgtgtaga

SEQ ID NO: 200694 - DNA, 25 bp, SARS Virus
cggtgatgacttcgtctgtgtagat

SEQ ID NO: 200695 - DNA, 25 bp, SARS Virus
ggtgatgacttcctctgtgtagatt

SEQ ID NO: 200696 - DNA, 25 bp, SARS Virus
gtgatgacttcgcctgtgtagattt

SEQ ID NO: 200697 - DNA, 25 bp, SARS Virus
tgatgacttcgtctgtgtagatttc

SEQ ID NO: 200698 - DNA, 25 bp, SARS Virus
gatgacttcgtccgtgtagatttcg

SEQ ID NO: 200699 - DNA, 25 bp, SARS Virus
atgacttcgtctctgtagatttcgt

SEQ ID NO: 200700 - DNA, 25 bp, SARS Virus
tgacttcgtctgcgtagatttcgtg

SEQ ID NO: 200701 - DNA, 25 bp, SARS Virus
gacttcgtctgtctagatttcgtgg

SEQ ID NO: 200702 - DNA, 25 bp, SARS Virus
acttcgtctgtgcagatttcgtggg

SEQ ID NO: 200703 - DNA, 25 bp, SARS Virus
cttcgtctgtgtcgatttcgtgggt

SEQ ID NO: 200704 - DNA, 25 bp, SARS Virus
ttcgtctgtgtacatttcgtgggtg

SEQ ID NO: 200705 - DNA, 25 bp, SARS Virus
tcgtctgtgtagctttcgtgggtgt

SEQ ID NO: 200706 - DNA, 25 bp, SARS Virus
cgtctgtgtagacttcgtgggtgtc

SEQ ID NO: 200707 - DNA, 25 bp, SARS Virus
gtctgtgtagatctcgtgggtgtcc

SEQ ID NO: 200708 - DNA, 25 bp, SARS Virus
tctgtgtagattccgtgggtgtcca

SEQ ID NO: 200709 - DNA, 25 bp, SARS Virus
ctgtgtagatttcgtgggtgtccaa

SEQ ID NO: 200710 - DNA, 25 bp, SARS Virus
tgtgtagatttcctgggtgtccaac

SEQ ID NO: 200711 - DNA, 25 bp, SARS Virus
gtgtagatttcgcgggtgtccaacg

SEQ ID NO: 200712 - DNA, 25 bp, SARS Virus
tgtagatttcgtcggtgtccaacgt

SEQ ID NO: 200713 - DNA, 25 bp, SARS Virus
gtagatttcgtgcgtgtccaacgtg

SEQ ID NO: 200714 - DNA, 25 bp, SARS Virus
tagatttcgtggctgtccaacgtgt

SEQ ID NO: 200715 - DNA, 25 bp, SARS Virus
agatttcgtgggcgtccaacgtgtt

SEQ ID NO: 200716 - DNA, 25 bp, SARS Virus
gatttcgtgggtctccaacgtgttc

SEQ ID NO: 200717 - DNA, 25 bp, SARS Virus
atttcgtgggtgcccaacgtgttct

SEQ ID NO: 200718 - DNA, 25 bp, SARS Virus
tttcgtgggtgtccaacgtgttctc

SEQ ID NO: 200719 - DNA, 25 bp, SARS Virus
ttcgtgggtgtccaacgtgttctcc

SEQ ID NO: 200720 - DNA, 25 bp, SARS Virus
tcgtgggtgtcccacgtgttctcct

SEQ ID NO: 200721 - DNA, 25 bp, SARS Virus
cgtgggtgtccaccgtgttctcctc

SEQ ID NO: 200722 - DNA, 25 bp, SARS Virus
gtgggtgtccaacgtgttctcctca

SEQ ID NO: 200723 - DNA, 25 bp, SARS Virus
tgggtgtccaacctgttctcctcat

SEQ ID NO: 200724 - DNA, 25 bp, SARS Virus
gggtgtccaacgcgttctcctcatt

SEQ ID NO: 200725 - DNA, 25 bp, SARS Virus
ggtgtccaacgtcttctcctcattt

SEQ ID NO: 200726 - DNA, 25 bp, SARS Virus
gtgtccaacgtgctctcctcatttc

SEQ ID NO: 200727 - DNA, 25 bp, SARS Virus
tgtccaacgtgtcctcctcatttct

SEQ ID NO: 200728 - DNA, 25 bp, SARS Virus
gtccaacgtgttctcctcatttcta

SEQ ID NO: 200729 - DNA, 25 bp, SARS Virus
tccaacgtgttcccctcatttctac

SEQ ID NO: 200730 - DNA, 25 bp, SARS Virus
ccaacgtgttctcctcatttctaca

SEQ ID NO: 200731 - DNA, 25 bp, SARS Virus
caacgtgttctcctcatttctacaa

SEQ ID NO: 200732 - DNA, 25 bp, SARS Virus
aacgtgttctccccatttctacaat

SEQ ID NO: 200733 - DNA, 25 bp, SARS Virus
acgtgttctcctcatttctacaatc

SEQ ID NO: 200734 - DNA, 25 bp, SARS Virus
cgtgttctcctcctttctacaatcg

SEQ ID NO: 200735 - DNA, 25 bp, SARS Virus
gtgttctcctcacttctacaatcga

SEQ ID NO: 200736 - DNA, 25 bp, SARS Virus
tgttctcctcatctctacaatcgat

SEQ ID NO: 200737 - DNA, 25 bp, SARS Virus
gttctcctcattcctacaatcgata

SEQ ID NO: 200738 - DNA, 25 bp, SARS Virus
ttctcctcatttctacaatcgatac

SEQ ID NO: 200739 - DNA, 25 bp, SARS Virus
tctcctcatttccacaatcgatact

SEQ ID NO: 200740 - DNA, 25 bp, SARS Virus
ctcctcatttctccaatcgatactc

SEQ ID NO: 200741 - DNA, 25 bp, SARS Virus
tcctcatttctacaatcgatactct

SEQ ID NO: 200742 - DNA, 25 bp, SARS Virus
cctcatttctaccatcgatactcta

SEQ ID NO: 200743 - DNA, 25 bp, SARS Virus
ctcatttctacactcgatactctaa

SEQ ID NO: 200744 - DNA, 25 bp, SARS Virus
tcatttctacaaccgatactctaag

SEQ ID NO: 200745 - DNA, 25 bp, SARS Virus
catttctacaatcgatactctaagt

SEQ ID NO: 200746 - DNA, 25 bp, SARS Virus
atttctacaatccatactctaagta

SEQ ID NO: 200747 - DNA, 25 bp, SARS Virus
tttctacaatcgctactctaagtag

SEQ ID NO: 200748 - DNA, 25 bp, SARS Virus
ttctacaatcgacactctaagtagc

SEQ ID NO: 200749 - DNA, 25 bp, SARS Virus
tctacaatcgatcctctaagtagcg

SEQ ID NO: 200750 - DNA, 25 bp, SARS Virus
ctacaatcgatactctaagtagcgt

SEQ ID NO: 200751 - DNA, 25 bp, SARS Virus
tacaatcgataccctaagtagcgta

SEQ ID NO: 200752 - DNA, 25 bp, SARS Virus
acaatcgatactctaagtagcgtag

SEQ ID NO: 200753 - DNA, 25 bp, SARS Virus
caatcgatactccaagtagcgtagt

SEQ ID NO: 200754 - DNA, 25 bp, SARS Virus
aatcgatactctcagtagcgtagtt

SEQ ID NO: 200755 - DNA, 25 bp, SARS Virus
atcgatactctacgtagcgtagttg

SEQ ID NO: 200756 - DNA, 25 bp, SARS Virus
tcgatactctaactagcgtagttgt

SEQ ID NO: 200757 - DNA, 25 bp, SARS Virus
cgatactctaagcagcgtagttgtg

SEQ ID NO: 200758 - DNA, 25 bp, SARS Virus
gatactctaagtcgcgtagttgtgg

SEQ ID NO: 200759 - DNA, 25 bp, SARS Virus
atactctaagtaccgtagttgtggt

SEQ ID NO: 200760 - DNA, 25 bp, SARS Virus
tactctaagtagcgtagttgtggtg

SEQ ID NO: 200761 - DNA, 25 bp, SARS Virus
actctaagtagcctagttgtggtgt

SEQ ID NO: 200762 - DNA, 25 bp, SARS Virus
ctctaagtagcgcagttgtggtgtc

SEQ ID NO: 200763 - DNA, 25 bp, SARS Virus
tctaagtagcgtcgttgtggtgtct

SEQ ID NO: 200764 - DNA, 25 bp, SARS Virus
ctaagtagcgtacttgtggtgtctt

SEQ ID NO: 200765 - DNA, 25 bp, SARS Virus
taagtagcgtagctgtggtgtcttt

SEQ ID NO: 200766 - DNA, 25 bp, SARS Virus
aagtagcgtagtcgtggtgtctttt

SEQ ID NO: 200767 - DNA, 25 bp, SARS Virus
agtagcgtagttctggtgtcttttg

SEQ ID NO: 200768 - DNA, 25 bp, SARS Virus
gtagcgtagttgcggtgtcttttga

SEQ ID NO: 200769 - DNA, 25 bp, SARS Virus
tagcgtagttgtcgtgtcttttgag

SEQ ID NO: 200770 - DNA, 25 bp, SARS Virus
agcgtagttgtgctgtcttttgagg

SEQ ID NO: 200771 - DNA, 25 bp, SARS Virus
gcgtagttgtggcgtcttttgagga

SEQ ID NO: 200772 - DNA, 25 bp, SARS Virus
cgtagttgtggtctcttttgaggac

SEQ ID NO: 200773 - DNA, 25 bp, SARS Virus
gtagttgtggtgccttttgaggact

SEQ ID NO: 200774 - DNA, 25 bp, SARS Virus
tagttgtggtgtcttttgaggacta

SEQ ID NO: 200775 - DNA, 25 bp, SARS Virus
agttgtggtgtcctttgaggactat

SEQ ID NO: 200776 - DNA, 25 bp, SARS Virus
gttgtggtgtctcttgaggactatc

SEQ ID NO: 200777 - DNA, 25 bp, SARS Virus
ttgtggtgtcttctgaggactatct

SEQ ID NO: 200778 - DNA, 25 bp, SARS Virus
tgtggtgtctttcgaggactatctc

SEQ ID NO: 200779 - DNA, 25 bp, SARS Virus
gtggtgtcttttcaggactatctcg

SEQ ID NO: 200780 - DNA, 25 bp, SARS Virus
tggtgtcttttgcggactatctcga

SEQ ID NO: 200781 - DNA, 25 bp, SARS Virus
ggtgtcttttgacgactatctcgag

SEQ ID NO: 200782 - DNA, 25 bp, SARS Virus
gtgtcttttgagcactatctcgaga

SEQ ID NO: 200783 - DNA, 25 bp, SARS Virus
tgtcttttgaggcctatctcgagac

SEQ ID NO: 200784 - DNA, 25 bp, SARS Virus
gtcttttgaggactatctcgagaca

SEQ ID NO: 200785 - DNA, 25 bp, SARS Virus
tcttttgaggaccatctcgagacat

SEQ ID NO: 200786 - DNA, 25 bp, SARS Virus
cttttgaggactctctcgagacatt

SEQ ID NO: 200787 - DNA, 25 bp, SARS Virus
ttttgaggactacctcgagacatta

SEQ ID NO: 200788 - DNA, 25 bp, SARS Virus
tttgaggactatctcgagacattac

SEQ ID NO: 200789 - DNA, 25 bp, SARS Virus
ttgaggactatcccgagacattacg

SEQ ID NO: 200790 - DNA, 25 bp, SARS Virus
tgaggactatctcgagacattacga

SEQ ID NO: 200791 - DNA, 25 bp, SARS Virus
gaggactatctccagacattacgag

SEQ ID NO: 200792 - DNA, 25 bp, SARS Virus
aggactatctcgcgacattacgagt

SEQ ID NO: 200793 - DNA, 25 bp, SARS Virus
ggactatctcgacacattacgagta

SEQ ID NO: 200794 - DNA, 25 bp, SARS Virus
gactatctcgagccattacgagtaa

SEQ ID NO: 200795 - DNA, 25 bp, SARS Virus
actatctcgagacattacgagtaat

SEQ ID NO: 200796 - DNA, 25 bp, SARS Virus
ctatctcgagaccttacgagtaata

SEQ ID NO: 200797 - DNA, 25 bp, SARS Virus
tatctcgagacactacgagtaataa

SEQ ID NO: 200798 - DNA, 25 bp, SARS Virus
atctcgagacatcacgagtaataat

SEQ ID NO: 200799 - DNA, 25 bp, SARS Virus
tctcgagacattccgagtaataatt

SEQ ID NO: 200800 - DNA, 25 bp, SARS Virus
ctcgagacattacgagtaataattc

SEQ ID NO: 200801 - DNA, 25 bp, SARS Virus
tcgagacattaccagtaataattct

SEQ ID NO: 200802 - DNA, 25 bp, SARS Virus
cgagacattacgcgtaataattctt

SEQ ID NO: 200803 - DNA, 25 bp, SARS Virus
gagacattacgactaataattcttg

SEQ ID NO: 200804 - DNA, 25 bp, SARS Virus
agacattacgagcaataattcttgg

SEQ ID NO: 200805 - DNA, 25 bp, SARS Virus
gacattacgagtcataattcttggg

SEQ ID NO: 200806 - DNA, 25 bp, SARS Virus
acattacgagtactaattcttgggt

SEQ ID NO: 200807 - DNA, 25 bp, SARS Virus
cattacgagtaacaattcttgggta

SEQ ID NO: 200808 - DNA, 25 bp, SARS Virus
attacgagtaatcattcttgggtag

SEQ ID NO: 200809 - DNA, 25 bp, SARS Virus
ttacgagtaatacttcttgggtaga

SEQ ID NO: 200810 - DNA, 25 bp, SARS Virus
tacgagtaataactcttgggtagat

SEQ ID NO: 200811 - DNA, 25 bp, SARS Virus
acgagtaataatccttgggtagatg

SEQ ID NO: 200812 - DNA, 25 bp, SARS Virus
cgagtaataattcttgggtagatgg

SEQ ID NO: 200813 - DNA, 25 bp, SARS Virus
gagtaataattcctgggtagatggt

SEQ ID NO: 200814 - DNA, 25 bp, SARS Virus
agtaataattctcgggtagatggtg

SEQ ID NO: 200815 - DNA, 25 bp, SARS Virus
gtaataattcttcggtagatggtga

SEQ ID NO: 200816 - DNA, 25 bp, SARS Virus
taataattcttgcgtagatggtgac

SEQ ID NO: 200817 - DNA, 25 bp, SARS Virus
aataattcttggctagatggtgacc

SEQ ID NO: 200818 - DNA, 25 bp, SARS Virus
ataattcttgggcagatggtgacca

SEQ ID NO: 200819 - DNA, 25 bp, SARS Virus
taattcttgggtcgatggtgaccat

SEQ ID NO: 200820 - DNA, 25 bp, SARS Virus
aattcttgggtacatggtgaccatc

SEQ ID NO: 200821 - DNA, 25 bp, SARS Virus
attcttgggtagctggtgaccatct

SEQ ID NO: 200822 - DNA, 25 bp, SARS Virus
ttcttgggtagacggtgaccatcta

SEQ ID NO: 200823 - DNA, 25 bp, SARS Virus
tcttgggtagatcgtgaccatctat

SEQ ID NO: 200824 - DNA, 25 bp, SARS Virus
cttgggtagatgctgaccatctatc

SEQ ID NO: 200825 - DNA, 25 bp, SARS Virus
ttgggtagatggcgaccatctatcc

SEQ ID NO: 200826 - DNA, 25 bp, SARS Virus
tgggtagatggtcaccatctatccg

SEQ ID NO: 200827 - DNA, 25 bp, SARS Virus
gggtagatggtgcccatctatccgt

SEQ ID NO: 200828 - DNA, 25 bp, SARS Virus
ggtagatggtgaccatctatccgtt

SEQ ID NO: 200829 - DNA, 25 bp, SARS Virus
gtagatggtgaccatctatccgttt

SEQ ID NO: 200830 - DNA, 25 bp, SARS Virus
tagatggtgaccctctatccgttta

SEQ ID NO: 200831 - DNA, 25 bp, SARS Virus
agatggtgaccacctatccgtttat

SEQ ID NO: 200832 - DNA, 25 bp, SARS Virus
gatggtgaccatctatccgtttatg

SEQ ID NO: 200833 - DNA, 25 bp, SARS Virus
atggtgaccatccatccgtttatgg

SEQ ID NO: 200834 - DNA, 25 bp, SARS Virus
tggtgaccatctctccgtttatgga

SEQ ID NO: 200835 - DNA, 25 bp, SARS Virus
ggtgaccatctacccgtttatggat

SEQ ID NO: 200836 - DNA, 25 bp, SARS Virus
gtgaccatctatccgtttatggatg

SEQ ID NO: 200837 - DNA, 25 bp, SARS Virus
tgaccatctatccgtttatggatga

SEQ ID NO: 200838 - DNA, 25 bp, SARS Virus
gaccatctatccctttatggatgaa

SEQ ID NO: 200839 - DNA, 25 bp, SARS Virus
accatctatccgcttatggatgaag

SEQ ID NO: 200840 - DNA, 25 bp, SARS Virus
ccatctatccgtctatggatgaaga

SEQ ID NO: 200841 - DNA, 25 bp, SARS Virus
catctatccgttcatggatgaagac

SEQ ID NO: 200842 - DNA, 25 bp, SARS Virus
atctatccgtttctggatgaagact

SEQ ID NO: 200843 - DNA, 25 bp, SARS Virus
tctatccgtttacggatgaagactg

SEQ ID NO: 200844 - DNA, 25 bp, SARS Virus
ctatccgtttatcgatgaagactgg

SEQ ID NO: 200845 - DNA, 25 bp, SARS Virus
tatccgtttatgcatgaagactgga

SEQ ID NO: 200846 - DNA, 25 bp, SARS Virus
atccgtttatggctgaagactggaa

SEQ ID NO: 200847 - DNA, 25 bp, SARS Virus
tccgtttatggacgaagactggaaa

SEQ ID NO: 200848 - DNA, 25 bp, SARS Virus
ccgtttatggatcaagactggaaag

SEQ ID NO: 200849 - DNA, 25 bp, SARS Virus
cgtttatggatgcagactggaaagc

SEQ ID NO: 200850 - DNA, 25 bp, SARS Virus
gtttatggatgacgactggaaagcg

SEQ ID NO: 200851 - DNA, 25 bp, SARS Virus
tttatggatgaacactggaaagcgt

SEQ ID NO: 200852 - DNA, 25 bp, SARS Virus
ttatggatgaagcctggaaagcgta

SEQ ID NO: 200853 - DNA, 25 bp, SARS Virus
tatggatgaagactggaaagcgtac

SEQ ID NO: 200854 - DNA, 25 bp, SARS Virus
atggatgaagaccggaaagcgtaca

SEQ ID NO: 200855 - DNA, 25 bp, SARS Virus
tggatgaagactcgaaagcgtacat

SEQ ID NO: 200856 - DNA, 25 bp, SARS Virus
ggatgaagactgcaaagcgtacatg

SEQ ID NO: 200857 - DNA, 25 bp, SARS Virus
gatgaagactggcaagcgtacatgg

SEQ ID NO: 200858 - DNA, 25 bp, SARS Virus
atgaagactggacagcgtacatggt

SEQ ID NO: 200859 - DNA, 25 bp, SARS Virus
tgaagactggaacgcgtacatggta

SEQ ID NO: 200860 - DNA, 25 bp, SARS Virus
gaagactggaaaccgtacatggtac

SEQ ID NO: 200861 - DNA, 25 bp, SARS Virus
aagactggaaagcgtacatggtaca

SEQ ID NO: 200862 - DNA, 25 bp, SARS Virus
agactggaaagcctacatggtacag

SEQ ID NO: 200863 - DNA, 25 bp, SARS Virus
gactggaaagcgcacatggtacaga

SEQ ID NO: 200864 - DNA, 25 bp, SARS Virus
actggaaagcgtccatggtacagat

SEQ ID NO: 200865 - DNA, 25 bp, SARS Virus
ctggaaagcgtacatggtacagatg

SEQ ID NO: 200866 - DNA, 25 bp, SARS Virus
tggaaagcgtacctggtacagatgt

SEQ ID NO: 200867 - DNA, 25 bp, SARS Virus
ggaaagcgtacacggtacagatgtc

SEQ ID NO: 200868 - DNA, 25 bp, SARS Virus
gaaagcgtacatcgtacagatgtca

SEQ ID NO: 200869 - DNA, 25 bp, SARS Virus
aaagcgtacatgctacagatgtcat

SEQ ID NO: 200870 - DNA, 25 bp, SARS Virus
aagcgtacatggcacagatgtcatg

SEQ ID NO: 200871 - DNA, 25 bp, SARS Virus
agcgtacatggtccagatgtcatga

SEQ ID NO: 200872 - DNA, 25 bp, SARS Virus
gcgtacatggtacagatgtcatgag

SEQ ID NO: 200873 - DNA, 25 bp, SARS Virus
cgtacatggtaccgatgtcatgagt

SEQ ID NO: 200874 - DNA, 25 bp, SARS Virus
gtacatggtacacatgtcatgagtc

SEQ ID NO: 200875 - DNA, 25 bp, SARS Virus
tacatggtacagctgtcatgagtcg

SEQ ID NO: 200876 - DNA, 25 bp, SARS Virus
acatggtacagacgtcatgagtcgt

SEQ ID NO: 200877 - DNA, 25 bp, SARS Virus
catggtacagatctcatgagtcgta

SEQ ID NO: 200878 - DNA, 25 bp, SARS Virus
atggtacagatgccatgagtcgtag

SEQ ID NO: 200879 - DNA, 25 bp, SARS Virus
tggtacagatgtcatgagtcgtagt

SEQ ID NO: 200880 - DNA, 25 bp, SARS Virus
ggtacagatgtcctgagtcgtagtt

SEQ ID NO: 200881 - DNA, 25 bp, SARS Virus
gtacagatgtcacgagtcgtagttt

SEQ ID NO: 200882 - DNA, 25 bp, SARS Virus
tacagatgtcatcagtcgtagtttt

SEQ ID NO: 200883 - DNA, 25 bp, SARS Virus
acagatgtcatgcgtcgtagttttc

SEQ ID NO: 200884 - DNA, 25 bp, SARS Virus
cagatgtcatgactcgtagttttca

SEQ ID NO: 200885 - DNA, 25 bp, SARS Virus
agatgtcatgagccgtagttttcaa

SEQ ID NO: 200886 - DNA, 25 bp, SARS Virus
gatgtcatgagtcgtagttttcaac

SEQ ID NO: 200887 - DNA, 25 bp, SARS Virus
atgtcatgagtcctagttttcaaca

SEQ ID NO: 200888 - DNA, 25 bp, SARS Virus
tgtcatgagtcgcagttttcaacaa

SEQ ID NO: 200889 - DNA, 25 bp, SARS Virus
gtcatgagtcgtcgttttcaacaat

SEQ ID NO: 200890 - DNA, 25 bp, SARS Virus
tcatgagtcgtacttttcaacaatg

SEQ ID NO: 200891 - DNA, 25 bp, SARS Virus
catgagtcgtagctttcaacaatga

SEQ ID NO: 200892 - DNA, 25 bp, SARS Virus
atgagtcgtagtcttcaacaatgat

SEQ ID NO: 200893 - DNA, 25 bp, SARS Virus
tgagtcgtagttctcaacaatgatg

SEQ ID NO: 200894 - DNA, 25 bp, SARS Virus
gagtcgtagtttccaacaatgatga

SEQ ID NO: 200895 - DNA, 25 bp, SARS Virus
agtcgtagttttcaacaatgatgag

SEQ ID NO: 200896 - DNA, 25 bp, SARS Virus
gtcgtagttttccacaatgatgaga

SEQ ID NO: 200897 - DNA, 25 bp, SARS Virus
tcgtagttttcaccaatgatgagat

SEQ ID NO: 200898 - DNA, 25 bp, SARS Virus
cgtagttttcaacaatgatgagatt

SEQ ID NO: 200899 - DNA, 25 bp, SARS Virus
gtagttttcaaccatgatgagattg

SEQ ID NO: 200900 - DNA, 25 bp, SARS Virus
tagttttcaacactgatgagattgt

SEQ ID NO: 200901 - DNA, 25 bp, SARS Virus
agttttcaacaacgatgagattgtc

SEQ ID NO: 200902 - DNA, 25 bp, SARS Virus
gttttcaacaatcatgagattgtct

SEQ ID NO: 200903 - DNA, 25 bp, SARS Virus
ttttcaacaatgctgagattgtctt

SEQ ID NO: 200904 - DNA, 25 bp, SARS Virus
tttcaacaatgacgagattgtcttg

SEQ ID NO: 200905 - DNA, 25 bp, SARS Virus
ttcaacaatgatcagattgtcttgg

SEQ ID NO: 200906 - DNA, 25 bp, SARS Virus
tcaacaatgatgcgattgtcttggg

SEQ ID NO: 200907 - DNA, 25 bp, SARS Virus
caacaatgatgacattgtcttggga

SEQ ID NO: 200908 - DNA, 25 bp, SARS Virus
aacaatgatgagcttgtcttgggag

SEQ ID NO: 200909 - DNA, 25 bp, SARS Virus
acaatgatgagactgtcttgggagg

SEQ ID NO: 200910 - DNA, 25 bp, SARS Virus
caatgatgagatcgtcttgggaggt

SEQ ID NO: 200911 - DNA, 25 bp, SARS Virus
aatgatgagattctcttgggaggtc

SEQ ID NO: 200912 - DNA, 25 bp, SARS Virus
atgatgagattgccttgggaggtcc

SEQ ID NO: 200913 - DNA, 25 bp, SARS Virus
tgatgagattgtcttgggaggtcca

SEQ ID NO: 200914 - DNA, 25 bp, SARS Virus
gatgagattgtcctgggaggtccat

SEQ ID NO: 200915 - DNA, 25 bp, SARS Virus
atgagattgtctcgggaggtccatt

SEQ ID NO: 200916 - DNA, 25 bp, SARS Virus
tgagattgtcttcggaggtccattc

SEQ ID NO: 200917 - DNA, 25 bp, SARS Virus
gagattgtcttgcgaggtccattca

SEQ ID NO: 200918 - DNA, 25 bp, SARS Virus
agattgtcttggcaggtccattcac

SEQ ID NO: 200919 - DNA, 25 bp, SARS Virus
gattgtcttgggcggtccattcaca

SEQ ID NO: 200920 - DNA, 25 bp, SARS Virus
attgtcttgggacgtccattcacaa

SEQ ID NO: 200921 - DNA, 25 bp, SARS Virus
ttgtcttgggagctccattcacaat

SEQ ID NO: 200922 - DNA, 25 bp, SARS Virus
tgtcttgggaggcccattcacaatc

SEQ ID NO: 200923 - DNA, 25 bp, SARS Virus
gtcttgggaggtccattcacaatcc

SEQ ID NO: 200924 - DNA, 25 bp, SARS Virus
tcttgggaggtccattcacaatcct

SEQ ID NO: 200925 - DNA, 25 bp, SARS Virus
cttgggaggtcccttcacaatcctt

SEQ ID NO: 200926 - DNA, 25 bp, SARS Virus
ttgggaggtccactcacaatccttt

SEQ ID NO: 200927 - DNA, 25 bp, SARS Virus
tgggaggtccatccacaatcctttg

SEQ ID NO: 200928 - DNA, 25 bp, SARS Virus
gggaggtccattcacaatcctttga

SEQ ID NO: 200929 - DNA, 25 bp, SARS Virus
ggaggtccattcccaatcctttgac

SEQ ID NO: 200930 - DNA, 25 bp, SARS Virus
gaggtccattcacaatcctttgaca

SEQ ID NO: 200931 - DNA, 25 bp, SARS Virus
aggtccattcaccatcctttgacat

SEQ ID NO: 200932 - DNA, 25 bp, SARS Virus
ggtccattcacactcctttgacata

SEQ ID NO: 200933 - DNA, 25 bp, SARS Virus
gtccattcacaaccctttgacatac

SEQ ID NO: 200934 - DNA, 25 bp, SARS Virus
tccattcacaatcctttgacatact

SEQ ID NO: 200935 - DNA, 25 bp, SARS Virus
ccattcacaatcctttgacatacta

SEQ ID NO: 200936 - DNA, 25 bp, SARS Virus
cattcacaatcccttgacatactac

SEQ ID NO: 200937 - DNA, 25 bp, SARS Virus
attcacaatcctctgacatactacc

SEQ ID NO: 200938 - DNA, 25 bp, SARS Virus
ttcacaatccttcgacatactacct

SEQ ID NO: 200939 - DNA, 25 bp, SARS Virus
tcacaatcctttcacatactacctt

SEQ ID NO: 200940 - DNA, 25 bp, SARS Virus
cacaatcctttgccatactaccttg

SEQ ID NO: 200941 - DNA, 25 bp, SARS Virus
acaatcctttgacatactaccttgg

SEQ ID NO: 200942 - DNA, 25 bp, SARS Virus
caatcctttgacctactaccttggt

SEQ ID NO: 200943 - DNA, 25 bp, SARS Virus
aatcctttgacacactaccttggta

SEQ ID NO: 200944 - DNA, 25 bp, SARS Virus
atcctttgacatcctaccttggtag

SEQ ID NO: 200945 - DNA, 25 bp, SARS Virus
tcctttgacatactaccttggtagg

SEQ ID NO: 200946 - DNA, 25 bp, SARS Virus
cctttgacataccaccttggtaggt

SEQ ID NO: 200947 - DNA, 25 bp, SARS Virus
ctttgacatactcccttggtaggta

SEQ ID NO: 200948 - DNA, 25 bp, SARS Virus
tttgacatactaccttggtaggtat

SEQ ID NO: 200949 - DNA, 25 bp, SARS Virus
ttgacatactaccttggtaggtatt

SEQ ID NO: 200950 - DNA, 25 bp, SARS Virus
tgacatactaccctggtaggtattc

SEQ ID NO: 200951 - DNA, 25 bp, SARS Virus
gacatactacctcggtaggtattcg

SEQ ID NO: 200952 - DNA, 25 bp, SARS Virus
acatactaccttcgtaggtattcgt

SEQ ID NO: 200953 - DNA, 25 bp, SARS Virus
catactaccttgctaggtattcgtg

SEQ ID NO: 200954 - DNA, 25 bp, SARS Virus
atactaccttggcaggtattcgtgt

SEQ ID NO: 200955 - DNA, 25 bp, SARS Virus
tactaccttggtcggtattcgtgta

SEQ ID NO: 200956 - DNA, 25 bp, SARS Virus
actaccttggtacgtattcgtgtat

SEQ ID NO: 200957 - DNA, 25 bp, SARS Virus
ctaccttggtagctattcgtgtatt

SEQ ID NO: 200958 - DNA, 25 bp, SARS Virus
taccttggtaggcattcgtgtattg

SEQ ID NO: 200959 - DNA, 25 bp, SARS Virus
accttggtaggtcttcgtgtattgc

SEQ ID NO: 200960 - DNA, 25 bp, SARS Virus
ccttggtaggtactcgtgtattgct

SEQ ID NO: 200961 - DNA, 25 bp, SARS Virus
cttggtaggtatccgtgtattgctc

SEQ ID NO: 200962 - DNA, 25 bp, SARS Virus
ttggtaggtattcgtgtattgctca

SEQ ID NO: 200963 - DNA, 25 bp, SARS Virus
tggtaggtattcctgtattgctcac

SEQ ID NO: 200964 - DNA, 25 bp, SARS Virus
ggtaggtattcgcgtattgctcaca

SEQ ID NO: 200965 - DNA, 25 bp, SARS Virus
gtaggtattcgtctattgctcacag

SEQ ID NO: 200966 - DNA, 25 bp, SARS Virus
taggtattcgtgcattgctcacaga

SEQ ID NO: 200967 - DNA, 25 bp, SARS Virus
aggtattcgtgtcttgctcacagac

SEQ ID NO: 200968 - DNA, 25 bp, SARS Virus
ggtattcgtgtactgctcacagacc

SEQ ID NO: 200969 - DNA, 25 bp, SARS Virus
gtattcgtgtatcgctcacagacct

SEQ ID NO: 200970 - DNA, 25 bp, SARS Virus
tattcgtgtattcctcacagacctg

SEQ ID NO: 200971 - DNA, 25 bp, SARS Virus
attcgtgtattgctcacagacctgc

SEQ ID NO: 200972 - DNA, 25 bp, SARS Virus
ttcgtgtattgcccacagacctgct

SEQ ID NO: 200973 - DNA, 25 bp, SARS Virus
tcgtgtattgctcacagacctgctt

SEQ ID NO: 200974 - DNA, 25 bp, SARS Virus
cgtgtattgctcccagacctgcttc

SEQ ID NO: 200975 - DNA, 25 bp, SARS Virus
gtgtattgctcacagacctgcttcg

SEQ ID NO: 200976 - DNA, 25 bp, SARS Virus
tgtattgctcaccgacctgcttcga

SEQ ID NO: 200977 - DNA, 25 bp, SARS Virus
gtattgctcacacacctgcttcgag

SEQ ID NO: 200978 - DNA, 25 bp, SARS Virus
tattgctcacagccctgcttcgagt

SEQ ID NO: 200979 - DNA, 25 bp, SARS Virus
attgctcacagacctgcttcgagtg

SEQ ID NO: 200980 - DNA, 25 bp, SARS Virus
ttgctcacagacctgcttcgagtga

SEQ ID NO: 200981 - DNA, 25 bp, SARS Virus
tgctcacagacccgcttcgagtgat

SEQ ID NO: 200982 - DNA, 25 bp, SARS Virus
gctcacagacctccttcgagtgata

SEQ ID NO: 200983 - DNA, 25 bp, SARS Virus
ctcacagacctgcttcgagtgatat

SEQ ID NO: 200984 - DNA, 25 bp, SARS Virus
tcacagacctgcctcgagtgatatt

SEQ ID NO: 200985 - DNA, 25 bp, SARS Virus
cacagacctgctccgagtgatattc

SEQ ID NO: 200986 - DNA, 25 bp, SARS Virus
acagacctgcttcgagtgatattct

SEQ ID NO: 200987 - DNA, 25 bp, SARS Virus
cagacctgcttccagtgatattctt

SEQ ID NO: 200988 - DNA, 25 bp, SARS Virus
agacctgcttcgcgtgatattcttt

SEQ ID NO: 200989 - DNA, 25 bp, SARS Virus
gacctgcttcgactgatattcttta

SEQ ID NO: 200990 - DNA, 25 bp, SARS Virus
acctgcttcgagcgatattctttat

SEQ ID NO: 200991 - DNA, 25 bp, SARS Virus
cctgcttcgagtcatattctttatc

SEQ ID NO: 200992 - DNA, 25 bp, SARS Virus
ctgcttcgagtgctattctttatct

SEQ ID NO: 200993 - DNA, 25 bp, SARS Virus
tgcttcgagtgacattctttatctt

SEQ ID NO: 200994 - DNA, 25 bp, SARS Virus
gcttcgagtgatcttctttatcttg

SEQ ID NO: 200995 - DNA, 25 bp, SARS Virus
cttcgagtgatactctttatcttgg

SEQ ID NO: 200996 - DNA, 25 bp, SARS Virus
ttcgagtgatatcctttatcttggg

SEQ ID NO: 200997 - DNA, 25 bp, SARS Virus
tcgagtgatattctttatcttggga

SEQ ID NO: 200998 - DNA, 25 bp, SARS Virus
cgagtgatattccttatcttgggag

SEQ ID NO: 200999 - DNA, 25 bp, SARS Virus
gagtgatattctctatcttgggaga

SEQ ID NO: 201000 - DNA, 25 bp, SARS Virus
agtgatattcttcatcttgggagat

SEQ ID NO: 201001 - DNA, 25 bp, SARS Virus
gtgatattctttctcttgggagatc

SEQ ID NO: 201002 - DNA, 25 bp, SARS Virus
tgatattctttaccttgggagatcg

SEQ ID NO: 201003 - DNA, 25 bp, SARS Virus
gatattctttatcttgggagatcgt

SEQ ID NO: 201004 - DNA, 25 bp, SARS Virus
atattctttatcctgggagatcgtt

SEQ ID NO: 201005 - DNA, 25 bp, SARS Virus
tattctttatctcgggagatcgttt

SEQ ID NO: 201006 - DNA, 25 bp, SARS Virus
attctttatcttcggagatcgttta

SEQ ID NO: 201007 - DNA, 25 bp, SARS Virus
ttctttatcttgcgagatcgtttaa

SEQ ID NO: 201008 - DNA, 25 bp, SARS Virus
tctttatcttggcagatcgtttaat

SEQ ID NO: 201009 - DNA, 25 bp, SARS Virus
ctttatcttgggcgatcgtttaatc

SEQ ID NO: 201010 - DNA, 25 bp, SARS Virus
tttatcttgggacatcgtttaatca

SEQ ID NO: 201011 - DNA, 25 bp, SARS Virus
ttatcttgggagctcgtttaatcac

SEQ ID NO: 201012 - DNA, 25 bp, SARS Virus
tatcttgggagaccgtttaatcaca

SEQ ID NO: 201013 - DNA, 25 bp, SARS Virus
atcttgggagatcgtttaatcacag

SEQ ID NO: 201014 - DNA, 25 bp, SARS Virus
tcttgggagatcctttaatcacagt

SEQ ID NO: 201015 - DNA, 25 bp, SARS Virus
cttgggagatcgcttaatcacagta

SEQ ID NO: 201016 - DNA, 25 bp, SARS Virus
ttgggagatcgtctaatcacagtat

SEQ ID NO: 201017 - DNA, 25 bp, SARS Virus
tgggagatcgttcaatcacagtatt

SEQ ID NO: 201018 - DNA, 25 bp, SARS Virus
gggagatcgtttcatcacagtattg

SEQ ID NO: 201019 - DNA, 25 bp, SARS Virus
ggagatcgtttactcacagtattgt

SEQ ID NO: 201020 - DNA, 25 bp, SARS Virus
gagatcgtttaaccacagtattgtt

SEQ ID NO: 201021 - DNA, 25 bp, SARS Virus
agatcgtttaatcacagtattgtta

SEQ ID NO: 201022 - DNA, 25 bp, SARS Virus
gatcgtttaatcccagtattgttat

SEQ ID NO: 201023 - DNA, 25 bp, SARS Virus
atcgtttaatcacagtattgttata

SEQ ID NO: 201024 - DNA, 25 bp, SARS Virus
tcgtttaatcaccgtattgttatac

SEQ ID NO: 201025 - DNA, 25 bp, SARS Virus
cgtttaatcacactattgttatacc

SEQ ID NO: 201026 - DNA, 25 bp, SARS Virus
gtttaatcacagcattgttataccg

SEQ ID NO: 201027 - DNA, 25 bp, SARS Virus
tttaatcacagtcttgttataccgt

SEQ ID NO: 201028 - DNA, 25 bp, SARS Virus
ttaatcacagtactgttataccgtg

SEQ ID NO: 201029 - DNA, 25 bp, SARS Virus
taatcacagtatcgttataccgtgt

SEQ ID NO: 201030 - DNA, 25 bp, SARS Virus
aatcacagtattcttataccgtgtc

SEQ ID NO: 201031 - DNA, 25 bp, SARS Virus
atcacagtattgctataccgtgtcc

SEQ ID NO: 201032 - DNA, 25 bp, SARS Virus
tcacagtattgtcataccgtgtcca

SEQ ID NO: 201033 - DNA, 25 bp, SARS Virus
cacagtattgttctaccgtgtccaa

SEQ ID NO: 201034 - DNA, 25 bp, SARS Virus
acagtattgttacaccgtgtccaaa

SEQ ID NO: 201035 - DNA, 25 bp, SARS Virus
cagtattgttatcccgtgtccaaac

SEQ ID NO: 201036 - DNA, 25 bp, SARS Virus
agtattgttataccgtgtccaaacg

SEQ ID NO: 201037 - DNA, 25 bp, SARS Virus
gtattgttataccgtgtccaaacgg

SEQ ID NO: 201038 - DNA, 25 bp, SARS Virus
tattgttataccctgtccaaacggg

SEQ ID NO: 201039 - DNA, 25 bp, SARS Virus
attgttataccgcgtccaaacgggt

SEQ ID NO: 201040 - DNA, 25 bp, SARS Virus
ttgttataccgtctccaaacgggta

SEQ ID NO: 201041 - DNA, 25 bp, SARS Virus
tgttataccgtgcccaaacgggtat

SEQ ID NO: 201042 - DNA, 25 bp, SARS Virus
gttataccgtgtccaaacgggtatc

SEQ ID NO: 201043 - DNA, 25 bp, SARS Virus
ttataccgtgtccaaacgggtatcg

SEQ ID NO: 201044 - DNA, 25 bp, SARS Virus
tataccgtgtcccaacgggtatcgt

SEQ ID NO: 201045 - DNA, 25 bp, SARS Virus
ataccgtgtccacacgggtatcgta

SEQ ID NO: 201046 - DNA, 25 bp, SARS Virus
taccgtgtccaaccgggtatcgtag

SEQ ID NO: 201047 - DNA, 25 bp, SARS Virus
accgtgtccaaacgggtatcgtagg

SEQ ID NO: 201048 - DNA, 25 bp, SARS Virus
ccgtgtccaaaccggtatcgtagga

SEQ ID NO: 201049 - DNA, 25 bp, SARS Virus
cgtgtccaaacgcgtatcgtaggaa

SEQ ID NO: 201050 - DNA, 25 bp, SARS Virus
gtgtccaaacggctatcgtaggaat

SEQ ID NO: 201051 - DNA, 25 bp, SARS Virus
tgtccaaacgggcatcgtaggaatt

SEQ ID NO: 201052 - DNA, 25 bp, SARS Virus
gtccaaacgggtctcgtaggaattt

SEQ ID NO: 201053 - DNA, 25 bp, SARS Virus
tccaaacgggtaccgtaggaatttt

SEQ ID NO: 201054 - DNA, 25 bp, SARS Virus
ccaaacgggtatcgtaggaattttt

SEQ ID NO: 201055 - DNA, 25 bp, SARS Virus
caaacgggtatcctaggaattttta

SEQ ID NO: 201056 - DNA, 25 bp, SARS Virus
aaacgggtatcgcaggaatttttaa

SEQ ID NO: 201057 - DNA, 25 bp, SARS Virus
aacgggtatcgtcggaatttttaac

SEQ ID NO: 201058 - DNA, 25 bp, SARS Virus
acgggtatcgtacgaatttttaaca

SEQ ID NO: 201059 - DNA, 25 bp, SARS Virus
cgggtatcgtagcaatttttaacat

SEQ ID NO: 201060 - DNA, 25 bp, SARS Virus
gggtatcgtaggcatttttaacatg

SEQ ID NO: 201061 - DNA, 25 bp, SARS Virus
ggtatcgtaggactttttaacatgt

SEQ ID NO: 201062 - DNA, 25 bp, SARS Virus
gtatcgtaggaacttttaacatgtg

SEQ ID NO: 201063 - DNA, 25 bp, SARS Virus
tatcgtaggaatctttaacatgtga

SEQ ID NO: 201064 - DNA, 25 bp, SARS Virus
atcgtaggaattcttaacatgtgag

SEQ ID NO: 201065 - DNA, 25 bp, SARS Virus
tcgtaggaatttctaacatgtgagt

SEQ ID NO: 201066 - DNA, 25 bp, SARS Virus
cgtaggaattttcaacatgtgagtc

SEQ ID NO: 201067 - DNA, 25 bp, SARS Virus
gtaggaatttttcacatgtgagtcg

SEQ ID NO: 201068 - DNA, 25 bp, SARS Virus
taggaatttttaccatgtgagtcgt

SEQ ID NO: 201069 - DNA, 25 bp, SARS Virus
aggaatttttaacatgtgagtcgtc

SEQ ID NO: 201070 - DNA, 25 bp, SARS Virus
ggaatttttaacctgtgagtcgtcg

SEQ ID NO: 201071 - DNA, 25 bp, SARS Virus
gaatttttaacacgtgagtcgtcgt

SEQ ID NO: 201072 - DNA, 25 bp, SARS Virus
aatttttaacatctgagtcgtcgtt

SEQ ID NO: 201073 - DNA, 25 bp, SARS Virus
atttttaacatgcgagtcgtcgttc

SEQ ID NO: 201074 - DNA, 25 bp, SARS Virus
tttttaacatgtcagtcgtcgttct

SEQ ID NO: 201075 - DNA, 25 bp, SARS Virus
ttttaacatgtgcgtcgtcgttctt

SEQ ID NO: 201076 - DNA, 25 bp, SARS Virus
tttaacatgtgactcgtcgttcttg

SEQ ID NO: 201077 - DNA, 25 bp, SARS Virus
ttaacatgtgagccgtcgttcttgc

SEQ ID NO: 201078 - DNA, 25 bp, SARS Virus
taacatgtgagtcgtcgttcttgcg

SEQ ID NO: 201079 - DNA, 25 bp, SARS Virus
aacatgtgagtcctcgttcttgcgt

SEQ ID NO: 201080 - DNA, 25 bp, SARS Virus
acatgtgagtcgccgttcttgcgtt

SEQ ID NO: 201081 - DNA, 25 bp, SARS Virus
catgtgagtcgtcgttcttgcgttc

SEQ ID NO: 201082 - DNA, 25 bp, SARS Virus
atgtgagtcgtccttcttgcgttcg

SEQ ID NO: 201083 - DNA, 25 bp, SARS Virus
tgtgagtcgtcgctcttgcgttcgt

SEQ ID NO: 201084 - DNA, 25 bp, SARS Virus
gtgagtcgtcgtccttgcgttcgtc

SEQ ID NO: 201085 - DNA, 25 bp, SARS Virus
tgagtcgtcgttcttgcgttcgtct

SEQ ID NO: 201086 - DNA, 25 bp, SARS Virus
gagtcgtcgttcctgcgttcgtctc

SEQ ID NO: 201087 - DNA, 25 bp, SARS Virus
agtcgtcgttctcgcgttcgtctcc

SEQ ID NO: 201088 - DNA, 25 bp, SARS Virus
gtcgtcgttcttccgttcgtctcca

SEQ ID NO: 201089 - DNA, 25 bp, SARS Virus
cgtcgttgttgtgccaacatgagtg

SEQ ID NO: 201090 - DNA, 25 bp, SARS Virus
gtcgttgttgtagcaacatgagtgg

SEQ ID NO: 201091 - DNA, 25 bp, SARS Virus
tcgttgttgtacgaacatgagtggt

SEQ ID NO: 201092 - DNA, 25 bp, SARS Virus
cgttgttgtaccgacatgagtggtt

SEQ ID NO: 201093 - DNA, 25 bp, SARS Virus
gttgttgtaccagcatgagtggttt

SEQ ID NO: 201094 - DNA, 25 bp, SARS Virus
ttgttgtaccaagatgagtggtttt

SEQ ID NO: 201095 - DNA, 25 bp, SARS Virus
tgttgtaccaacgtgagtggttttt

SEQ ID NO: 201096 - DNA, 25 bp, SARS Virus
gttgtaccaacaggagtggtttttg

SEQ ID NO: 201097 - DNA, 25 bp, SARS Virus
ttgtaccaacatgagtggtttttgt

SEQ ID NO: 201098 - DNA, 25 bp, SARS Virus
tgtaccaacatgggtggtttttgtg

SEQ ID NO: 201099 - DNA, 25 bp, SARS Virus
gtaccaacatgagtggtttttgtgc

SEQ ID NO: 201100 - DNA, 25 bp, SARS Virus
taccaacatgaggggtttttgtgca

SEQ ID NO: 201101 - DNA, 25 bp, SARS Virus
accaacatgagtggtttttgtgcag

SEQ ID NO: 201102 - DNA, 25 bp, SARS Virus
ccaacatgagtggtttttgtgcaga

SEQ ID NO: 201103 - DNA, 25 bp, SARS Virus
caacatgagtgggttttgtgcagac

SEQ ID NO: 201104 - DNA, 25 bp, SARS Virus
aacatgagtggtgtttgtgcagact

SEQ ID NO: 201105 - DNA, 25 bp, SARS Virus
acatgagtggttgttgtgcagactt

SEQ ID NO: 201106 - DNA, 25 bp, SARS Virus
catgagtggtttgtgtgcagactta

SEQ ID NO: 201107 - DNA, 25 bp, SARS Virus
atgagtggttttggtgcagacttaa

SEQ ID NO: 201108 - DNA, 25 bp, SARS Virus
tgagtggtttttgtgcagacttaaa

SEQ ID NO: 201109 - DNA, 25 bp, SARS Virus
gagtggtttttgggcagacttaaag

SEQ ID NO: 201110 - DNA, 25 bp, SARS Virus
agtggtttttgtgcagacttaaagt

SEQ ID NO: 201111 - DNA, 25 bp, SARS Virus
gtggtttttgtggagacttaaagta

SEQ ID NO: 201112 - DNA, 25 bp, SARS Virus
tggtttttgtgcggacttaaagtat

SEQ ID NO: 201113 - DNA, 25 bp, SARS Virus
ggtttttgtgcagacttaaagtatt

SEQ ID NO: 201114 - DNA, 25 bp, SARS Virus
gtttttgtgcaggcttaaagtattt

SEQ ID NO: 201115 - DNA, 25 bp, SARS Virus
tttttgtgcagagttaaagtatttc

SEQ ID NO: 201116 - DNA, 25 bp, SARS Virus
ttttgtgcagacgtaaagtatttca

SEQ ID NO: 201117 - DNA, 25 bp, SARS Virus
tttgtgcagactgaaagtatttcat

SEQ ID NO: 201118 - DNA, 25 bp, SARS Virus
ttgtgcagacttgaagtatttcatc

SEQ ID NO: 201119 - DNA, 25 bp, SARS Virus
tgtgcagacttagagtatttcatca

SEQ ID NO: 201120 - DNA, 25 bp, SARS Virus
gtgcagacttaaggtatttcatcat

SEQ ID NO: 201121 - DNA, 25 bp, SARS Virus
tgcagacttaaagtatttcatcatc

SEQ ID NO: 201122 - DNA, 25 bp, SARS Virus
gcagacttaaaggatttcatcatcc

SEQ ID NO: 201123 - DNA, 25 bp, SARS Virus
cagacttaaagtgtttcatcatccg

SEQ ID NO: 201124 - DNA, 25 bp, SARS Virus
agacttaaagtagttcatcatccgt

SEQ ID NO: 201125 - DNA, 25 bp, SARS Virus
gacttaaagtatgtcatcatccgtc

SEQ ID NO: 201126 - DNA, 25 bp, SARS Virus
acttaaagtattgcatcatccgtcg

SEQ ID NO: 201127 - DNA, 25 bp, SARS Virus
cttaaagtatttgatcatccgtcgt

SEQ ID NO: 201128 - DNA, 25 bp, SARS Virus
ttaaagtatttcgtcatccgtcgtg

SEQ ID NO: 201129 - DNA, 25 bp, SARS Virus
taaagtatttcagcatccgtcgtgt

SEQ ID NO: 201130 - DNA, 25 bp, SARS Virus
aaagtatttcatgatccgtcgtgtt

SEQ ID NO: 201131 - DNA, 25 bp, SARS Virus
aagtatttcatcgtccgtcgtgttc

SEQ ID NO: 201132 - DNA, 25 bp, SARS Virus
agtatttcatcagccgtcgtgttca

SEQ ID NO: 201133 - DNA, 25 bp, SARS Virus
gtatttcatcatgcgtcgtgttcag

SEQ ID NO: 201134 - DNA, 25 bp, SARS Virus
tatttcatcatcggtcgtgttcagt

SEQ ID NO: 201135 - DNA, 25 bp, SARS Virus
atttcatcatccgtcgtgttcagtg

SEQ ID NO: 201136 - DNA, 25 bp, SARS Virus
tttcatcatccggcgtgttcagtgg

SEQ ID NO: 201137 - DNA, 25 bp, SARS Virus
ttcatcatccgtggtgttcagtggt

SEQ ID NO: 201138 - DNA, 25 bp, SARS Virus
tcatcatccgtcgtgttcagtggtt

SEQ ID NO: 201139 - DNA, 25 bp, SARS Virus
catcatccgtcgggttcagtggtta

SEQ ID NO: 201140 - DNA, 25 bp, SARS Virus
atcatccgtcgtgttcagtggttat

SEQ ID NO: 201141 - DNA, 25 bp, SARS Virus
tcatccgtcgtggtcagtggttata

SEQ ID NO: 201142 - DNA, 25 bp, SARS Virus
catccgtcgtgtgcagtggttatac

SEQ ID NO: 201143 - DNA, 25 bp, SARS Virus
atccgtcgtgttgagtggttatacc

SEQ ID NO: 201144 - DNA, 25 bp, SARS Virus
tccgtcgtgttcggtggttataccg

SEQ ID NO: 201145 - DNA, 25 bp, SARS Virus
ccgtcgtgttcagtggttataccgt

SEQ ID NO: 201146 - DNA, 25 bp, SARS Virus
cgtcgtgttcaggggttataccgtt

SEQ ID NO: 201147 - DNA, 25 bp, SARS Virus
gtcgtgttcagtggttataccgtta

SEQ ID NO: 201148 - DNA, 25 bp, SARS Virus
tcgtgttcagtggttataccgttat

SEQ ID NO: 201149 - DNA, 25 bp, SARS Virus
cgtgttcagtgggtataccgttatt

SEQ ID NO: 201150 - DNA, 25 bp, SARS Virus
gtgttcagtggtgataccgttatta

SEQ ID NO: 201151 - DNA, 25 bp, SARS Virus
tgttcagtggttgtaccgttattat

SEQ ID NO: 201152 - DNA, 25 bp, SARS Virus
gttcagtggttagaccgttattatg

SEQ ID NO: 201153 - DNA, 25 bp, SARS Virus
ttcagtggttatgccgttattatgg

SEQ ID NO: 201154 - DNA, 25 bp, SARS Virus
tcagtggttatagcgttattatggt

SEQ ID NO: 201155 - DNA, 25 bp, SARS Virus
cagtggttatacggttattatggtg

SEQ ID NO: 201156 - DNA, 25 bp, SARS Virus
agtggttataccgttattatggtgg

SEQ ID NO: 201157 - DNA, 25 bp, SARS Virus
gtggttataccggtattatggtggt

SEQ ID NO: 201158 - DNA, 25 bp, SARS Virus
tggttataccgtgattatggtggtc

SEQ ID NO: 201159 - DNA, 25 bp, SARS Virus
ggttataccgttgttatggtggtcg

SEQ ID NO: 201160 - DNA, 25 bp, SARS Virus
gttataccgttagtatggtggtcgg

SEQ ID NO: 201161 - DNA, 25 bp, SARS Virus
ttataccgttatgatggtggtcggt

SEQ ID NO: 201162 - DNA, 25 bp, SARS Virus
tataccgttattgtggtggtcggtg

SEQ ID NO: 201163 - DNA, 25 bp, SARS Virus
ataccgttattagggtggtcggtga

SEQ ID NO: 201164 - DNA, 25 bp, SARS Virus
taccgttattatggtggtcggtgat

SEQ ID NO: 201165 - DNA, 25 bp, SARS Virus
accgttattatggtggtcggtgatg

SEQ ID NO: 201166 - DNA, 25 bp, SARS Virus
ccgttattatgggggtcggtgatga

SEQ ID NO: 201167 - DNA, 25 bp, SARS Virus
cgttattatggtggtcggtgatgac

SEQ ID NO: 201168 - DNA, 25 bp, SARS Virus
gttattatggtggtcggtgatgact

SEQ ID NO: 201169 - DNA, 25 bp, SARS Virus
ttattatggtgggcggtgatgactt

SEQ ID NO: 201170 - DNA, 25 bp, SARS Virus
tattatggtggtgggtgatgacttc

SEQ ID NO: 201171 - DNA, 25 bp, SARS Virus
attatggtggtcggtgatgacttcg

SEQ ID NO: 201172 - DNA, 25 bp, SARS Virus
ttatggtggtcggtgatgacttcgt

SEQ ID NO: 201173 - DNA, 25 bp, SARS Virus
tatggtggtcggggatgacttcgtc

SEQ ID NO: 201174 - DNA, 25 bp, SARS Virus
atggtggtcggtgatgacttcgtct

SEQ ID NO: 201175 - DNA, 25 bp, SARS Virus
tggtggtcggtggtgacttcgtctg

SEQ ID NO: 201176 - DNA, 25 bp, SARS Virus
ggtggtcggtgaggacttcgtctgt

SEQ ID NO: 201177 - DNA, 25 bp, SARS Virus
gtggtcggtgatgacttcgtctgtg

SEQ ID NO: 201178 - DNA, 25 bp, SARS Virus
tggtcggtgatggcttcgtctgtgt

SEQ ID NO: 201179 - DNA, 25 bp, SARS Virus
ggtcggtgatgagttcgtctgtgta

SEQ ID NO: 201180 - DNA, 25 bp, SARS Virus
gtcggtgatgacgtcgtctgtgtag

SEQ ID NO: 201181 - DNA, 25 bp, SARS Virus
tcggtgatgactgcgtctgtgtaga

SEQ ID NO: 201182 - DNA, 25 bp, SARS Virus
cggtgatgacttggtctgtgtagat

SEQ ID NO: 201183 - DNA, 25 bp, SARS Virus
ggtgatgacttcgtctgtgtagatt

SEQ ID NO: 201184 - DNA, 25 bp, SARS Virus
gtgatgacttcggctgtgtagattt

SEQ ID NO: 201185 - DNA, 25 bp, SARS Virus
tgatgacttcgtgtgtgtagatttc

SEQ ID NO: 201186 - DNA, 25 bp, SARS Virus
gatgacttcgtcggtgtagatttcg

SEQ ID NO: 201187 - DNA, 25 bp, SARS Virus
atgacttcgtctgtgtagatttcgt

SEQ ID NO: 201188 - DNA, 25 bp, SARS Virus
tgacttcgtctgggtagatttcgtg

SEQ ID NO: 201189 - DNA, 25 bp, SARS Virus
gacttcgtctgtgtagatttcgtgg

SEQ ID NO: 201190 - DNA, 25 bp, SARS Virus
acttcgtctgtggagatttcgtggg

SEQ ID NO: 201191 - DNA, 25 bp, SARS Virus
cttcgtctgtgtggatttcgtgggt

SEQ ID NO: 201192 - DNA, 25 bp, SARS Virus
ttcgtctgtgtagatttcgtgggtg

SEQ ID NO: 201193 - DNA, 25 bp, SARS Virus
tcgtctgtgtaggtttcgtgggtgt

SEQ ID NO: 201194 - DNA, 25 bp, SARS Virus
cgtctgtgtagagttcgtgggtgtc

SEQ ID NO: 201195 - DNA, 25 bp, SARS Virus
gtctgtgtagatgtcgtgggtgtcc

SEQ ID NO: 201196 - DNA, 25 bp, SARS Virus
tctgtgtagattgcgtgggtgtcca

SEQ ID NO: 201197 - DNA, 25 bp, SARS Virus
ctgtgtagatttggtgggtgtccaa

SEQ ID NO: 201198 - DNA, 25 bp, SARS Virus
tgtgtagatttcgtgggtgtccaac

SEQ ID NO: 201199 - DNA, 25 bp, SARS Virus
gtgtagatttcgggggtgtccaacg

SEQ ID NO: 201200 - DNA, 25 bp, SARS Virus
tgtagatttcgtgggtgtccaacgt

SEQ ID NO: 201201 - DNA, 25 bp, SARS Virus
gtagatttcgtgggtgtccaacgtg

SEQ ID NO: 201202 - DNA, 25 bp, SARS Virus
tagatttcgtgggtgtccaacgtgt

SEQ ID NO: 201203 - DNA, 25 bp, SARS Virus
agatttcgtgggggtccaacgtgtt

SEQ ID NO: 201204 - DNA, 25 bp, SARS Virus
gatttcgtgggtgtccaacgtgttc

SEQ ID NO: 201205 - DNA, 25 bp, SARS Virus
atttcgtgggtggccaacgtgttct

SEQ ID NO: 201206 - DNA, 25 bp, SARS Virus
tttcgtgggtgtgcaacgtgttctc

SEQ ID NO: 201207 - DNA, 25 bp, SARS Virus
ttcgtgggtgtcgaacgtgttctcc

SEQ ID NO: 201208 - DNA, 25 bp, SARS Virus
tcgtgggtgtccgacgtgttctcct

SEQ ID NO: 201209 - DNA, 25 bp, SARS Virus
cgtgggtgtccagcgtgttctcctc

SEQ ID NO: 201210 - DNA, 25 bp, SARS Virus
gtgggtgtccaaggtgttctcctca

SEQ ID NO: 201211 - DNA, 25 bp, SARS Virus
tgggtgtccaacgtgttctcctcat

SEQ ID NO: 201212 - DNA, 25 bp, SARS Virus
gggtgtccaacgggttctcctcatt

SEQ ID NO: 201213 - DNA, 25 bp, SARS Virus
ggtgtccaacgtgttctcctcattt

SEQ ID NO: 201214 - DNA, 25 bp, SARS Virus
gtgtccaacgtggtctcctcatttc

SEQ ID NO: 201215 - DNA, 25 bp, SARS Virus
tgtccaacgtgtgctcctcatttct

SEQ ID NO: 201216 - DNA, 25 bp, SARS Virus
gtccaacgtgttgtcctcatttcta

SEQ ID NO: 201217 - DNA, 25 bp, SARS Virus
tccaacgtgttcgcctcatttctac

SEQ ID NO: 201218 - DNA, 25 bp, SARS Virus
ccaacgtgttctgctcatttctaca

SEQ ID NO: 201219 - DNA, 25 bp, SARS Virus
caacgtgttctcgtcatttctacaa

SEQ ID NO: 201220 - DNA, 25 bp, SARS Virus
aacgtgttctccgcatttctacaat

SEQ ID NO: 201221 - DNA, 25 bp, SARS Virus
acgtgttctcctgatttctacaatc

SEQ ID NO: 201222 - DNA, 25 bp, SARS Virus
cgtgttctcctcgtttctacaatcg

SEQ ID NO: 201223 - DNA, 25 bp, SARS Virus
gtgttctcctcagttctacaatcga

SEQ ID NO: 201224 - DNA, 25 bp, SARS Virus
tgttctcctcatgtctacaatcgat

SEQ ID NO: 201225 - DNA, 25 bp, SARS Virus
gttctcctcattgctacaatcgata

SEQ ID NO: 201226 - DNA, 25 bp, SARS Virus
ttctcctcatttgtacaatcgatac

SEQ ID NO: 201227 - DNA, 25 bp, SARS Virus
tctcctcatttcgacaatcgatact

SEQ ID NO: 201228 - DNA, 25 bp, SARS Virus
ctcctcatttctgcaatcgatactc

SEQ ID NO: 201229 - DNA, 25 bp, SARS Virus
tcctcatttctagaatcgatactct

SEQ ID NO: 201230 - DNA, 25 bp, SARS Virus
cctcatttctacgatcgatactcta

SEQ ID NO: 201231 - DNA, 25 bp, SARS Virus
ctcatttctacagtcgatactctaa

SEQ ID NO: 201232 - DNA, 25 bp, SARS Virus
tcatttctacaagcgatactctaag

SEQ ID NO: 201233 - DNA, 25 bp, SARS Virus
catttctacaatggatactctaagt

SEQ ID NO: 201234 - DNA, 25 bp, SARS Virus
atttctacaatcgatactctaagta

SEQ ID NO: 201235 - DNA, 25 bp, SARS Virus
tttctacaatcggtactctaagtag

SEQ ID NO: 201236 - DNA, 25 bp, SARS Virus
ttctacaatcgagactctaagtagc

SEQ ID NO: 201237 - DNA, 25 bp, SARS Virus
tctacaatcgatgctctaagtagcg

SEQ ID NO: 201238 - DNA, 25 bp, SARS Virus
ctacaatcgatagtctaagtagcgt

SEQ ID NO: 201239 - DNA, 25 bp, SARS Virus
tacaatcgatacgctaagtagcgta

SEQ ID NO: 201240 - DNA, 25 bp, SARS Virus
acaatcgatactgtaagtagcgtag

SEQ ID NO: 201241 - DNA, 25 bp, SARS Virus
caatcgatactcgaagtagcgtagt

SEQ ID NO: 201242 - DNA, 25 bp, SARS Virus
aatcgatactctgagtagcgtagtt

SEQ ID NO: 201243 - DNA, 25 bp, SARS Virus
atcgatactctaggtagcgtagttg

SEQ ID NO: 201244 - DNA, 25 bp, SARS Virus
tcgatactctaagtagcgtagttgt

SEQ ID NO: 201245 - DNA, 25 bp, SARS Virus
cgatactctaaggagcgtagttgtg

SEQ ID NO: 201246 - DNA, 25 bp, SARS Virus
gatactctaagtggcgtagttgtgg

SEQ ID NO: 201247 - DNA, 25 bp, SARS Virus
atactctaagtagcgtagttgtggt

SEQ ID NO: 201248 - DNA, 25 bp, SARS Virus
tactctaagtagggtagttgtggtg

SEQ ID NO: 201249 - DNA, 25 bp, SARS Virus
actctaagtagcgtagttgtggtgt

SEQ ID NO: 201250 - DNA, 25 bp, SARS Virus
ctctaagtagcggagttgtggtgtc

SEQ ID NO: 201251 - DNA, 25 bp, SARS Virus
tctaagtagcgtggttgtggtgtct

SEQ ID NO: 201252 - DNA, 25 bp, SARS Virus
ctaagtagcgtagttgtggtgtctt

SEQ ID NO: 201253 - DNA, 25 bp, SARS Virus
taagtagcgtaggtgtggtgtcttt

SEQ ID NO: 201254 - DNA, 25 bp, SARS Virus
aagtagcgtagtggtggtgtctttt

SEQ ID NO: 201255 - DNA, 25 bp, SARS Virus
agtagcgtagttgtggtgtcttttg

SEQ ID NO: 201256 - DNA, 25 bp, SARS Virus
gtagcgtagttggggtgtcttttga

SEQ ID NO: 201257 - DNA, 25 bp, SARS Virus
tagcgtagttgtggtgtcttttgag

SEQ ID NO: 201258 - DNA, 25 bp, SARS Virus
agcgtagttgtggtgtcttttgagg

SEQ ID NO: 201259 - DNA, 25 bp, SARS Virus
gcgtagttgtggggtcttttgagga

SEQ ID NO: 201260 - DNA, 25 bp, SARS Virus
cgtagttgtggtgtcttttgaggac

SEQ ID NO: 201261 - DNA, 25 bp, SARS Virus
gtagttgtggtggcttttgaggact

SEQ ID NO: 201262 - DNA, 25 bp, SARS Virus
tagttgtggtgtgttttgaggacta

SEQ ID NO: 201263 - DNA, 25 bp, SARS Virus
agttgtggtgtcgtttgaggactat

SEQ ID NO: 201264 - DNA, 25 bp, SARS Virus
gttgtggtgtctgttgaggactatc

SEQ ID NO: 201265 - DNA, 25 bp, SARS Virus
ttgtggtgtcttgtgaggactatct

SEQ ID NO: 201266 - DNA, 25 bp, SARS Virus
tgtggtgtctttggaggactatctc

SEQ ID NO: 201267 - DNA, 25 bp, SARS Virus
gtggtgtcttttgaggactatctcg

SEQ ID NO: 201268 - DNA, 25 bp, SARS Virus
tggtgtcttttggggactatctcga

SEQ ID NO: 201269 - DNA, 25 bp, SARS Virus
ggtgtcttttgaggactatctcgag

SEQ ID NO: 201270 - DNA, 25 bp, SARS Virus
gtgtcttttgaggactatctcgaga

SEQ ID NO: 201271 - DNA, 25 bp, SARS Virus
tgtcttttgagggctatctcgagac

SEQ ID NO: 201272 - DNA, 25 bp, SARS Virus
gtcttttgaggagtatctcgagaca

SEQ ID NO: 201273 - DNA, 25 bp, SARS Virus
tcttttgaggacgatctcgagacat

SEQ ID NO: 201274 - DNA, 25 bp, SARS Virus
cttttgaggactgtctcgagacatt

SEQ ID NO: 201275 - DNA, 25 bp, SARS Virus
ttttgaggactagctcgagacatta

SEQ ID NO: 201276 - DNA, 25 bp, SARS Virus
tttgaggactatgtcgagacattac

SEQ ID NO: 201277 - DNA, 25 bp, SARS Virus
ttgaggactatcgcgagacattacg

SEQ ID NO: 201278 - DNA, 25 bp, SARS Virus
tgaggactatctggagacattacga

SEQ ID NO: 201279 - DNA, 25 bp, SARS Virus
gaggactatctcgagacattacgag

SEQ ID NO: 201280 - DNA, 25 bp, SARS Virus
aggactatctcgggacattacgagt

SEQ ID NO: 201281 - DNA, 25 bp, SARS Virus
ggactatctcgagacattacgagta

SEQ ID NO: 201282 - DNA, 25 bp, SARS Virus
gactatctcgaggcattacgagtaa

SEQ ID NO: 201283 - DNA, 25 bp, SARS Virus
actatctcgagagattacgagtaat

SEQ ID NO: 201284 - DNA, 25 bp, SARS Virus
ctatctcgagacgttacgagtaata

SEQ ID NO: 201285 - DNA, 25 bp, SARS Virus
tatctcgagacagtacgagtaataa

SEQ ID NO: 201286 - DNA, 25 bp, SARS Virus
atctcgagacatgacgagtaataat

SEQ ID NO: 201287 - DNA, 25 bp, SARS Virus
tctcgagacattgcgagtaataatt

SEQ ID NO: 201288 - DNA, 25 bp, SARS Virus
ctcgagacattaggagtaataattc

SEQ ID NO: 201289 - DNA, 25 bp, SARS Virus
tcgagacattacgagtaataattct

SEQ ID NO: 201290 - DNA, 25 bp, SARS Virus
cgagacattacgggtaataattctt

SEQ ID NO: 201291 - DNA, 25 bp, SARS Virus
gagacattacgagtaataattcttg

SEQ ID NO: 201292 - DNA, 25 bp, SARS Virus
agacattacgaggaataattcttgg

SEQ ID NO: 201293 - DNA, 25 bp, SARS Virus
gacattacgagtgataattcttggg

SEQ ID NO: 201294 - DNA, 25 bp, SARS Virus
acattacgagtagtaattcttgggt

SEQ ID NO: 201295 - DNA, 25 bp, SARS Virus
cattacgagtaagaattcttgggta

SEQ ID NO: 201296 - DNA, 25 bp, SARS Virus
attacgagtaatgattcttgggtag

SEQ ID NO: 201297 - DNA, 25 bp, SARS Virus
ttacgagtaatagttcttgggtaga

SEQ ID NO: 201298 - DNA, 25 bp, SARS Virus
tacgagtaataagtcttgggtagat

SEQ ID NO: 201299 - DNA, 25 bp, SARS Virus
acgagtaataatgcttgggtagatg

SEQ ID NO: 201300 - DNA, 25 bp, SARS Virus
cgagtaataattgttgggtagatgg

SEQ ID NO: 201301 - DNA, 25 bp, SARS Virus
gagtaataattcgtgggtagatggt

SEQ ID NO: 201302 - DNA, 25 bp, SARS Virus
agtaataattctggggtagatggtg

SEQ ID NO: 201303 - DNA, 25 bp, SARS Virus
gtaataattcttgggtagatggtga

SEQ ID NO: 201304 - DNA, 25 bp, SARS Virus
taataattcttgggtagatggtgac

SEQ ID NO: 201305 - DNA, 25 bp, SARS Virus
aataattcttgggtagatggtgacc

SEQ ID NO: 201306 - DNA, 25 bp, SARS Virus
ataattcttggggagatggtgacca

SEQ ID NO: 201307 - DNA, 25 bp, SARS Virus
taattcttgggtggatggtgaccat

SEQ ID NO: 201308 - DNA, 25 bp, SARS Virus
aattcttgggtagatggtgaccatc

SEQ ID NO: 201309 - DNA, 25 bp, SARS Virus
attcttgggtaggtggtgaccatct

SEQ ID NO: 201310 - DNA, 25 bp, SARS Virus
ttcttgggtagagggtgaccatcta

SEQ ID NO: 201311 - DNA, 25 bp, SARS Virus
tcttgggtagatggtgaccatctat

SEQ ID NO: 201312 - DNA, 25 bp, SARS Virus
cttgggtagatggtgaccatctatc

SEQ ID NO: 201313 - DNA, 25 bp, SARS Virus
ttgggtagatggggaccatctatcc

SEQ ID NO: 201314 - DNA, 25 bp, SARS Virus
tgggtagatggtgaccatctatccg

SEQ ID NO: 201315 - DNA, 25 bp, SARS Virus
gggtagatggtggccatctatccgt

SEQ ID NO: 201316 - DNA, 25 bp, SARS Virus
ggtagatggtgagcatctatccgtt

SEQ ID NO: 201317 - DNA, 25 bp, SARS Virus
gtagatggtgacgatctatccgttt

SEQ ID NO: 201318 - DNA, 25 bp, SARS Virus
tagatggtgaccgtctatccgttta

SEQ ID NO: 201319 - DNA, 25 bp, SARS Virus
agatggtgaccagctatccgtttat

SEQ ID NO: 201320 - DNA, 25 bp, SARS Virus
gatggtgaccatgtatccgtttatg

SEQ ID NO: 201321 - DNA, 25 bp, SARS Virus
atggtgaccatcgatccgtttatgg

SEQ ID NO: 201322 - DNA, 25 bp, SARS Virus
tggtgaccatctgtccgtttatgga

SEQ ID NO: 201323 - DNA, 25 bp, SARS Virus
ggtgaccatctagccgtttatggat

SEQ ID NO: 201324 - DNA, 25 bp, SARS Virus
gtgaccatctatgcgtttatggatg

SEQ ID NO: 201325 - DNA, 25 bp, SARS Virus
tgaccatctatcggtttatggatga

SEQ ID NO: 201326 - DNA, 25 bp, SARS Virus
gaccatctatccgtttatggatgaa

SEQ ID NO: 201327 - DNA, 25 bp, SARS Virus
accatctatccggttatggatgaag

SEQ ID NO: 201328 - DNA, 25 bp, SARS Virus
ccatctatccgtgtatggatgaaga

SEQ ID NO: 201329 - DNA, 25 bp, SARS Virus
catctatccgttgatggatgaagac

SEQ ID NO: 201330 - DNA, 25 bp, SARS Virus
atctatccgtttgtggatgaagact

SEQ ID NO: 201331 - DNA, 25 bp, SARS Virus
tctatccgtttagggatgaagactg

SEQ ID NO: 201332 - DNA, 25 bp, SARS Virus
ctatccgtttatggatgaagactgg

SEQ ID NO: 201333 - DNA, 25 bp, SARS Virus
tatccgtttatggatgaagactgga

SEQ ID NO: 201334 - DNA, 25 bp, SARS Virus
atccgtttatgggtgaagactggaa

SEQ ID NO: 201335 - DNA, 25 bp, SARS Virus
tccgtttatggaggaagactggaaa

SEQ ID NO: 201336 - DNA, 25 bp, SARS Virus
ccgtttatggatgaagactggaaag

SEQ ID NO: 201337 - DNA, 25 bp, SARS Virus
cgtttatggatggagactggaaagc

SEQ ID NO: 201338 - DNA, 25 bp, SARS Virus
gtttatggatgaggactggaaagcg

SEQ ID NO: 201339 - DNA, 25 bp, SARS Virus
tttatggatgaagactggaaagcgt

SEQ ID NO: 201340 - DNA, 25 bp, SARS Virus
ttatggatgaaggctggaaagcgta

SEQ ID NO: 201341 - DNA, 25 bp, SARS Virus
tatggatgaagagtggaaagcgtac

SEQ ID NO: 201342 - DNA, 25 bp, SARS Virus
atggatgaagacgggaaagcgtaca

SEQ ID NO: 201343 - DNA, 25 bp, SARS Virus
tggatgaagactggaaagcgtacat

SEQ ID NO: 201344 - DNA, 25 bp, SARS Virus
ggatgaagactggaaagcgtacatg

SEQ ID NO: 201345 - DNA, 25 bp, SARS Virus
gatgaagactgggaagcgtacatgg

SEQ ID NO: 201346 - DNA, 25 bp, SARS Virus
atgaagactggagagcgtacatggt

SEQ ID NO: 201347 - DNA, 25 bp, SARS Virus
tgaagactggaaggcgtacatggta

SEQ ID NO: 201348 - DNA, 25 bp, SARS Virus
gaagactggaaagcgtacatggtac

SEQ ID NO: 201349 - DNA, 25 bp, SARS Virus
aagactggaaagggtacatggtaca

SEQ ID NO: 201350 - DNA, 25 bp, SARS Virus
agactggaaagcgtacatggtacag

SEQ ID NO: 201351 - DNA, 25 bp, SARS Virus
gactggaaagcggacatggtacaga

SEQ ID NO: 201352 - DNA, 25 bp, SARS Virus
actggaaagcgtgcatggtacagat

SEQ ID NO: 201353 - DNA, 25 bp, SARS Virus
ctggaaagcgtagatggtacagatg

SEQ ID NO: 201354 - DNA, 25 bp, SARS Virus
tggaaagcgtacgtggtacagatgt

SEQ ID NO: 201355 - DNA, 25 bp, SARS Virus
ggaaagcgtacagggtacagatgtc

SEQ ID NO: 201356 - DNA, 25 bp, SARS Virus
gaaagcgtacatggtacagatgtca

SEQ ID NO: 201357 - DNA, 25 bp, SARS Virus
aaagcgtacatggtacagatgtcat

SEQ ID NO: 201358 - DNA, 25 bp, SARS Virus
aagcgtacatgggacagatgtcatg

SEQ ID NO: 201359 - DNA, 25 bp, SARS Virus
agcgtacatggtgcagatgtcatga

SEQ ID NO: 201360 - DNA, 25 bp, SARS Virus
gcgtacatggtagagatgtcatgag

SEQ ID NO: 201361 - DNA, 25 bp, SARS Virus
cgtacatggtacggatgtcatgagt

SEQ ID NO: 201362 - DNA, 25 bp, SARS Virus
gtacatggtacagatgtcatgagtc

SEQ ID NO: 201363 - DNA, 25 bp, SARS Virus
tacatggtacaggtgtcatgagtcg

SEQ ID NO: 201364 - DNA, 25 bp, SARS Virus
acatggtacagaggtcatgagtcgt

SEQ ID NO: 201365 - DNA, 25 bp, SARS Virus
catggtacagatgtcatgagtcgta

SEQ ID NO: 201366 - DNA, 25 bp, SARS Virus
atggtacagatggcatgagtcgtag

SEQ ID NO: 201367 - DNA, 25 bp, SARS Virus
tggtacagatgtgatgagtcgtagt

SEQ ID NO: 201368 - DNA, 25 bp, SARS Virus
ggtacagatgtcgtgagtcgtagtt

SEQ ID NO: 201369 - DNA, 25 bp, SARS Virus
gtacagatgtcaggagtcgtagttt

SEQ ID NO: 201370 - DNA, 25 bp, SARS Virus
tacagatgtcatgagtcgtagtttt

SEQ ID NO: 201371 - DNA, 25 bp, SARS Virus
acagatgtcatgggtcgtagttttc

SEQ ID NO: 201372 - DNA, 25 bp, SARS Virus
cagatgtcatgagtcgtagttttca

SEQ ID NO: 201373 - DNA, 25 bp, SARS Virus
agatgtcatgaggcgtagttttcaa

SEQ ID NO: 201374 - DNA, 25 bp, SARS Virus
gatgtcatgagtggtagttttcaac

SEQ ID NO: 201375 - DNA, 25 bp, SARS Virus
atgtcatgagtcgtagttttcaaca

SEQ ID NO: 201376 - DNA, 25 bp, SARS Virus
tgtcatgagtcggagttttcaacaa

SEQ ID NO: 201377 - DNA, 25 bp, SARS Virus
gtcatgagtcgtggttttcaacaat

SEQ ID NO: 201378 - DNA, 25 bp, SARS Virus
tcatgagtcgtagttttcaacaatg

SEQ ID NO: 201379 - DNA, 25 bp, SARS Virus
catgagtcgtaggtttcaacaatga

SEQ ID NO: 201380 - DNA, 25 bp, SARS Virus
atgagtcgtagtgttcaacaatgat

SEQ ID NO: 201381 - DNA, 25 bp, SARS Virus
tgagtcgtagttgtcaacaatgatg

SEQ ID NO: 201382 - DNA, 25 bp, SARS Virus
gagtcgtagtttgcaacaatgatga

SEQ ID NO: 201383 - DNA, 25 bp, SARS Virus
agtcgtagttttgaacaatgatgag

SEQ ID NO: 201384 - DNA, 25 bp, SARS Virus
gtcgtagttttcgacaatgatgaga

SEQ ID NO: 201385 - DNA, 25 bp, SARS Virus
tcgtagttttcagcaatgatgagat

SEQ ID NO: 201386 - DNA, 25 bp, SARS Virus
cgtagttttcaagaatgatgagatt

SEQ ID NO: 201387 - DNA, 25 bp, SARS Virus
gtagttttcaacgatgatgagattg

SEQ ID NO: 201388 - DNA, 25 bp, SARS Virus
tagttttcaacagtgatgagattgt

SEQ ID NO: 201389 - DNA, 25 bp, SARS Virus
agttttcaacaaggatgagattgtc

SEQ ID NO: 201390 - DNA, 25 bp, SARS Virus
gttttcaacaatgatgagattgtct

SEQ ID NO: 201391 - DNA, 25 bp, SARS Virus
ttttcaacaatggtgagattgtctt

SEQ ID NO: 201392 - DNA, 25 bp, SARS Virus
tttcaacaatgaggagattgtcttg

SEQ ID NO: 201393 - DNA, 25 bp, SARS Virus
ttcaacaatgatgagattgtcttgg

SEQ ID NO: 201394 - DNA, 25 bp, SARS Virus
tcaacaatgatgggattgtcttggg

SEQ ID NO: 201395 - DNA, 25 bp, SARS Virus
caacaatgatgagattgtcttggga

SEQ ID NO: 201396 - DNA, 25 bp, SARS Virus
aacaatgatgaggttgtcttgggag

SEQ ID NO: 201397 - DNA, 25 bp, SARS Virus
acaatgatgagagtgtcttgggagg

SEQ ID NO: 201398 - DNA, 25 bp, SARS Virus
caatgatgagatggtcttgggaggt

SEQ ID NO: 201399 - DNA, 25 bp, SARS Virus
aatgatgagattgtcttgggaggtc

SEQ ID NO: 201400 - DNA, 25 bp, SARS Virus
atgatgagattggcttgggaggtcc

SEQ ID NO: 201401 - DNA, 25 bp, SARS Virus
tgatgagattgtgttgggaggtcca

SEQ ID NO: 201402 - DNA, 25 bp, SARS Virus
gatgagattgtcgtgggaggtccat

SEQ ID NO: 201403 - DNA, 25 bp, SARS Virus
atgagattgtctggggaggtccatt

SEQ ID NO: 201404 - DNA, 25 bp, SARS Virus
tgagattgtcttgggaggtccattc

SEQ ID NO: 201405 - DNA, 25 bp, SARS Virus
gagattgtcttgggaggtccattca

SEQ ID NO: 201406 - DNA, 25 bp, SARS Virus
agattgtcttgggaggtccattcac

SEQ ID NO: 201407 - DNA, 25 bp, SARS Virus
gattgtcttggggggtccattcaca

SEQ ID NO: 201408 - DNA, 25 bp, SARS Virus
attgtcttgggaggtccattcacaa

SEQ ID NO: 201409 - DNA, 25 bp, SARS Virus
ttgtcttgggaggtccattcacaat

SEQ ID NO: 201410 - DNA, 25 bp, SARS Virus
tgtcttgggagggccattcacaatc

SEQ ID NO: 201411 - DNA, 25 bp, SARS Virus
gtcttgggaggtgcattcacaatcc

SEQ ID NO: 201412 - DNA, 25 bp, SARS Virus
tcttgggaggtcgattcacaatcct

SEQ ID NO: 201413 - DNA, 25 bp, SARS Virus
cttgggaggtccgttcacaatcctt

SEQ ID NO: 201414 - DNA, 25 bp, SARS Virus
ttgggaggtccagtcacaatccttt

SEQ ID NO: 201415 - DNA, 25 bp, SARS Virus
tgggaggtccatgcacaatcctttg

SEQ ID NO: 201416 - DNA, 25 bp, SARS Virus
gggaggtccattgacaatcctttga

SEQ ID NO: 201417 - DNA, 25 bp, SARS Virus
ggaggtccattcgcaatcctttgac

SEQ ID NO: 201418 - DNA, 25 bp, SARS Virus
gaggtccattcagaatcctttgaca

SEQ ID NO: 201419 - DNA, 25 bp, SARS Virus
aggtccattcacgatcctttgacat

SEQ ID NO: 201420 - DNA, 25 bp, SARS Virus
ggtccattcacagtcctttgacata

SEQ ID NO: 201421 - DNA, 25 bp, SARS Virus
gtccattcacaagcctttgacatac

SEQ ID NO: 201422 - DNA, 25 bp, SARS Virus
tccattcacaatgctttgacatact

SEQ ID NO: 201423 - DNA, 25 bp, SARS Virus
ccattcacaatcgtttgacatacta

SEQ ID NO: 201424 - DNA, 25 bp, SARS Virus
cattcacaatccgttgacatactac

SEQ ID NO: 201425 - DNA, 25 bp, SARS Virus
attcacaatcctgtgacatactacc

SEQ ID NO: 201426 - DNA, 25 bp, SARS Virus
ttcacaatccttggacatactacct

SEQ ID NO: 201427 - DNA, 25 bp, SARS Virus
tcacaatcctttgacatactacctt

SEQ ID NO: 201428 - DNA, 25 bp, SARS Virus
cacaatcctttggcatactaccttg

SEQ ID NO: 201429 - DNA, 25 bp, SARS Virus
acaatcctttgagatactaccttgg

SEQ ID NO: 201430 - DNA, 25 bp, SARS Virus
caatcctttgacgtactaccttggt

SEQ ID NO: 201431 - DNA, 25 bp, SARS Virus
aatcctttgacagactaccttggta

SEQ ID NO: 201432 - DNA, 25 bp, SARS Virus
atcctttgacatgctaccttggtag

SEQ ID NO: 201433 - DNA, 25 bp, SARS Virus
tcctttgacatagtaccttggtagg

SEQ ID NO: 201434 - DNA, 25 bp, SARS Virus
cctttgacatacgaccttggtaggt

SEQ ID NO: 201435 - DNA, 25 bp, SARS Virus
ctttgacatactgccttggtaggta

SEQ ID NO: 201436 - DNA, 25 bp, SARS Virus
tttgacatactagcttggtaggtat

SEQ ID NO: 201437 - DNA, 25 bp, SARS Virus
ttgacatactacgttggtaggtatt

SEQ ID NO: 201438 - DNA, 25 bp, SARS Virus
tgacatactaccgtggtaggtattc

SEQ ID NO: 201439 - DNA, 25 bp, SARS Virus
gacatactacctgggtaggtattcg

SEQ ID NO: 201440 - DNA, 25 bp, SARS Virus
acatactaccttggtaggtattcgt

SEQ ID NO: 201441 - DNA, 25 bp, SARS Virus
catactaccttggtaggtattcgtg

SEQ ID NO: 201442 - DNA, 25 bp, SARS Virus
atactaccttgggaggtattcgtgt

SEQ ID NO: 201443 - DNA, 25 bp, SARS Virus
tactaccttggtgggtattcgtgta

SEQ ID NO: 201444 - DNA, 25 bp, SARS Virus
actaccttggtaggtattcgtgtat

SEQ ID NO: 201445 - DNA, 25 bp, SARS Virus
ctaccttggtaggtattcgtgtatt

SEQ ID NO: 201446 - DNA, 25 bp, SARS Virus
taccttggtagggattcgtgtattg

SEQ ID NO: 201447 - DNA, 25 bp, SARS Virus
accttggtaggtgttcgtgtattgc

SEQ ID NO: 201448 - DNA, 25 bp, SARS Virus
ccttggtaggtagtcgtgtattgct

SEQ ID NO: 201449 - DNA, 25 bp, SARS Virus
cttggtaggtatgcgtgtattgctc

SEQ ID NO: 201450 - DNA, 25 bp, SARS Virus
ttggtaggtattggtgtattgctca

SEQ ID NO: 201451 - DNA, 25 bp, SARS Virus
tggtaggtattcgtgtattgctcac

SEQ ID NO: 201452 - DNA, 25 bp, SARS Virus
ggtaggtattcgggtattgctcaca

SEQ ID NO: 201453 - DNA, 25 bp, SARS Virus
gtaggtattcgtgtattgctcacag

SEQ ID NO: 201454 - DNA, 25 bp, SARS Virus
taggtattcgtggattgctcacaga

SEQ ID NO: 201455 - DNA, 25 bp, SARS Virus
aggtattcgtgtgttgctcacagac

SEQ ID NO: 201456 - DNA, 25 bp, SARS Virus
ggtattcgtgtagtgctcacagacc

SEQ ID NO: 201457 - DNA, 25 bp, SARS Virus
gtattcgtgtatggctcacagacct

SEQ ID NO: 201458 - DNA, 25 bp, SARS Virus
tattcgtgtattgctcacagacctg

SEQ ID NO: 201459 - DNA, 25 bp, SARS Virus
attcgtgtattggtcacagacctgc

SEQ ID NO: 201460 - DNA, 25 bp, SARS Virus
ttcgtgtattgcgcacagacctgct

SEQ ID NO: 201461 - DNA, 25 bp, SARS Virus
tcgtgtattgctgacagacctgctt

SEQ ID NO: 201462 - DNA, 25 bp, SARS Virus
cgtgtattgctcgcagacctgcttc

SEQ ID NO: 201463 - DNA, 25 bp, SARS Virus
gtgtattgctcagagacctgcttcg

SEQ ID NO: 201464 - DNA, 25 bp, SARS Virus
tgtattgctcacggacctgcttcga

SEQ ID NO: 201465 - DNA, 25 bp, SARS Virus
gtattgctcacagacctgcttcgag

SEQ ID NO: 201466 - DNA, 25 bp, SARS Virus
tattgctcacaggcctgcttcgagt

SEQ ID NO: 201467 - DNA, 25 bp, SARS Virus
attgctcacagagctgcttcgagtg

SEQ ID NO: 201468 - DNA, 25 bp, SARS Virus
ttgctcacagacgtgcttcgagtga

SEQ ID NO: 201469 - DNA, 25 bp, SARS Virus
tgctcacagaccggcttcgagtgat

SEQ ID NO: 201470 - DNA, 25 bp, SARS Virus
gctcacagacctgcttcgagtgata

SEQ ID NO: 201471 - DNA, 25 bp, SARS Virus
ctcacagacctggttcgagtgatat

SEQ ID NO: 201472 - DNA, 25 bp, SARS Virus
tcacagacctgcgtcgagtgatatt

SEQ ID NO: 201473 - DNA, 25 bp, SARS Virus
cacagacctgctgcgagtgatattc

SEQ ID NO: 201474 - DNA, 25 bp, SARS Virus
acagacctgcttggagtgatattct

SEQ ID NO: 201475 - DNA, 25 bp, SARS Virus
cagacctgcttcgagtgatattctt

SEQ ID NO: 201476 - DNA, 25 bp, SARS Virus
agacctgcttcgggtgatattcttt

SEQ ID NO: 201477 - DNA, 25 bp, SARS Virus
gacctgcttcgagtgatattcttta

SEQ ID NO: 201478 - DNA, 25 bp, SARS Virus
acctgcttcgagggatattctttat

SEQ ID NO: 201479 - DNA, 25 bp, SARS Virus
cctgcttcgagtgatattctttatc

SEQ ID NO: 201480 - DNA, 25 bp, SARS Virus
ctgcttcgagtggtattctttatct

SEQ ID NO: 201481 - DNA, 25 bp, SARS Virus
tgcttcgagtgagattctttatctt

SEQ ID NO: 201482 - DNA, 25 bp, SARS Virus
gcttcgagtgatgttctttatcttg

SEQ ID NO: 201483 - DNA, 25 bp, SARS Virus
cttcgagtgatagtctttatcttgg

SEQ ID NO: 201484 - DNA, 25 bp, SARS Virus
ttcgagtgatatgctttatcttggg

SEQ ID NO: 201485 - DNA, 25 bp, SARS Virus
tcgagtgatattgtttatcttggga

SEQ ID NO: 201486 - DNA, 25 bp, SARS Virus
cgagtgatattcgttatcttgggag

SEQ ID NO: 201487 - DNA, 25 bp, SARS Virus
gagtgatattctgtatcttgggaga

SEQ ID NO: 201488 - DNA, 25 bp, SARS Virus
agtgatattcttgatcttgggagat

SEQ ID NO: 201489 - DNA, 25 bp, SARS Virus
gtgatattctttgtcttgggagatc

SEQ ID NO: 201490 - DNA, 25 bp, SARS Virus
tgatattctttagcttgggagatcg

SEQ ID NO: 201491 - DNA, 25 bp, SARS Virus
gatattctttatgttgggagatcgt

SEQ ID NO: 201492 - DNA, 25 bp, SARS Virus
atattctttatcgtgggagatcgtt

SEQ ID NO: 201493 - DNA, 25 bp, SARS Virus
tattctttatctggggagatcgttt

SEQ ID NO: 201494 - DNA, 25 bp, SARS Virus
attctttatcttgggagatcgttta

SEQ ID NO: 201495 - DNA, 25 bp, SARS Virus
ttctttatcttgggagatcgtttaa

SEQ ID NO: 201496 - DNA, 25 bp, SARS Virus
tctttatcttgggagatcgtttaat

SEQ ID NO: 201497 - DNA, 25 bp, SARS Virus
ctttatcttgggggatcgtttaatc

SEQ ID NO: 201498 - DNA, 25 bp, SARS Virus
tttatcttgggagatcgtttaatca

SEQ ID NO: 201499 - DNA, 25 bp, SARS Virus
ttatcttgggaggtcgtttaatcac

SEQ ID NO: 201500 - DNA, 25 bp, SARS Virus
tatcttgggagagcgtttaatcaca

SEQ ID NO: 201501 - DNA, 25 bp, SARS Virus
atcttgggagatggtttaatcacag

SEQ ID NO: 201502 - DNA, 25 bp, SARS Virus
tcttgggagatcgtttaatcacagt

SEQ ID NO: 201503 - DNA, 25 bp, SARS Virus
cttgggagatcggttaatcacagta

SEQ ID NO: 201504 - DNA, 25 bp, SARS Virus
ttgggagatcgtgtaatcacagtat

SEQ ID NO: 201505 - DNA, 25 bp, SARS Virus
tgggagatcgttgaatcacagtatt

SEQ ID NO: 201506 - DNA, 25 bp, SARS Virus
gggagatcgtttgatcacagtattg

SEQ ID NO: 201507 - DNA, 25 bp, SARS Virus
ggagatcgtttagtcacagtattgt

SEQ ID NO: 201508 - DNA, 25 bp, SARS Virus
gagatcgtttaagcacagtattgtt

SEQ ID NO: 201509 - DNA, 25 bp, SARS Virus
agatcgtttaatgacagtattgtta

SEQ ID NO: 201510 - DNA, 25 bp, SARS Virus
gatcgtttaatcgcagtattgttat

SEQ ID NO: 201511 - DNA, 25 bp, SARS Virus
atcgtttaatcagagtattgttata

SEQ ID NO: 201512 - DNA, 25 bp, SARS Virus
tcgtttaatcacggtattgttatac

SEQ ID NO: 201513 - DNA, 25 bp, SARS Virus
cgtttaatcacagtattgttatacc

SEQ ID NO: 201514 - DNA, 25 bp, SARS Virus
gtttaatcacaggattgttataccg

SEQ ID NO: 201515 - DNA, 25 bp, SARS Virus
tttaatcacagtgttgttataccgt

SEQ ID NO: 201516 - DNA, 25 bp, SARS Virus
ttaatcacagtagtgttataccgtg

SEQ ID NO: 201517 - DNA, 25 bp, SARS Virus
taatcacagtatggttataccgtgt

SEQ ID NO: 201518 - DNA, 25 bp, SARS Virus
aatcacagtattgttataccgtgtc

SEQ ID NO: 201519 - DNA, 25 bp, SARS Virus
atcacagtattggtataccgtgtcc

SEQ ID NO: 201520 - DNA, 25 bp, SARS Virus
tcacagtattgtgataccgtgtcca

SEQ ID NO: 201521 - DNA, 25 bp, SARS Virus
cacagtattgttgtaccgtgtccaa

SEQ ID NO: 201522 - DNA, 25 bp, SARS Virus
acagtattgttagaccgtgtccaaa

SEQ ID NO: 201523 - DNA, 25 bp, SARS Virus
cagtattgttatgccgtgtccaaac

SEQ ID NO: 201524 - DNA, 25 bp, SARS Virus
agtattgttatagcgtgtccaaacg

SEQ ID NO: 201525 - DNA, 25 bp, SARS Virus
gtattgttatacggtgtccaaacgg

SEQ ID NO: 201526 - DNA, 25 bp, SARS Virus
tattgttataccgtgtccaaacggg

SEQ ID NO: 201527 - DNA, 25 bp, SARS Virus
attgttataccgggtccaaacgggt

SEQ ID NO: 201528 - DNA, 25 bp, SARS Virus
ttgttataccgtgtccaaacgggta

SEQ ID NO: 201529 - DNA, 25 bp, SARS Virus
tgttataccgtggccaaacgggtat

SEQ ID NO: 201530 - DNA, 25 bp, SARS Virus
gttataccgtgtgcaaacgggtatc

SEQ ID NO: 201531 - DNA, 25 bp, SARS Virus
ttataccgtgtcgaaacgggtatcg

SEQ ID NO: 201532 - DNA, 25 bp, SARS Virus
tataccgtgtccgaacgggtatcgt

SEQ ID NO: 201533 - DNA, 25 bp, SARS Virus
ataccgtgtccagacgggtatcgta

SEQ ID NO: 201534 - DNA, 25 bp, SARS Virus
taccgtgtccaagcgggtatcgtag

SEQ ID NO: 201535 - DNA, 25 bp, SARS Virus
accgtgtccaaaggggtatcgtagg

SEQ ID NO: 201536 - DNA, 25 bp, SARS Virus
ccgtgtccaaacgggtatcgtagga

SEQ ID NO: 201537 - DNA, 25 bp, SARS Virus
cgtgtccaaacgggtatcgtaggaa

SEQ ID NO: 201538 - DNA, 25 bp, SARS Virus
gtgtccaaacgggtatcgtaggaat

SEQ ID NO: 201539 - DNA, 25 bp, SARS Virus
tgtccaaacggggatcgtaggaatt

SEQ ID NO: 201540 - DNA, 25 bp, SARS Virus
gtccaaacgggtgtcgtaggaattt

SEQ ID NO: 201541 - DNA, 25 bp, SARS Virus
tccaaacgggtagcgtaggaatttt

SEQ ID NO: 201542 - DNA, 25 bp, SARS Virus
ccaaacgggtatggtaggaattttt

SEQ ID NO: 201543 - DNA, 25 bp, SARS Virus
caaacgggtatcgtaggaattttta

SEQ ID NO: 201544 - DNA, 25 bp, SARS Virus
aaacgggtatcggaggaatttttaa

SEQ ID NO: 201545 - DNA, 25 bp, SARS Virus
aacgggtatcgtgggaatttttaac

SEQ ID NO: 201546 - DNA, 25 bp, SARS Virus
acgggtatcgtaggaatttttaaca

SEQ ID NO: 201547 - DNA, 25 bp, SARS Virus
cgggtatcgtaggaatttttaacat

SEQ ID NO: 201548 - DNA, 25 bp, SARS Virus
gggtatcgtagggatttttaacatg

SEQ ID NO: 201549 - DNA, 25 bp, SARS Virus
ggtatcgtaggagtttttaacatgt

SEQ ID NO: 201550 - DNA, 25 bp, SARS Virus
gtatcgtaggaagttttaacatgtg

SEQ ID NO: 201551 - DNA, 25 bp, SARS Virus
tatcgtaggaatgtttaacatgtga

SEQ ID NO: 201552 - DNA, 25 bp, SARS Virus
atcgtaggaattgttaacatgtgag

SEQ ID NO: 201553 - DNA, 25 bp, SARS Virus
tcgtaggaatttgtaacatgtgagt

SEQ ID NO: 201554 - DNA, 25 bp, SARS Virus
cgtaggaattttgaacatgtgagtc

SEQ ID NO: 201555 - DNA, 25 bp, SARS Virus
gtaggaatttttgacatgtgagtcg

SEQ ID NO: 201556 - DNA, 25 bp, SARS Virus
taggaatttttagcatgtgagtcgt

SEQ ID NO: 201557 - DNA, 25 bp, SARS Virus
aggaatttttaagatgtgagtcgtc

SEQ ID NO: 201558 - DNA, 25 bp, SARS Virus
ggaatttttaacgtgtgagtcgtcg

SEQ ID NO: 201559 - DNA, 25 bp, SARS Virus
gaatttttaacaggtgagtcgtcgt

SEQ ID NO: 201560 - DNA, 25 bp, SARS Virus
aatttttaacatgtgagtcgtcgtt

SEQ ID NO: 201561 - DNA, 25 bp, SARS Virus
atttttaacatgggagtcgtcgttc

SEQ ID NO: 201562 - DNA, 25 bp, SARS Virus
tttttaacatgtgagtcgtcgttct

SEQ ID NO: 201563 - DNA, 25 bp, SARS Virus
ttttaacatgtgggtcgtcgttctt

SEQ ID NO: 201564 - DNA, 25 bp, SARS Virus
tttaacatgtgagtcgtcgttcttg

SEQ ID NO: 201565 - DNA, 25 bp, SARS Virus
ttaacatgtgaggcgtcgttcttgc

SEQ ID NO: 201566 - DNA, 25 bp, SARS Virus
taacatgtgagtggtcgttcttgcg

SEQ ID NO: 201567 - DNA, 25 bp, SARS Virus
aacatgtgagtcgtcgttcttgcgt

SEQ ID NO: 201568 - DNA, 25 bp, SARS Virus
acatgtgagtcggcgttcttgcgtt

SEQ ID NO: 201569 - DNA, 25 bp, SARS Virus
catgtgagtcgtggttcttgcgttc

SEQ ID NO: 201570 - DNA, 25 bp, SARS Virus
atgtgagtcgtcgttcttgcgttcg

SEQ ID NO: 201571 - DNA, 25 bp, SARS Virus
tgtgagtcgtcggtcttgcgttcgt

SEQ ID NO: 201572 - DNA, 25 bp, SARS Virus
gtgagtcgtcgtgcttgcgttcgtc

SEQ ID NO: 201573 - DNA, 25 bp, SARS Virus
tgagtcgtcgttgttgcgttcgtct

SEQ ID NO: 201574 - DNA, 25 bp, SARS Virus
gagtcgtcgttcgtgcgttcgtctc

SEQ ID NO: 201575 - DNA, 25 bp, SARS Virus
agtcgtcgttctggcgttcgtctcc

SEQ ID NO: 201576 - DNA, 25 bp, SARS Virus
gtcgtcgttcttgcgttcgtctcca

SEQ ID NO: 201577 - DNA, 25 bp, SARS Virus
cgtcgttgttgttccaacatgagtg

SEQ ID NO: 201578 - DNA, 25 bp, SARS Virus
gtcgttgttgtatcaacatgagtgg

SEQ ID NO: 201579 - DNA, 25 bp, SARS Virus
tcgttgttgtactaacatgagtggt

SEQ ID NO: 201580 - DNA, 25 bp, SARS Virus
cgttgttgtacctacatgagtggtt

SEQ ID NO: 201581 - DNA, 25 bp, SARS Virus
gttgttgtaccatcatgagtggttt

SEQ ID NO: 201582 - DNA, 25 bp, SARS Virus
ttgttgtaccaatatgagtggtttt

SEQ ID NO: 201583 - DNA, 25 bp, SARS Virus
tgttgtaccaacttgagtggttttt

SEQ ID NO: 201584 - DNA, 25 bp, SARS Virus
gttgtaccaacatgagtggtttttg

SEQ ID NO: 201585 - DNA, 25 bp, SARS Virus
ttgtaccaacattagtggtttttgt

SEQ ID NO: 201586 - DNA, 25 bp, SARS Virus
tgtaccaacatgtgtggtttttgtg

SEQ ID NO: 201587 - DNA, 25 bp, SARS Virus
gtaccaacatgattggtttttgtgc

SEQ ID NO: 201588 - DNA, 25 bp, SARS Virus
taccaacatgagtggtttttgtgca

SEQ ID NO: 201589 - DNA, 25 bp, SARS Virus
accaacatgagttgtttttgtgcag

SEQ ID NO: 201590 - DNA, 25 bp, SARS Virus
ccaacatgagtgttttttgtgcaga

SEQ ID NO: 201591 - DNA, 25 bp, SARS Virus
caacatgagtggtttttgtgcagac

SEQ ID NO: 201592 - DNA, 25 bp, SARS Virus
aacatgagtggtttttgtgcagact

SEQ ID NO: 201593 - DNA, 25 bp, SARS Virus
acatgagtggtttttgtgcagactt

SEQ ID NO: 201594 - DNA, 25 bp, SARS Virus
catgagtggtttttgtgcagactta

SEQ ID NO: 201595 - DNA, 25 bp, SARS Virus
atgagtggtttttgtgcagacttaa

SEQ ID NO: 201596 - DNA, 25 bp, SARS Virus
tgagtggtttttttgcagacttaaa

SEQ ID NO: 201597 - DNA, 25 bp, SARS Virus
gagtggtttttgtgcagacttaaag

SEQ ID NO: 201598 - DNA, 25 bp, SARS Virus
agtggtttttgttcagacttaaagt

SEQ ID NO: 201599 - DNA, 25 bp, SARS Virus
gtggtttttgtgtagacttaaagta

SEQ ID NO: 201600 - DNA, 25 bp, SARS Virus
tggtttttgtgctgacttaaagtat

SEQ ID NO: 201601 - DNA, 25 bp, SARS Virus
ggtttttgtgcatacttaaagtatt

SEQ ID NO: 201602 - DNA, 25 bp, SARS Virus
gtttttgtgcagtcttaaagtattt

SEQ ID NO: 201603 - DNA, 25 bp, SARS Virus
tttttgtgcagatttaaagtatttc

SEQ ID NO: 201604 - DNA, 25 bp, SARS Virus
ttttgtgcagacttaaagtatttca

SEQ ID NO: 201605 - DNA, 25 bp, SARS Virus
tttgtgcagacttaaagtatttcat

SEQ ID NO: 201606 - DNA, 25 bp, SARS Virus
ttgtgcagactttaagtatttcatc

SEQ ID NO: 201607 - DNA, 25 bp, SARS Virus
tgtgcagacttatagtatttcatca

SEQ ID NO: 201608 - DNA, 25 bp, SARS Virus
gtgcagacttaatgtatttcatcat

SEQ ID NO: 201609 - DNA, 25 bp, SARS Virus
tgcagacttaaattatttcatcatc

SEQ ID NO: 201610 - DNA, 25 bp, SARS Virus
gcagacttaaagtatttcatcatcc

SEQ ID NO: 201611 - DNA, 25 bp, SARS Virus
cagacttaaagtttttcatcatccg

SEQ ID NO: 201612 - DNA, 25 bp, SARS Virus
agacttaaagtatttcatcatccgt

SEQ ID NO: 201613 - DNA, 25 bp, SARS Virus
gacttaaagtatttcatcatccgtc

SEQ ID NO: 201614 - DNA, 25 bp, SARS Virus
acttaaagtatttcatcatccgtcg

SEQ ID NO: 201615 - DNA, 25 bp, SARS Virus
cttaaagtattttatcatccgtcgt

SEQ ID NO: 201616 - DNA, 25 bp, SARS Virus
ttaaagtatttcttcatccgtcgtg

SEQ ID NO: 201617 - DNA, 25 bp, SARS Virus
taaagtatttcatcatccgtcgtgt

SEQ ID NO: 201618 - DNA, 25 bp, SARS Virus
aaagtatttcattatccgtcgtgtt

SEQ ID NO: 201619 - DNA, 25 bp, SARS Virus
aagtatttcatcttccgtcgtgttc

SEQ ID NO: 201620 - DNA, 25 bp, SARS Virus
agtatttcatcatccgtcgtgttca

SEQ ID NO: 201621 - DNA, 25 bp, SARS Virus
gtatttcatcattcgtcgtgttcag

SEQ ID NO: 201622 - DNA, 25 bp, SARS Virus
tatttcatcatctgtcgtgttcagt

SEQ ID NO: 201623 - DNA, 25 bp, SARS Virus
atttcatcatccttcgtgttcagtg

SEQ ID NO: 201624 - DNA, 25 bp, SARS Virus
tttcatcatccgtcgtgttcagtgg

SEQ ID NO: 201625 - DNA, 25 bp, SARS Virus
ttcatcatccgttgtgttcagtggt

SEQ ID NO: 201626 - DNA, 25 bp, SARS Virus
tcatcatccgtcttgttcagtggtt

SEQ ID NO: 201627 - DNA, 25 bp, SARS Virus
catcatccgtcgtgttcagtggtta

SEQ ID NO: 201628 - DNA, 25 bp, SARS Virus
atcatccgtcgttttcagtggttat

SEQ ID NO: 201629 - DNA, 25 bp, SARS Virus
tcatccgtcgtgttcagtggttata

SEQ ID NO: 201630 - DNA, 25 bp, SARS Virus
catccgtcgtgttcagtggttatac

SEQ ID NO: 201631 - DNA, 25 bp, SARS Virus
atccgtcgtgtttagtggttatacc

SEQ ID NO: 201632 - DNA, 25 bp, SARS Virus
tccgtcgtgttctgtggttataccg

SEQ ID NO: 201633 - DNA, 25 bp, SARS Virus
ccgtcgtgttcattggttataccgt

SEQ ID NO: 201634 - DNA, 25 bp, SARS Virus
cgtcgtgttcagtggttataccgtt

SEQ ID NO: 201635 - DNA, 25 bp, SARS Virus
gtcgtgttcagttgttataccgtta

SEQ ID NO: 201636 - DNA, 25 bp, SARS Virus
tcgtgttcagtgtttataccgttat

SEQ ID NO: 201637 - DNA, 25 bp, SARS Virus
cgtgttcagtggttataccgttatt

SEQ ID NO: 201638 - DNA, 25 bp, SARS Virus
gtgttcagtggttataccgttatta

SEQ ID NO: 201639 - DNA, 25 bp, SARS Virus
tgttcagtggttttaccgttattat

SEQ ID NO: 201640 - DNA, 25 bp, SARS Virus
gttcagtggttataccgttattatg

SEQ ID NO: 201641 - DNA, 25 bp, SARS Virus
ttcagtggttattccgttattatgg

SEQ ID NO: 201642 - DNA, 25 bp, SARS Virus
tcagtggttatatcgttattatggt

SEQ ID NO: 201643 - DNA, 25 bp, SARS Virus
cagtggttatactgttattatggtg

SEQ ID NO: 201644 - DNA, 25 bp, SARS Virus
agtggttatacctttattatggtgg

SEQ ID NO: 201645 - DNA, 25 bp, SARS Virus
gtggttataccgttattatggtggt

SEQ ID NO: 201646 - DNA, 25 bp, SARS Virus
tggttataccgttattatggtggtc

SEQ ID NO: 201647 - DNA, 25 bp, SARS Virus
ggttataccgtttttatggtggtcg

SEQ ID NO: 201648 - DNA, 25 bp, SARS Virus
gttataccgttattatggtggtcgg

SEQ ID NO: 201649 - DNA, 25 bp, SARS Virus
ttataccgttattatggtggtcggt

SEQ ID NO: 201650 - DNA, 25 bp, SARS Virus
tataccgttattttggtggtcggtg

SEQ ID NO: 201651 - DNA, 25 bp, SARS Virus
ataccgttattatggtggtcggtga

SEQ ID NO: 201652 - DNA, 25 bp, SARS Virus
taccgttattattgtggtcggtgat

SEQ ID NO: 201653 - DNA, 25 bp, SARS Virus
accgttattatgttggtcggtgatg

SEQ ID NO: 201654 - DNA, 25 bp, SARS Virus
ccgttattatggtggtcggtgatga

SEQ ID NO: 201655 - DNA, 25 bp, SARS Virus
cgttattatggttgtcggtgatgac

SEQ ID NO: 201656 - DNA, 25 bp, SARS Virus
gttattatggtgttcggtgatgact

SEQ ID NO: 201657 - DNA, 25 bp, SARS Virus
ttattatggtggtcggtgatgactt

SEQ ID NO: 201658 - DNA, 25 bp, SARS Virus
tattatggtggttggtgatgacttc

SEQ ID NO: 201659 - DNA, 25 bp, SARS Virus
attatggtggtctgtgatgacttcg

SEQ ID NO: 201660 - DNA, 25 bp, SARS Virus
ttatggtggtcgttgatgacttcgt

SEQ ID NO: 201661 - DNA, 25 bp, SARS Virus
tatggtggtcggtgatgacttcgtc

SEQ ID NO: 201662 - DNA, 25 bp, SARS Virus
atggtggtcggttatgacttcgtct

SEQ ID NO: 201663 - DNA, 25 bp, SARS Virus
tggtggtcggtgttgacttcgtctg

SEQ ID NO: 201664 - DNA, 25 bp, SARS Virus
ggtggtcggtgatgacttcgtctgt

SEQ ID NO: 201665 - DNA, 25 bp, SARS Virus
gtggtcggtgattacttcgtctgtg

SEQ ID NO: 201666 - DNA, 25 bp, SARS Virus
tggtcggtgatgtcttcgtctgtgt

SEQ ID NO: 201667 - DNA, 25 bp, SARS Virus
ggtcggtgatgatttcgtctgtgta

SEQ ID NO: 201668 - DNA, 25 bp, SARS Virus
gtcggtgatgacttcgtctgtgtag

SEQ ID NO: 201669 - DNA, 25 bp, SARS Virus
tcggtgatgacttcgtctgtgtaga

SEQ ID NO: 201670 - DNA, 25 bp, SARS Virus
cggtgatgactttgtctgtgtagat

SEQ ID NO: 201671 - DNA, 25 bp, SARS Virus
ggtgatgacttcttctgtgtagatt

SEQ ID NO: 201672 - DNA, 25 bp, SARS Virus
gtgatgacttcgtctgtgtagattt

SEQ ID NO: 201673 - DNA, 25 bp, SARS Virus
tgatgacttcgtttgtgtagatttc

SEQ ID NO: 201674 - DNA, 25 bp, SARS Virus
gatgacttcgtctgtgtagatttcg

SEQ ID NO: 201675 - DNA, 25 bp, SARS Virus
atgacttcgtctttgtagatttcgt

SEQ ID NO: 201676 - DNA, 25 bp, SARS Virus
tgacttcgtctgtgtagatttcgtg

SEQ ID NO: 201677 - DNA, 25 bp, SARS Virus
gacttcgtctgtttagatttcgtgg

SEQ ID NO: 201678 - DNA, 25 bp, SARS Virus
acttcgtctgtgtagatttcgtggg

SEQ ID NO: 201679 - DNA, 25 bp, SARS Virus
cttcgtctgtgttgatttcgtgggt

SEQ ID NO: 201680 - DNA, 25 bp, SARS Virus
ttcgtctgtgtatatttcgtgggtg

SEQ ID NO: 201681 - DNA, 25 bp, SARS Virus
tcgtctgtgtagttttcgtgggtgt

SEQ ID NO: 201682 - DNA, 25 bp, SARS Virus
cgtctgtgtagatttcgtgggtgtc

SEQ ID NO: 201683 - DNA, 25 bp, SARS Virus
gtctgtgtagatttcgtgggtgtcc

SEQ ID NO: 201684 - DNA, 25 bp, SARS Virus
tctgtgtagatttcgtgggtgtcca

SEQ ID NO: 201685 - DNA, 25 bp, SARS Virus
ctgtgtagattttgtgggtgtccaa

SEQ ID NO: 201686 - DNA, 25 bp, SARS Virus
tgtgtagatttcttgggtgtccaac

SEQ ID NO: 201687 - DNA, 25 bp, SARS Virus
gtgtagatttcgtgggtgtccaacg

SEQ ID NO: 201688 - DNA, 25 bp, SARS Virus
tgtagatttcgttggtgtccaacgt

SEQ ID NO: 201689 - DNA, 25 bp, SARS Virus
gtagatttcgtgtgtgtccaacgtg

SEQ ID NO: 201690 - DNA, 25 bp, SARS Virus
tagatttcgtggttgtccaacgtgt

SEQ ID NO: 201691 - DNA, 25 bp, SARS Virus
agatttcgtgggtgtccaacgtgtt

SEQ ID NO: 201692 - DNA, 25 bp, SARS Virus
gatttcgtgggtttccaacgtgttc

SEQ ID NO: 201693 - DNA, 25 bp, SARS Virus
atttcgtgggtgtccaacgtgttct

SEQ ID NO: 201694 - DNA, 25 bp, SARS Virus
tttcgtgggtgttcaacgtgttctc

SEQ ID NO: 201695 - DNA, 25 bp, SARS Virus
ttcgtgggtgtctaacgtgttctcc

SEQ ID NO: 201696 - DNA, 25 bp, SARS Virus
tcgtgggtgtcctacgtgttctcct

SEQ ID NO: 201697 - DNA, 25 bp, SARS Virus
cgtgggtgtccatcgtgttctcctc

SEQ ID NO: 201698 - DNA, 25 bp, SARS Virus
gtgggtgtccaatgtgttctcctca

SEQ ID NO: 201699 - DNA, 25 bp, SARS Virus
tgggtgtccaacttgttctcctcat

SEQ ID NO: 201700 - DNA, 25 bp, SARS Virus
gggtgtccaacgtgttctcctcatt

SEQ ID NO: 201701 - DNA, 25 bp, SARS Virus
ggtgtccaacgttttctcctcattt

SEQ ID NO: 201702 - DNA, 25 bp, SARS Virus
gtgtccaacgtgttctcctcatttc

SEQ ID NO: 201703 - DNA, 25 bp, SARS Virus
tgtccaacgtgttctcctcatttct

SEQ ID NO: 201704 - DNA, 25 bp, SARS Virus
gtccaacgtgttttcctcatttcta

SEQ ID NO: 201705 - DNA, 25 bp, SARS Virus
tccaacgtgttctcctcatttctac

SEQ ID NO: 201706 - DNA, 25 bp, SARS Virus
ccaacgtgttcttctcatttctaca

SEQ ID NO: 201707 - DNA, 25 bp, SARS Virus
caacgtgttctcttcatttctacaa

SEQ ID NO: 201708 - DNA, 25 bp, SARS Virus
aacgtgttctcctcatttctacaat

SEQ ID NO: 201709 - DNA, 25 bp, SARS Virus
acgtgttctccttatttctacaatc

SEQ ID NO: 201710 - DNA, 25 bp, SARS Virus
cgtgttctcctcttttctacaatcg

SEQ ID NO: 201711 - DNA, 25 bp, SARS Virus
gtgttctcctcatttctacaatcga

SEQ ID NO: 201712 - DNA, 25 bp, SARS Virus
tgttctcctcatttctacaatcgat

SEQ ID NO: 201713 - DNA, 25 bp, SARS Virus
gttctcctcatttctacaatcgata

SEQ ID NO: 201714 - DNA, 25 bp, SARS Virus
ttctcctcatttttacaatcgatac

SEQ ID NO: 201715 - DNA, 25 bp, SARS Virus
tctcctcatttctacaatcgatact

SEQ ID NO: 201716 - DNA, 25 bp, SARS Virus
ctcctcatttcttcaatcgatactc

SEQ ID NO: 201717 - DNA, 25 bp, SARS Virus
tcctcatttctataatcgatactct

SEQ ID NO: 201718 - DNA, 25 bp, SARS Virus
cctcatttctactatcgatactcta

SEQ ID NO: 201719 - DNA, 25 bp, SARS Virus
ctcatttctacattcgatactctaa

SEQ ID NO: 201720 - DNA, 25 bp, SARS Virus
tcatttctacaatcgatactctaag

SEQ ID NO: 201721 - DNA, 25 bp, SARS Virus
catttctacaattgatactctaagt

SEQ ID NO: 201722 - DNA, 25 bp, SARS Virus
atttctacaatctatactctaagta

SEQ ID NO: 201723 - DNA, 25 bp, SARS Virus
tttctacaatcgttactctaagtag

SEQ ID NO: 201724 - DNA, 25 bp, SARS Virus
ttctacaatcgatactctaagtagc

SEQ ID NO: 201725 - DNA, 25 bp, SARS Virus
tctacaatcgattctctaagtagcg

SEQ ID NO: 201726 - DNA, 25 bp, SARS Virus
ctacaatcgatattctaagtagcgt

SEQ ID NO: 201727 - DNA, 25 bp, SARS Virus
tacaatcgatactctaagtagcgta

SEQ ID NO: 201728 - DNA, 25 bp, SARS Virus
acaatcgatactttaagtagcgtag

SEQ ID NO: 201729 - DNA, 25 bp, SARS Virus
caatcgatactctaagtagcgtagt

SEQ ID NO: 201730 - DNA, 25 bp, SARS Virus
aatcgatactcttagtagcgtagtt

SEQ ID NO: 201731 - DNA, 25 bp, SARS Virus
atcgatactctatgtagcgtagttg

SEQ ID NO: 201732 - DNA, 25 bp, SARS Virus
tcgatactctaattagcgtagttgt

SEQ ID NO: 201733 - DNA, 25 bp, SARS Virus
cgatactctaagtagcgtagttgtg

SEQ ID NO: 201734 - DNA, 25 bp, SARS Virus
gatactctaagttgcgtagttgtgg

SEQ ID NO: 201735 - DNA, 25 bp, SARS Virus
atactctaagtatcgtagttgtggt

SEQ ID NO: 201736 - DNA, 25 bp, SARS Virus
tactctaagtagtgtagttgtggtg

SEQ ID NO: 201737 - DNA, 25 bp, SARS Virus
actctaagtagcttagttgtggtgt

SEQ ID NO: 201738 - DNA, 25 bp, SARS Virus
ctctaagtagcgtagttgtggtgtc

SEQ ID NO: 201739 - DNA, 25 bp, SARS Virus
tctaagtagcgttgttgtggtgtct

SEQ ID NO: 201740 - DNA, 25 bp, SARS Virus
ctaagtagcgtatttgtggtgtctt

SEQ ID NO: 201741 - DNA, 25 bp, SARS Virus
taagtagcgtagttgtggtgtcttt

SEQ ID NO: 201742 - DNA, 25 bp, SARS Virus
aagtagcgtagttgtggtgtctttt

SEQ ID NO: 201743 - DNA, 25 bp, SARS Virus
agtagcgtagttttggtgtcttttg

SEQ ID NO: 201744 - DNA, 25 bp, SARS Virus
gtagcgtagttgtggtgtcttttga

SEQ ID NO: 201745 - DNA, 25 bp, SARS Virus
tagcgtagttgttgtgtcttttgag

SEQ ID NO: 201746 - DNA, 25 bp, SARS Virus
agcgtagttgtgttgtcttttgagg

SEQ ID NO: 201747 - DNA, 25 bp, SARS Virus
gcgtagttgtggtgtcttttgagga

SEQ ID NO: 201748 - DNA, 25 bp, SARS Virus
cgtagttgtggtttcttttgaggac

SEQ ID NO: 201749 - DNA, 25 bp, SARS Virus
gtagttgtggtgtcttttgaggact

SEQ ID NO: 201750 - DNA, 25 bp, SARS Virus
tagttgtggtgttttttgaggacta

SEQ ID NO: 201751 - DNA, 25 bp, SARS Virus
agttgtggtgtcttttgaggactat

SEQ ID NO: 201752 - DNA, 25 bp, SARS Virus
gttgtggtgtcttttgaggactatc

SEQ ID NO: 201753 - DNA, 25 bp, SARS Virus
ttgtggtgtcttttgaggactatct

SEQ ID NO: 201754 - DNA, 25 bp, SARS Virus
tgtggtgtcttttgaggactatctc

SEQ ID NO: 201755 - DNA, 25 bp, SARS Virus
gtggtgtctttttaggactatctcg

SEQ ID NO: 201756 - DNA, 25 bp, SARS Virus
tggtgtcttttgtggactatctcga

SEQ ID NO: 201757 - DNA, 25 bp, SARS Virus
ggtgtcttttgatgactatctcgag

SEQ ID NO: 201758 - DNA, 25 bp, SARS Virus
gtgtcttttgagtactatctcgaga

SEQ ID NO: 201759 - DNA, 25 bp, SARS Virus
tgtcttttgaggtctatctcgagac

SEQ ID NO: 201760 - DNA, 25 bp, SARS Virus
gtcttttgaggattatctcgagaca

SEQ ID NO: 201761 - DNA, 25 bp, SARS Virus
tcttttgaggactatctcgagacat

SEQ ID NO: 201762 - DNA, 25 bp, SARS Virus
cttttgaggactttctcgagacatt

SEQ ID NO: 201763 - DNA, 25 bp, SARS Virus
ttttgaggactatctcgagacatta

SEQ ID NO: 201764 - DNA, 25 bp, SARS Virus
tttgaggactatttcgagacattac

SEQ ID NO: 201765 - DNA, 25 bp, SARS Virus
ttgaggactatctcgagacattacg

SEQ ID NO: 201766 - DNA, 25 bp, SARS Virus
tgaggactatcttgagacattacga

SEQ ID NO: 201767 - DNA, 25 bp, SARS Virus
gaggactatctctagacattacgag

SEQ ID NO: 201768 - DNA, 25 bp, SARS Virus
aggactatctcgtgacattacgagt

SEQ ID NO: 201769 - DNA, 25 bp, SARS Virus
ggactatctcgatacattacgagta

SEQ ID NO: 201770 - DNA, 25 bp, SARS Virus
gactatctcgagtcattacgagtaa

SEQ ID NO: 201771 - DNA, 25 bp, SARS Virus
actatctcgagatattacgagtaat

SEQ ID NO: 201772 - DNA, 25 bp, SARS Virus
ctatctcgagactttacgagtaata

SEQ ID NO: 201773 - DNA, 25 bp, SARS Virus
tatctcgagacattacgagtaataa

SEQ ID NO: 201774 - DNA, 25 bp, SARS Virus
atctcgagacattacgagtaataat

SEQ ID NO: 201775 - DNA, 25 bp, SARS Virus
tctcgagacatttcgagtaataatt

SEQ ID NO: 201776 - DNA, 25 bp, SARS Virus
ctcgagacattatgagtaataattc

SEQ ID NO: 201777 - DNA, 25 bp, SARS Virus
tcgagacattactagtaataattct

SEQ ID NO: 201778 - DNA, 25 bp, SARS Virus
cgagacattacgtgtaataattctt

SEQ ID NO: 201779 - DNA, 25 bp, SARS Virus
gagacattacgattaataattcttg

SEQ ID NO: 201780 - DNA, 25 bp, SARS Virus
agacattacgagtaataattcttgg

SEQ ID NO: 201781 - DNA, 25 bp, SARS Virus
gacattacgagttataattcttggg

SEQ ID NO: 201782 - DNA, 25 bp, SARS Virus
acattacgagtattaattcttgggt

SEQ ID NO: 201783 - DNA, 25 bp, SARS Virus
cattacgagtaataattcttgggta

SEQ ID NO: 201784 - DNA, 25 bp, SARS Virus
attacgagtaattattcttgggtag

SEQ ID NO: 201785 - DNA, 25 bp, SARS Virus
ttacgagtaatatttcttgggtaga

SEQ ID NO: 201786 - DNA, 25 bp, SARS Virus
tacgagtaataattcttgggtagat

SEQ ID NO: 201787 - DNA, 25 bp, SARS Virus
acgagtaataattcttgggtagatg

SEQ ID NO: 201788 - DNA, 25 bp, SARS Virus
cgagtaataatttttgggtagatgg

SEQ ID NO: 201789 - DNA, 25 bp, SARS Virus
gagtaataattcttgggtagatggt

SEQ ID NO: 201790 - DNA, 25 bp, SARS Virus
agtaataattcttgggtagatggtg

SEQ ID NO: 201791 - DNA, 25 bp, SARS Virus
gtaataattctttggtagatggtga

SEQ ID NO: 201792 - DNA, 25 bp, SARS Virus
taataattcttgtgtagatggtgac

SEQ ID NO: 201793 - DNA, 25 bp, SARS Virus
aataattcttggttagatggtgacc

SEQ ID NO: 201794 - DNA, 25 bp, SARS Virus
ataattcttgggtagatggtgacca

SEQ ID NO: 201795 - DNA, 25 bp, SARS Virus
taattcttgggttgatggtgaccat

SEQ ID NO: 201796 - DNA, 25 bp, SARS Virus
aattcttgggtatatggtgaccatc

SEQ ID NO: 201797 - DNA, 25 bp, SARS Virus
attcttgggtagttggtgaccatct

SEQ ID NO: 201798 - DNA, 25 bp, SARS Virus
ttcttgggtagatggtgaccatcta

SEQ ID NO: 201799 - DNA, 25 bp, SARS Virus
tcttgggtagattgtgaccatctat

SEQ ID NO: 201800 - DNA, 25 bp, SARS Virus
cttgggtagatgttgaccatctatc

SEQ ID NO: 201801 - DNA, 25 bp, SARS Virus
ttgggtagatggtgaccatctatcc

SEQ ID NO: 201802 - DNA, 25 bp, SARS Virus
tgggtagatggttaccatctatccg

SEQ ID NO: 201803 - DNA, 25 bp, SARS Virus
gggtagatggtgtccatctatccgt

SEQ ID NO: 201804 - DNA, 25 bp, SARS Virus
ggtagatggtgatcatctatccgtt

SEQ ID NO: 201805 - DNA, 25 bp, SARS Virus
gtagatggtgactatctatccgttt

SEQ ID NO: 201806 - DNA, 25 bp, SARS Virus
tagatggtgaccttctatccgttta

SEQ ID NO: 201807 - DNA, 25 bp, SARS Virus
agatggtgaccatctatccgtttat

SEQ ID NO: 201808 - DNA, 25 bp, SARS Virus
gatggtgaccatttatccgtttatg

SEQ ID NO: 201809 - DNA, 25 bp, SARS Virus
atggtgaccatctatccgtttatgg

SEQ ID NO: 201810 - DNA, 25 bp, SARS Virus
tggtgaccatctttccgtttatgga

SEQ ID NO: 201811 - DNA, 25 bp, SARS Virus
ggtgaccatctatccgtttatggat

SEQ ID NO: 201812 - DNA, 25 bp, SARS Virus
gtgaccatctattcgtttatggatg

SEQ ID NO: 201813 - DNA, 25 bp, SARS Virus
tgaccatctatctgtttatggatga

SEQ ID NO: 201814 - DNA, 25 bp, SARS Virus
gaccatctatccttttatggatgaa

SEQ ID NO: 201815 - DNA, 25 bp, SARS Virus
accatctatccgtttatggatgaag

SEQ ID NO: 201816 - DNA, 25 bp, SARS Virus
ccatctatccgtttatggatgaaga

SEQ ID NO: 201817 - DNA, 25 bp, SARS Virus
catctatccgtttatggatgaagac

SEQ ID NO: 201818 - DNA, 25 bp, SARS Virus
atctatccgtttttggatgaagact

SEQ ID NO: 201819 - DNA, 25 bp, SARS Virus
tctatccgtttatggatgaagactg

SEQ ID NO: 201820 - DNA, 25 bp, SARS Virus
ctatccgtttattgatgaagactgg

SEQ ID NO: 201821 - DNA, 25 bp, SARS Virus
tatccgtttatgtatgaagactgga

SEQ ID NO: 201822 - DNA, 25 bp, SARS Virus
atccgtttatggttgaagactggaa

SEQ ID NO: 201823 - DNA, 25 bp, SARS Virus
tccgtttatggatgaagactggaaa

SEQ ID NO: 201824 - DNA, 25 bp, SARS Virus
ccgtttatggattaagactggaaag

SEQ ID NO: 201825 - DNA, 25 bp, SARS Virus
cgtttatggatgtagactggaaagc

SEQ ID NO: 201826 - DNA, 25 bp, SARS Virus
gtttatggatgatgactggaaagcg

SEQ ID NO: 201827 - DNA, 25 bp, SARS Virus
tttatggatgaatactggaaagcgt

SEQ ID NO: 201828 - DNA, 25 bp, SARS Virus
ttatggatgaagtctggaaagcgta

SEQ ID NO: 201829 - DNA, 25 bp, SARS Virus
tatggatgaagattggaaagcgtac

SEQ ID NO: 201830 - DNA, 25 bp, SARS Virus
atggatgaagactggaaagcgtaca

SEQ ID NO: 201831 - DNA, 25 bp, SARS Virus
tggatgaagacttgaaagcgtacat

SEQ ID NO: 201832 - DNA, 25 bp, SARS Virus
ggatgaagactgtaaagcgtacatg

SEQ ID NO: 201833 - DNA, 25 bp, SARS Virus
gatgaagactggtaagcgtacatgg

SEQ ID NO: 201834 - DNA, 25 bp, SARS Virus
atgaagactggatagcgtacatggt

SEQ ID NO: 201835 - DNA, 25 bp, SARS Virus
tgaagactggaatgcgtacatggta

SEQ ID NO: 201836 - DNA, 25 bp, SARS Virus
gaagactggaaatcgtacatggtac

SEQ ID NO: 201837 - DNA, 25 bp, SARS Virus
aagactggaaagtgtacatggtaca

SEQ ID NO: 201838 - DNA, 25 bp, SARS Virus
agactggaaagcttacatggtacag

SEQ ID NO: 201839 - DNA, 25 bp, SARS Virus
gactggaaagcgtacatggtacaga

SEQ ID NO: 201840 - DNA, 25 bp, SARS Virus
actggaaagcgttcatggtacagat

SEQ ID NO: 201841 - DNA, 25 bp, SARS Virus
ctggaaagcgtatatggtacagatg

SEQ ID NO: 201842 - DNA, 25 bp, SARS Virus
tggaaagcgtacttggtacagatgt

SEQ ID NO: 201843 - DNA, 25 bp, SARS Virus
ggaaagcgtacatggtacagatgtc

SEQ ID NO: 201844 - DNA, 25 bp, SARS Virus
gaaagcgtacattgtacagatgtca

SEQ ID NO: 201845 - DNA, 25 bp, SARS Virus
aaagcgtacatgttacagatgtcat

SEQ ID NO: 201846 - DNA, 25 bp, SARS Virus
aagcgtacatggtacagatgtcatg

SEQ ID NO: 201847 - DNA, 25 bp, SARS Virus
agcgtacatggttcagatgtcatga

SEQ ID NO: 201848 - DNA, 25 bp, SARS Virus
gcgtacatggtatagatgtcatgag

SEQ ID NO: 201849 - DNA, 25 bp, SARS Virus
cgtacatggtactgatgtcatgagt

SEQ ID NO: 201850 - DNA, 25 bp, SARS Virus
gtacatggtacatatgtcatgagtc

SEQ ID NO: 201851 - DNA, 25 bp, SARS Virus
tacatggtacagttgtcatgagtcg

SEQ ID NO: 201852 - DNA, 25 bp, SARS Virus
acatggtacagatgtcatgagtcgt

SEQ ID NO: 201853 - DNA, 25 bp, SARS Virus
catggtacagatttcatgagtcgta

SEQ ID NO: 201854 - DNA, 25 bp, SARS Virus
atggtacagatgtcatgagtcgtag

SEQ ID NO: 201855 - DNA, 25 bp, SARS Virus
tggtacagatgttatgagtcgtagt

SEQ ID NO: 201856 - DNA, 25 bp, SARS Virus
ggtacagatgtcttgagtcgtagtt

SEQ ID NO: 201857 - DNA, 25 bp, SARS Virus
gtacagatgtcatgagtcgtagttt

SEQ ID NO: 201858 - DNA, 25 bp, SARS Virus
tacagatgtcattagtcgtagtttt

SEQ ID NO: 201859 - DNA, 25 bp, SARS Virus
acagatgtcatgtgtcgtagttttc

SEQ ID NO: 201860 - DNA, 25 bp, SARS Virus
cagatgtcatgattcgtagttttca

SEQ ID NO: 201861 - DNA, 25 bp, SARS Virus
agatgtcatgagtcgtagttttcaa

SEQ ID NO: 201862 - DNA, 25 bp, SARS Virus
gatgtcatgagttgtagttttcaac

SEQ ID NO: 201863 - DNA, 25 bp, SARS Virus
atgtcatgagtcttagttttcaaca

SEQ ID NO: 201864 - DNA, 25 bp, SARS Virus
tgtcatgagtcgtagttttcaacaa

SEQ ID NO: 201865 - DNA, 25 bp, SARS Virus
gtcatgagtcgttgttttcaacaat

SEQ ID NO: 201866 - DNA, 25 bp, SARS Virus
tcatgagtcgtatttttcaacaatg

SEQ ID NO: 201867 - DNA, 25 bp, SARS Virus
catgagtcgtagttttcaacaatga

SEQ ID NO: 201868 - DNA, 25 bp, SARS Virus
atgagtcgtagttttcaacaatgat

SEQ ID NO: 201869 - DNA, 25 bp, SARS Virus
tgagtcgtagttttcaacaatgatg

SEQ ID NO: 201870 - DNA, 25 bp, SARS Virus
gagtcgtagttttcaacaatgatga

SEQ ID NO: 201871 - DNA, 25 bp, SARS Virus
agtcgtagtttttaacaatgatgag

SEQ ID NO: 201872 - DNA, 25 bp, SARS Virus
gtcgtagttttctacaatgatgaga

SEQ ID NO: 201873 - DNA, 25 bp, SARS Virus
tcgtagttttcatcaatgatgagat

SEQ ID NO: 201874 - DNA, 25 bp, SARS Virus
cgtagttttcaataatgatgagatt

SEQ ID NO: 201875 - DNA, 25 bp, SARS Virus
gtagttttcaactatgatgagattg

SEQ ID NO: 201876 - DNA, 25 bp, SARS Virus
tagttttcaacattgatgagattgt

SEQ ID NO: 201877 - DNA, 25 bp, SARS Virus
agttttcaacaatgatgagattgtc

SEQ ID NO: 201878 - DNA, 25 bp, SARS Virus
gttttcaacaattatgagattgtct

SEQ ID NO: 201879 - DNA, 25 bp, SARS Virus
ttttcaacaatgttgagattgtctt

SEQ ID NO: 201880 - DNA, 25 bp, SARS Virus
tttcaacaatgatgagattgtcttg

SEQ ID NO: 201881 - DNA, 25 bp, SARS Virus
ttcaacaatgattagattgtcttgg

SEQ ID NO: 201882 - DNA, 25 bp, SARS Virus
tcaacaatgatgtgattgtcttggg

SEQ ID NO: 201883 - DNA, 25 bp, SARS Virus
caacaatgatgatattgtcttggga

SEQ ID NO: 201884 - DNA, 25 bp, SARS Virus
aacaatgatgagtttgtcttgggag

SEQ ID NO: 201885 - DNA, 25 bp, SARS Virus
acaatgatgagattgtcttgggagg

SEQ ID NO: 201886 - DNA, 25 bp, SARS Virus
caatgatgagattgtcttgggaggt

SEQ ID NO: 201887 - DNA, 25 bp, SARS Virus
aatgatgagattttcttgggaggtc

SEQ ID NO: 201888 - DNA, 25 bp, SARS Virus
atgatgagattgtcttgggaggtcc

SEQ ID NO: 201889 - DNA, 25 bp, SARS Virus
tgatgagattgttttgggaggtcca

SEQ ID NO: 201890 - DNA, 25 bp, SARS Virus
gatgagattgtcttgggaggtccat

SEQ ID NO: 201891 - DNA, 25 bp, SARS Virus
atgagattgtcttgggaggtccatt

SEQ ID NO: 201892 - DNA, 25 bp, SARS Virus
tgagattgtctttggaggtccattc

SEQ ID NO: 201893 - DNA, 25 bp, SARS Virus
gagattgtcttgtgaggtccattca

SEQ ID NO: 201894 - DNA, 25 bp, SARS Virus
agattgtcttggtaggtccattcac

SEQ ID NO: 201895 - DNA, 25 bp, SARS Virus
gattgtcttgggtggtccattcaca

SEQ ID NO: 201896 - DNA, 25 bp, SARS Virus
attgtcttgggatgtccattcacaa

SEQ ID NO: 201897 - DNA, 25 bp, SARS Virus
ttgtcttgggagttccattcacaat

SEQ ID NO: 201898 - DNA, 25 bp, SARS Virus
tgtcttgggaggtccattcacaatc

SEQ ID NO: 201899 - DNA, 25 bp, SARS Virus
gtcttgggaggttcattcacaatcc

SEQ ID NO: 201900 - DNA, 25 bp, SARS Virus
tcttgggaggtctattcacaatcct

SEQ ID NO: 201901 - DNA, 25 bp, SARS Virus
cttgggaggtcctttcacaatcctt

SEQ ID NO: 201902 - DNA, 25 bp, SARS Virus
ttgggaggtccattcacaatccttt

SEQ ID NO: 201903 - DNA, 25 bp, SARS Virus
tgggaggtccattcacaatcctttg

SEQ ID NO: 201904 - DNA, 25 bp, SARS Virus
gggaggtccatttacaatcctttga

SEQ ID NO: 201905 - DNA, 25 bp, SARS Virus
ggaggtccattctcaatcctttgac

SEQ ID NO: 201906 - DNA, 25 bp, SARS Virus
gaggtccattcataatcctttgaca

SEQ ID NO: 201907 - DNA, 25 bp, SARS Virus
aggtccattcactatcctttgacat

SEQ ID NO: 201908 - DNA, 25 bp, SARS Virus
ggtccattcacattcctttgacata

SEQ ID NO: 201909 - DNA, 25 bp, SARS Virus
gtccattcacaatcctttgacatac

SEQ ID NO: 201910 - DNA, 25 bp, SARS Virus
tccattcacaattctttgacatact

SEQ ID NO: 201911 - DNA, 25 bp, SARS Virus
ccattcacaatcttttgacatacta

SEQ ID NO: 201912 - DNA, 25 bp, SARS Virus
cattcacaatcctttgacatactac

SEQ ID NO: 201913 - DNA, 25 bp, SARS Virus
attcacaatcctttgacatactacc

SEQ ID NO: 201914 - DNA, 25 bp, SARS Virus
ttcacaatcctttgacatactacct

SEQ ID NO: 201915 - DNA, 25 bp, SARS Virus
tcacaatccttttacatactacctt

SEQ ID NO: 201916 - DNA, 25 bp, SARS Virus
cacaatcctttgtcatactaccttg

SEQ ID NO: 201917 - DNA, 25 bp, SARS Virus
acaatcctttgatatactaccttgg

SEQ ID NO: 201918 - DNA, 25 bp, SARS Virus
caatcctttgacttactaccttggt

SEQ ID NO: 201919 - DNA, 25 bp, SARS Virus
aatcctttgacatactaccttggta

SEQ ID NO: 201920 - DNA, 25 bp, SARS Virus
atcctttgacattctaccttggtag

SEQ ID NO: 201921 - DNA, 25 bp, SARS Virus
tcctttgacatattaccttggtagg

SEQ ID NO: 201922 - DNA, 25 bp, SARS Virus
cctttgacatactaccttggtaggt

SEQ ID NO: 201923 - DNA, 25 bp, SARS Virus
ctttgacatacttccttggtaggta

SEQ ID NO: 201924 - DNA, 25 bp, SARS Virus
tttgacatactatcttggtaggtat

SEQ ID NO: 201925 - DNA, 25 bp, SARS Virus
ttgacatactactttggtaggtatt

SEQ ID NO: 201926 - DNA, 25 bp, SARS Virus
tgacatactaccttggtaggtattc

SEQ ID NO: 201927 - DNA, 25 bp, SARS Virus
gacatactaccttggtaggtattcg

SEQ ID NO: 201928 - DNA, 25 bp, SARS Virus
acatactacctttgtaggtattcgt

SEQ ID NO: 201929 - DNA, 25 bp, SARS Virus
catactaccttgttaggtattcgtg

SEQ ID NO: 201930 - DNA, 25 bp, SARS Virus
atactaccttggtaggtattcgtgt

SEQ ID NO: 201931 - DNA, 25 bp, SARS Virus
tactaccttggttggtattcgtgta

SEQ ID NO: 201932 - DNA, 25 bp, SARS Virus
actaccttggtatgtattcgtgtat

SEQ ID NO: 201933 - DNA, 25 bp, SARS Virus
ctaccttggtagttattcgtgtatt

SEQ ID NO: 201934 - DNA, 25 bp, SARS Virus
taccttggtaggtattcgtgtattg

SEQ ID NO: 201935 - DNA, 25 bp, SARS Virus
accttggtaggttttcgtgtattgc

SEQ ID NO: 201936 - DNA, 25 bp, SARS Virus
ccttggtaggtattcgtgtattgct

SEQ ID NO: 201937 - DNA, 25 bp, SARS Virus
cttggtaggtattcgtgtattgctc

SEQ ID NO: 201938 - DNA, 25 bp, SARS Virus
ttggtaggtatttgtgtattgctca

SEQ ID NO: 201939 - DNA, 25 bp, SARS Virus
tggtaggtattcttgtattgctcac

SEQ ID NO: 201940 - DNA, 25 bp, SARS Virus
ggtaggtattcgtgtattgctcaca

SEQ ID NO: 201941 - DNA, 25 bp, SARS Virus
gtaggtattcgtttattgctcacag

SEQ ID NO: 201942 - DNA, 25 bp, SARS Virus
taggtattcgtgtattgctcacaga

SEQ ID NO: 201943 - DNA, 25 bp, SARS Virus
aggtattcgtgttttgctcacagac

SEQ ID NO: 201944 - DNA, 25 bp, SARS Virus
ggtattcgtgtattgctcacagacc

SEQ ID NO: 201945 - DNA, 25 bp, SARS Virus
gtattcgtgtattgctcacagacct

SEQ ID NO: 201946 - DNA, 25 bp, SARS Virus
tattcgtgtatttctcacagacctg

SEQ ID NO: 201947 - DNA, 25 bp, SARS Virus
attcgtgtattgttcacagacctgc

SEQ ID NO: 201948 - DNA, 25 bp, SARS Virus
ttcgtgtattgctcacagacctgct

SEQ ID NO: 201949 - DNA, 25 bp, SARS Virus
tcgtgtattgcttacagacctgctt

SEQ ID NO: 201950 - DNA, 25 bp, SARS Virus
cgtgtattgctctcagacctgcttc

SEQ ID NO: 201951 - DNA, 25 bp, SARS Virus
gtgtattgctcatagacctgcttcg

SEQ ID NO: 201952 - DNA, 25 bp, SARS Virus
tgtattgctcactgacctgcttcga

SEQ ID NO: 201953 - DNA, 25 bp, SARS Virus
gtattgctcacatacctgcttcgag

SEQ ID NO: 201954 - DNA, 25 bp, SARS Virus
tattgctcacagtcctgcttcgagt

SEQ ID NO: 201955 - DNA, 25 bp, SARS Virus
attgctcacagatctgcttcgagtg

SEQ ID NO: 201956 - DNA, 25 bp, SARS Virus
ttgctcacagacttgcttcgagtga

SEQ ID NO: 201957 - DNA, 25 bp, SARS Virus
tgctcacagacctgcttcgagtgat

SEQ ID NO: 201958 - DNA, 25 bp, SARS Virus
gctcacagaccttcttcgagtgata

SEQ ID NO: 201959 - DNA, 25 bp, SARS Virus
ctcacagacctgtttcgagtgatat

SEQ ID NO: 201960 - DNA, 25 bp, SARS Virus
tcacagacctgcttcgagtgatatt

SEQ ID NO: 201961 - DNA, 25 bp, SARS Virus
cacagacctgcttcgagtgatattc

SEQ ID NO: 201962 - DNA, 25 bp, SARS Virus
acagacctgctttgagtgatattct

SEQ ID NO: 201963 - DNA, 25 bp, SARS Virus
cagacctgcttctagtgatattctt

SEQ ID NO: 201964 - DNA, 25 bp, SARS Virus
agacctgcttcgtgtgatattcttt

SEQ ID NO: 201965 - DNA, 25 bp, SARS Virus
gacctgcttcgattgatattcttta

SEQ ID NO: 201966 - DNA, 25 bp, SARS Virus
acctgcttcgagtgatattctttat

SEQ ID NO: 201967 - DNA, 25 bp, SARS Virus
cctgcttcgagttatattctttatc

SEQ ID NO: 201968 - DNA, 25 bp, SARS Virus
ctgcttcgagtgttattctttatct

SEQ ID NO: 201969 - DNA, 25 bp, SARS Virus
tgcttcgagtgatattctttatctt

SEQ ID NO: 201970 - DNA, 25 bp, SARS Virus
gcttcgagtgattttctttatcttg

SEQ ID NO: 201971 - DNA, 25 bp, SARS Virus
cttcgagtgatattctttatcttgg

SEQ ID NO: 201972 - DNA, 25 bp, SARS Virus
ttcgagtgatattctttatcttggg

SEQ ID NO: 201973 - DNA, 25 bp, SARS Virus
tcgagtgatattttttatcttggga

SEQ ID NO: 201974 - DNA, 25 bp, SARS Virus
cgagtgatattctttatcttgggag

SEQ ID NO: 201975 - DNA, 25 bp, SARS Virus
gagtgatattctttatcttgggaga

SEQ ID NO: 201976 - DNA, 25 bp, SARS Virus
agtgatattctttatcttgggagat

SEQ ID NO: 201977 - DNA, 25 bp, SARS Virus
gtgatattctttttcttgggagatc

SEQ ID NO: 201978 - DNA, 25 bp, SARS Virus
tgatattctttatcttgggagatcg

SEQ ID NO: 201979 - DNA, 25 bp, SARS Virus
gatattctttattttgggagatcgt

SEQ ID NO: 201980 - DNA, 25 bp, SARS Virus
atattctttatcttgggagatcgtt

SEQ ID NO: 201981 - DNA, 25 bp, SARS Virus
tattctttatcttgggagatcgttt

SEQ ID NO: 201982 - DNA, 25 bp, SARS Virus
attctttatctttggagatcgttta

SEQ ID NO: 201983 - DNA, 25 bp, SARS Virus
ttctttatcttgtgagatcgtttaa

SEQ ID NO: 201984 - DNA, 25 bp, SARS Virus
tctttatcttggtagatcgtttaat

SEQ ID NO: 201985 - DNA, 25 bp, SARS Virus
ctttatcttgggtgatcgtttaatc

SEQ ID NO: 201986 - DNA, 25 bp, SARS Virus
tttatcttgggatatcgtttaatca

SEQ ID NO: 201987 - DNA, 25 bp, SARS Virus
ttatcttgggagttcgtttaatcac

SEQ ID NO: 201988 - DNA, 25 bp, SARS Virus
tatcttgggagatcgtttaatcaca

SEQ ID NO: 201989 - DNA, 25 bp, SARS Virus
atcttgggagattgtttaatcacag

SEQ ID NO: 201990 - DNA, 25 bp, SARS Virus
tcttgggagatcttttaatcacagt

SEQ ID NO: 201991 - DNA, 25 bp, SARS Virus
cttgggagatcgtttaatcacagta

SEQ ID NO: 201992 - DNA, 25 bp, SARS Virus
ttgggagatcgtttaatcacagtat

SEQ ID NO: 201993 - DNA, 25 bp, SARS Virus
tgggagatcgtttaatcacagtatt

SEQ ID NO: 201994 - DNA, 25 bp, SARS Virus
gggagatcgttttatcacagtattg

SEQ ID NO: 201995 - DNA, 25 bp, SARS Virus
ggagatcgtttattcacagtattgt

SEQ ID NO: 201996 - DNA, 25 bp, SARS Virus
gagatcgtttaatcacagtattgtt

SEQ ID NO: 201997 - DNA, 25 bp, SARS Virus
agatcgtttaattacagtattgtta

SEQ ID NO: 201998 - DNA, 25 bp, SARS Virus
gatcgtttaatctcagtattgttat

SEQ ID NO: 201999 - DNA, 25 bp, SARS Virus
atcgtttaatcatagtattgttata

SEQ ID NO: 202000 - DNA, 25 bp, SARS Virus
tcgtttaatcactgtattgttatac

SEQ ID NO: 202001 - DNA, 25 bp, SARS Virus
cgtttaatcacattattgttatacc

SEQ ID NO: 202002 - DNA, 25 bp, SARS Virus
gtttaatcacagtattgttataccg

SEQ ID NO: 202003 - DNA, 25 bp, SARS Virus
tttaatcacagttttgttataccgt

SEQ ID NO: 202004 - DNA, 25 bp, SARS Virus
ttaatcacagtattgttataccgtg

SEQ ID NO: 202005 - DNA, 25 bp, SARS Virus
taatcacagtattgttataccgtgt

SEQ ID NO: 202006 - DNA, 25 bp, SARS Virus
aatcacagtatttttataccgtgtc

SEQ ID NO: 202007 - DNA, 25 bp, SARS Virus
atcacagtattgttataccgtgtcc

SEQ ID NO: 202008 - DNA, 25 bp, SARS Virus
tcacagtattgttataccgtgtcca

SEQ ID NO: 202009 - DNA, 25 bp, SARS Virus
cacagtattgttttaccgtgtccaa

SEQ ID NO: 202010 - DNA, 25 bp, SARS Virus
acagtattgttataccgtgtccaaa

SEQ ID NO: 202011 - DNA, 25 bp, SARS Virus
cagtattgttattccgtgtccaaac

SEQ ID NO: 202012 - DNA, 25 bp, SARS Virus
agtattgttatatcgtgtccaaacg

SEQ ID NO: 202013 - DNA, 25 bp, SARS Virus
gtattgttatactgtgtccaaacgg

SEQ ID NO: 202014 - DNA, 25 bp, SARS Virus
tattgttataccttgtccaaacggg

SEQ ID NO: 202015 - DNA, 25 bp, SARS Virus
attgttataccgtgtccaaacgggt

SEQ ID NO: 202016 - DNA, 25 bp, SARS Virus
ttgttataccgtttccaaacgggta

SEQ ID NO: 202017 - DNA, 25 bp, SARS Virus
tgttataccgtgtccaaacgggtat

SEQ ID NO: 202018 - DNA, 25 bp, SARS Virus
gttataccgtgttcaaacgggtatc

SEQ ID NO: 202019 - DNA, 25 bp, SARS Virus
ttataccgtgtctaaacgggtatcg

SEQ ID NO: 202020 - DNA, 25 bp, SARS Virus
tataccgtgtcctaacgggtatcgt

SEQ ID NO: 202021 - DNA, 25 bp, SARS Virus
ataccgtgtccatacgggtatcgta

SEQ ID NO: 202022 - DNA, 25 bp, SARS Virus
taccgtgtccaatcgggtatcgtag

SEQ ID NO: 202023 - DNA, 25 bp, SARS Virus
accgtgtccaaatgggtatcgtagg

SEQ ID NO: 202024 - DNA, 25 bp, SARS Virus
ccgtgtccaaactggtatcgtagga

SEQ ID NO: 202025 - DNA, 25 bp, SARS Virus
cgtgtccaaacgtgtatcgtaggaa

SEQ ID NO: 202026 - DNA, 25 bp, SARS Virus
gtgtccaaacggttatcgtaggaat

SEQ ID NO: 202027 - DNA, 25 bp, SARS Virus
tgtccaaacgggtatcgtaggaatt

SEQ ID NO: 202028 - DNA, 25 bp, SARS Virus
gtccaaacgggtttcgtaggaattt

SEQ ID NO: 202029 - DNA, 25 bp, SARS Virus
tccaaacgggtatcgtaggaatttt

SEQ ID NO: 202030 - DNA, 25 bp, SARS Virus
ccaaacgggtattgtaggaattttt

SEQ ID NO: 202031 - DNA, 25 bp, SARS Virus
caaacgggtatcttaggaattttta

SEQ ID NO: 202032 - DNA, 25 bp, SARS Virus
aaacgggtatcgtaggaatttttaa

SEQ ID NO: 202033 - DNA, 25 bp, SARS Virus
aacgggtatcgttggaatttttaac

SEQ ID NO: 202034 - DNA, 25 bp, SARS Virus
acgggtatcgtatgaatttttaaca

SEQ ID NO: 202035 - DNA, 25 bp, SARS Virus
cgggtatcgtagtaatttttaacat

SEQ ID NO: 202036 - DNA, 25 bp, SARS Virus
gggtatcgtaggtatttttaacatg

SEQ ID NO: 202037 - DNA, 25 bp, SARS Virus
ggtatcgtaggattttttaacatgt

SEQ ID NO: 202038 - DNA, 25 bp, SARS Virus
gtatcgtaggaatttttaacatgtg

SEQ ID NO: 202039 - DNA, 25 bp, SARS Virus
tatcgtaggaatttttaacatgtga

SEQ ID NO: 202040 - DNA, 25 bp, SARS Virus
atcgtaggaatttttaacatgtgag

SEQ ID NO: 202041 - DNA, 25 bp, SARS Virus
tcgtaggaatttttaacatgtgagt

SEQ ID NO: 202042 - DNA, 25 bp, SARS Virus
cgtaggaatttttaacatgtgagtc

SEQ ID NO: 202043 - DNA, 25 bp, SARS Virus
gtaggaattttttacatgtgagtcg

SEQ ID NO: 202044 - DNA, 25 bp, SARS Virus
taggaatttttatcatgtgagtcgt

SEQ ID NO: 202045 - DNA, 25 bp, SARS Virus
aggaatttttaatatgtgagtcgtc

SEQ ID NO: 202046 - DNA, 25 bp, SARS Virus
ggaatttttaacttgtgagtcgtcg

SEQ ID NO: 202047 - DNA, 25 bp, SARS Virus
gaatttttaacatgtgagtcgtcgt

SEQ ID NO: 202048 - DNA, 25 bp, SARS Virus
aatttttaacatttgagtcgtcgtt

SEQ ID NO: 202049 - DNA, 25 bp, SARS Virus
atttttaacatgtgagtcgtcgttc

SEQ ID NO: 202050 - DNA, 25 bp, SARS Virus
tttttaacatgttagtcgtcgttct

SEQ ID NO: 202051 - DNA, 25 bp, SARS Virus
ttttaacatgtgtgtcgtcgttctt

SEQ ID NO: 202052 - DNA, 25 bp, SARS Virus
tttaacatgtgattcgtcgttcttg

SEQ ID NO: 202053 - DNA, 25 bp, SARS Virus
ttaacatgtgagtcgtcgttcttgc

SEQ ID NO: 202054 - DNA, 25 bp, SARS Virus
taacatgtgagttgtcgttcttgcg

SEQ ID NO: 202055 - DNA, 25 bp, SARS Virus
aacatgtgagtcttcgttcttgcgt

SEQ ID NO: 202056 - DNA, 25 bp, SARS Virus
acatgtgagtcgtcgttcttgcgtt

SEQ ID NO: 202057 - DNA, 25 bp, SARS Virus
catgtgagtcgttgttcttgcgttc

SEQ ID NO: 202058 - DNA, 25 bp, SARS Virus
atgtgagtcgtctttcttgcgttcg

SEQ ID NO: 202059 - DNA, 25 bp, SARS Virus
tgtgagtcgtcgttcttgcgttcgt

SEQ ID NO: 202060 - DNA, 25 bp, SARS Virus
gtgagtcgtcgttcttgcgttcgtc

SEQ ID NO: 202061 - DNA, 25 bp, SARS Virus
tgagtcgtcgtttttgcgttcgtct

SEQ ID NO: 202062 - DNA, 25 bp, SARS Virus
gagtcgtcgttcttgcgttcgtctc

SEQ ID NO: 202063 - DNA, 25 bp, SARS Virus
agtcgtcgttcttgcgttcgtctcc

SEQ ID NO: 202064 - DNA, 25 bp, SARS Virus
gtcgtcgttctttcgttcgtctcca

SEQ ID NO: 202065 - DNA, 25 bp, SARS Virus
tcgtcgttcttgagttcgtctccat

SEQ ID NO: 202066 - DNA, 25 bp, SARS Virus
cgtcgttcttgcattcgtctccatc

SEQ ID NO: 202067 - DNA, 25 bp, SARS Virus
gtcgttcttgcgatcgtctccatcg

SEQ ID NO: 202068 - DNA, 25 bp, SARS Virus
tcgttcttgcgtacgtctccatcgt

SEQ ID NO: 202069 - DNA, 25 bp, SARS Virus
cgttcttgcgttagtctccatcgtt

SEQ ID NO: 202070 - DNA, 25 bp, SARS Virus
gttcttgcgttcatctccatcgttt

SEQ ID NO: 202071 - DNA, 25 bp, SARS Virus
ttcttgcgttcgactccatcgtttt

SEQ ID NO: 202072 - DNA, 25 bp, SARS Virus
tcttgcgttcgtatccatcgtttta

SEQ ID NO: 202073 - DNA, 25 bp, SARS Virus
cttgcgttcgtcaccatcgttttag

SEQ ID NO: 202074 - DNA, 25 bp, SARS Virus
ttgcgttcgtctacatcgttttagt

SEQ ID NO: 202075 - DNA, 25 bp, SARS Virus
tgcgttcgtctcaatcgttttagtg

SEQ ID NO: 202076 - DNA, 25 bp, SARS Virus
gcgttcgtctccatcgttttagtga

SEQ ID NO: 202077 - DNA, 25 bp, SARS Virus
cgttcgtctccaacgttttagtgat

SEQ ID NO: 202078 - DNA, 25 bp, SARS Virus
gttcgtctccatagttttagtgata

SEQ ID NO: 202079 - DNA, 25 bp, SARS Virus
ttcgtctccatcattttagtgatat

SEQ ID NO: 202080 - DNA, 25 bp, SARS Virus
tcgtctccatcgatttagtgatatg

SEQ ID NO: 202081 - DNA, 25 bp, SARS Virus
cgtctccatcgtattagtgatatga

SEQ ID NO: 202082 - DNA, 25 bp, SARS Virus
gtctccatcgttatagtgatatgag

SEQ ID NO: 202083 - DNA, 25 bp, SARS Virus
tctccatcgtttaagtgatatgagt

SEQ ID NO: 202084 - DNA, 25 bp, SARS Virus
ctccatcgttttagtgatatgagtt

SEQ ID NO: 202085 - DNA, 25 bp, SARS Virus
tccatcgttttaatgatatgagtta

SEQ ID NO: 202086 - DNA, 25 bp, SARS Virus
ccatcgttttagagatatgagttac

SEQ ID NO: 202087 - DNA, 25 bp, SARS Virus
catcgttttagtaatatgagttact

SEQ ID NO: 202088 - DNA, 25 bp, SARS Virus
atcgttttagtgatatgagttactc

SEQ ID NO: 202089 - DNA, 25 bp, SARS Virus
tcgttttagtgaaatgagttactca

SEQ ID NO: 202090 - DNA, 25 bp, SARS Virus
cgttttagtgatatgagttactcaa

SEQ ID NO: 202091 - DNA, 25 bp, SARS Virus
gttttagtgataagagttactcaaa

SEQ ID NO: 202092 - DNA, 25 bp, SARS Virus
ttttagtgatataagttactcaaac

SEQ ID NO: 202093 - DNA, 25 bp, SARS Virus
tttagtgatatgagttactcaaacc

SEQ ID NO: 202094 - DNA, 25 bp, SARS Virus
ttagtgatatgaattactcaaacct

SEQ ID NO: 202095 - DNA, 25 bp, SARS Virus
tagtgatatgagatactcaaacctt

SEQ ID NO: 202096 - DNA, 25 bp, SARS Virus
agtgatatgagtaactcaaaccttc

SEQ ID NO: 202097 - DNA, 25 bp, SARS Virus
gtgatatgagttactcaaaccttcc

SEQ ID NO: 202098 - DNA, 25 bp, SARS Virus
tgatatgagttaatcaaaccttcca

SEQ ID NO: 202099 - DNA, 25 bp, SARS Virus
gatatgagttacacaaaccttccac

SEQ ID NO: 202100 - DNA, 25 bp, SARS Virus
atatgagttactaaaaccttccaca

SEQ ID NO: 202101 - DNA, 25 bp, SARS Virus
tatgagttactcaaaccttccacac

SEQ ID NO: 202102 - DNA, 25 bp, SARS Virus
atgagttactcaaaccttccacaca

SEQ ID NO: 202103 - DNA, 25 bp, SARS Virus
tgagttactcaaaccttccacacat

SEQ ID NO: 202104 - DNA, 25 bp, SARS Virus
gagttactcaaaacttccacacatc

SEQ ID NO: 202105 - DNA, 25 bp, SARS Virus
agttactcaaacattccacacatcg

SEQ ID NO: 202106 - DNA, 25 bp, SARS Virus
gttactcaaaccatccacacatcgt

SEQ ID NO: 202107 - DNA, 25 bp, SARS Virus
ttactcaaacctaccacacatcgtt

SEQ ID NO: 202108 - DNA, 25 bp, SARS Virus
tactcaaaccttacacacatcgttt

SEQ ID NO: 202109 - DNA, 25 bp, SARS Virus
actcaaaccttcaacacatcgttta

SEQ ID NO: 202110 - DNA, 25 bp, SARS Virus
ctcaaaccttccacacatcgtttac

SEQ ID NO: 202111 - DNA, 25 bp, SARS Virus
tcaaaccttccaaacatcgtttaca

SEQ ID NO: 202112 - DNA, 25 bp, SARS Virus
caaaccttccacacatcgtttacaa

SEQ ID NO: 202113 - DNA, 25 bp, SARS Virus
aaaccttccacaaatcgtttacaac

SEQ ID NO: 202114 - DNA, 25 bp, SARS Virus
aaccttccacacatcgtttacaacg

SEQ ID NO: 202115 - DNA, 25 bp, SARS Virus
accttccacacaacgtttacaacgg

SEQ ID NO: 202116 - DNA, 25 bp, SARS Virus
ccttccacacatagtttacaacggt

SEQ ID NO: 202117 - DNA, 25 bp, SARS Virus
cttccacacatcatttacaacggtt

SEQ ID NO: 202118 - DNA, 25 bp, SARS Virus
ttccacacatcgattacaacggttg

SEQ ID NO: 202119 - DNA, 25 bp, SARS Virus
tccacacatcgtatacaacggttgt

SEQ ID NO: 202120 - DNA, 25 bp, SARS Virus
ccacacatcgttaacaacggttgtc

SEQ ID NO: 202121 - DNA, 25 bp, SARS Virus
cacacatcgtttacaacggttgtcg

SEQ ID NO: 202122 - DNA, 25 bp, SARS Virus
acacatcgtttaaaacggttgtcgt

SEQ ID NO: 202123 - DNA, 25 bp, SARS Virus
cacatcgtttacaacggttgtcgtg

SEQ ID NO: 202124 - DNA, 25 bp, SARS Virus
acatcgtttacaacggttgtcgtga

SEQ ID NO: 202125 - DNA, 25 bp, SARS Virus
catcgtttacaaaggttgtcgtgat

SEQ ID NO: 202126 - DNA, 25 bp, SARS Virus
atcgtttacaacagttgtcgtgatt

SEQ ID NO: 202127 - DNA, 25 bp, SARS Virus
tcgtttacaacgattgtcgtgattt

SEQ ID NO: 202128 - DNA, 25 bp, SARS Virus
cgtttacaacggatgtcgtgatttt

SEQ ID NO: 202129 - DNA, 25 bp, SARS Virus
gtttacaacggtagtcgtgattttt

SEQ ID NO: 202130 - DNA, 25 bp, SARS Virus
tttacaacggttatcgtgatttttg

SEQ ID NO: 202131 - DNA, 25 bp, SARS Virus
ttacaacggttgacgtgatttttgt

SEQ ID NO: 202132 - DNA, 25 bp, SARS Virus
tacaacggttgtagtgatttttgtg

SEQ ID NO: 202133 - DNA, 25 bp, SARS Virus
acaacggttgtcatgatttttgtgc

SEQ ID NO: 202134 - DNA, 25 bp, SARS Virus
caacggttgtcgagatttttgtgct

SEQ ID NO: 202135 - DNA, 25 bp, SARS Virus
aacggttgtcgtaatttttgtgctc

SEQ ID NO: 202136 - DNA, 25 bp, SARS Virus
acggttgtcgtgatttttgtgctcc

SEQ ID NO: 202137 - DNA, 25 bp, SARS Virus
cggttgtcgtgaattttgtgctcca

SEQ ID NO: 202138 - DNA, 25 bp, SARS Virus
ggttgtcgtgatatttgtgctccat

SEQ ID NO: 202139 - DNA, 25 bp, SARS Virus
gttgtcgtgattattgtgctccatc

SEQ ID NO: 202140 - DNA, 25 bp, SARS Virus
ttgtcgtgatttatgtgctccatct

SEQ ID NO: 202141 - DNA, 25 bp, SARS Virus
tgtcgtgattttagtgctccatctt

SEQ ID NO: 202142 - DNA, 25 bp, SARS Virus
gtcgtgatttttatgctccatcttt

SEQ ID NO: 202143 - DNA, 25 bp, SARS Virus
tcgtgatttttgagctccatctttt

SEQ ID NO: 202144 - DNA, 25 bp, SARS Virus
cgtgatttttgtactccatctttta

SEQ ID NO: 202145 - DNA, 25 bp, SARS Virus
gtgatttttgtgatccatcttttac

SEQ ID NO: 202146 - DNA, 25 bp, SARS Virus
tgatttttgtgcaccatcttttacg

SEQ ID NO: 202147 - DNA, 25 bp, SARS Virus
gatttttgtgctacatcttttacgt

SEQ ID NO: 202148 - DNA, 25 bp, SARS Virus
atttttgtgctcaatcttttacgtt

SEQ ID NO: 202149 - DNA, 25 bp, SARS Virus
tttttgtgctccatcttttacgttc

SEQ ID NO: 202150 - DNA, 25 bp, SARS Virus
ttttgtgctccaacttttacgttct

SEQ ID NO: 202151 - DNA, 25 bp, SARS Virus
tttgtgctccatattttacgttctt

SEQ ID NO: 202152 - DNA, 25 bp, SARS Virus
ttgtgctccatcatttacgttcttc

SEQ ID NO: 202153 - DNA, 25 bp, SARS Virus
tgtgctccatctattacgttcttca

SEQ ID NO: 202154 - DNA, 25 bp, SARS Virus
gtgctccatcttatacgttcttcag

SEQ ID NO: 202155 - DNA, 25 bp, SARS Virus
tgctccatctttaacgttcttcagt

SEQ ID NO: 202156 - DNA, 25 bp, SARS Virus
gctccatcttttacgttcttcagtg

SEQ ID NO: 202157 - DNA, 25 bp, SARS Virus
ctccatcttttaagttcttcagtgg

SEQ ID NO: 202158 - DNA, 25 bp, SARS Virus
tccatcttttacattcttcagtggt

SEQ ID NO: 202159 - DNA, 25 bp, SARS Virus
ccatcttttacgatcttcagtggta

SEQ ID NO: 202160 - DNA, 25 bp, SARS Virus
catcttttacgtacttcagtggtaa

SEQ ID NO: 202161 - DNA, 25 bp, SARS Virus
atcttttacgttattcagtggtaac

SEQ ID NO: 202162 - DNA, 25 bp, SARS Virus
tcttttacgttcatcagtggtaact

SEQ ID NO: 202163 - DNA, 25 bp, SARS Virus
cttttacgttctacagtggtaacta

SEQ ID NO: 202164 - DNA, 25 bp, SARS Virus
ttttacgttcttaagtggtaactaa

SEQ ID NO: 202165 - DNA, 25 bp, SARS Virus
tttacgttcttcagtggtaactaac

SEQ ID NO: 202166 - DNA, 25 bp, SARS Virus
ttacgttcttcaatggtaactaacg

SEQ ID NO: 202167 - DNA, 25 bp, SARS Virus
tacgttcttcagaggtaactaacga

SEQ ID NO: 202168 - DNA, 25 bp, SARS Virus
acgttcttcagtagtaactaacgag

SEQ ID NO: 202169 - DNA, 25 bp, SARS Virus
cgttcttcagtgataactaacgaga

SEQ ID NO: 202170 - DNA, 25 bp, SARS Virus
gttcttcagtggaaactaacgagag

SEQ ID NO: 202171 - DNA, 25 bp, SARS Virus
ttcttcagtggtaactaacgagagt

SEQ ID NO: 202172 - DNA, 25 bp, SARS Virus
tcttcagtggtaactaacgagagtc

SEQ ID NO: 202173 - DNA, 25 bp, SARS Virus
cttcagtggtaaataacgagagtcg

SEQ ID NO: 202174 - DNA, 25 bp, SARS Virus
ttcagtggtaacaaacgagagtcgt

SEQ ID NO: 202175 - DNA, 25 bp, SARS Virus
tcagtggtaactaacgagagtcgtg

SEQ ID NO: 202176 - DNA, 25 bp, SARS Virus
cagtggtaactaacgagagtcgtgt

SEQ ID NO: 202177 - DNA, 25 bp, SARS Virus
agtggtaactaaagagagtcgtgtc

SEQ ID NO: 202178 - DNA, 25 bp, SARS Virus
gtggtaactaacaagagtcgtgtca

SEQ ID NO: 202179 - DNA, 25 bp, SARS Virus
tggtaactaacgagagtcgtgtcat

SEQ ID NO: 202180 - DNA, 25 bp, SARS Virus
ggtaactaacgaaagtcgtgtcatg

SEQ ID NO: 202181 - DNA, 25 bp, SARS Virus
gtaactaacgagagtcgtgtcatgg

SEQ ID NO: 202182 - DNA, 25 bp, SARS Virus
taactaacgagaatcgtgtcatggg

SEQ ID NO: 202183 - DNA, 25 bp, SARS Virus
aactaacgagagacgtgtcatgggc

SEQ ID NO: 202184 - DNA, 25 bp, SARS Virus
actaacgagagtagtgtcatgggcc

SEQ ID NO: 202185 - DNA, 25 bp, SARS Virus
ctaacgagagtcatgtcatgggcca

SEQ ID NO: 202186 - DNA, 25 bp, SARS Virus
taacgagagtcgagtcatgggccat

SEQ ID NO: 202187 - DNA, 25 bp, SARS Virus
aacgagagtcgtatcatgggccatt

SEQ ID NO: 202188 - DNA, 25 bp, SARS Virus
acgagagtcgtgacatgggccattc

SEQ ID NO: 202189 - DNA, 25 bp, SARS Virus
cgagagtcgtgtaatgggccattcg

SEQ ID NO: 202190 - DNA, 25 bp, SARS Virus
gagagtcgtgtcatgggccattcgg

SEQ ID NO: 202191 - DNA, 25 bp, SARS Virus
agagtcgtgtcaagggccattcggt

SEQ ID NO: 202192 - DNA, 25 bp, SARS Virus
gagtcgtgtcataggccattcggtc

SEQ ID NO: 202193 - DNA, 25 bp, SARS Virus
agtcgtgtcatgagccattcggtcc

SEQ ID NO: 202194 - DNA, 25 bp, SARS Virus
gtcgtgtcatggaccattcggtccg

SEQ ID NO: 202195 - DNA, 25 bp, SARS Virus
tcgtgtcatgggacattcggtccgt

SEQ ID NO: 202196 - DNA, 25 bp, SARS Virus
cgtgtcatgggcaattcggtccgtg

SEQ ID NO: 202197 - DNA, 25 bp, SARS Virus
gtgtcatgggccattcggtccgtga

SEQ ID NO: 202198 - DNA, 25 bp, SARS Virus
tgtcatgggccaatcggtccgtgat

SEQ ID NO: 202199 - DNA, 25 bp, SARS Virus
gtcatgggccatacggtccgtgata

SEQ ID NO: 202200 - DNA, 25 bp, SARS Virus
tcatgggccattaggtccgtgatac

SEQ ID NO: 202201 - DNA, 25 bp, SARS Virus
catgggccattcagtccgtgatact

SEQ ID NO: 202202 - DNA, 25 bp, SARS Virus
atgggccattcgatccgtgatactt

SEQ ID NO: 202203 - DNA, 25 bp, SARS Virus
tgggccattcggaccgtgatacttt

SEQ ID NO: 202204 - DNA, 25 bp, SARS Virus
gggccattcggtacgtgatactttg

SEQ ID NO: 202205 - DNA, 25 bp, SARS Virus
ggccattcggtcagtgatactttgg

SEQ ID NO: 202206 - DNA, 25 bp, SARS Virus
gccattcggtccatgatactttggt

SEQ ID NO: 202207 - DNA, 25 bp, SARS Virus
ccattcggtccgagatactttggtt

SEQ ID NO: 202208 - DNA, 25 bp, SARS Virus
cattcggtccgtaatactttggtta

SEQ ID NO: 202209 - DNA, 25 bp, SARS Virus
attcggtccgtgatactttggttag

SEQ ID NO: 202210 - DNA, 25 bp, SARS Virus
ttcggtccgtgaaactttggttaga

SEQ ID NO: 202211 - DNA, 25 bp, SARS Virus
tcggtccgtgatactttggttagag

SEQ ID NO: 202212 - DNA, 25 bp, SARS Virus
cggtccgtgataatttggttagaga

SEQ ID NO: 202213 - DNA, 25 bp, SARS Virus
ggtccgtgatacattggttagagag

SEQ ID NO: 202214 - DNA, 25 bp, SARS Virus
gtccgtgatactatggttagagaga

SEQ ID NO: 202215 - DNA, 25 bp, SARS Virus
tccgtgatacttaggttagagagaa

SEQ ID NO: 202216 - DNA, 25 bp, SARS Virus
ccgtgatactttagttagagagaac

SEQ ID NO: 202217 - DNA, 25 bp, SARS Virus
cgtgatactttgattagagagaaca

SEQ ID NO: 202218 - DNA, 25 bp, SARS Virus
gtgatactttggatagagagaacat

SEQ ID NO: 202219 - DNA, 25 bp, SARS Virus
tgatactttggtaagagagaacatt

SEQ ID NO: 202220 - DNA, 25 bp, SARS Virus
gatactttggttagagagaacatta

SEQ ID NO: 202221 - DNA, 25 bp, SARS Virus
atactttggttaaagagaacattac

SEQ ID NO: 202222 - DNA, 25 bp, SARS Virus
tactttggttagagagaacattact

SEQ ID NO: 202223 - DNA, 25 bp, SARS Virus
actttggttagaaagaacattacta

SEQ ID NO: 202224 - DNA, 25 bp, SARS Virus
ctttggttagagagaacattactat

SEQ ID NO: 202225 - DNA, 25 bp, SARS Virus
tttggttagagaaaacattactatc

SEQ ID NO: 202226 - DNA, 25 bp, SARS Virus
ttggttagagagaacattactatcg

SEQ ID NO: 202227 - DNA, 25 bp, SARS Virus
tggttagagagaacattactatcgt

SEQ ID NO: 202228 - DNA, 25 bp, SARS Virus
ggttagagagaaaattactatcgtc

SEQ ID NO: 202229 - DNA, 25 bp, SARS Virus
gttagagagaacattactatcgtcg

SEQ ID NO: 202230 - DNA, 25 bp, SARS Virus
ttagagagaacaatactatcgtcga

SEQ ID NO: 202231 - DNA, 25 bp, SARS Virus
tagagagaacataactatcgtcgat

SEQ ID NO: 202232 - DNA, 25 bp, SARS Virus
agagagaacattactatcgtcgatg

SEQ ID NO: 202233 - DNA, 25 bp, SARS Virus
gagagaacattaatatcgtcgatga

SEQ ID NO: 202234 - DNA, 25 bp, SARS Virus
agagaacattacaatcgtcgatgat

SEQ ID NO: 202235 - DNA, 25 bp, SARS Virus
gagaacattactatcgtcgatgatg

SEQ ID NO: 202236 - DNA, 25 bp, SARS Virus
agaacattactaacgtcgatgatgt

SEQ ID NO: 202237 - DNA, 25 bp, SARS Virus
gaacattactatagtcgatgatgtc

SEQ ID NO: 202238 - DNA, 25 bp, SARS Virus
aacattactatcatcgatgatgtcc

SEQ ID NO: 202239 - DNA, 25 bp, SARS Virus
acattactatcgacgatgatgtccc

SEQ ID NO: 202240 - DNA, 25 bp, SARS Virus
cattactatcgtagatgatgtcccg

SEQ ID NO: 202241 - DNA, 25 bp, SARS Virus
attactatcgtcaatgatgtcccgt

SEQ ID NO: 202242 - DNA, 25 bp, SARS Virus
ttactatcgtcgatgatgtcccgtc

SEQ ID NO: 202243 - DNA, 25 bp, SARS Virus
tactatcgtcgaagatgtcccgtcg

SEQ ID NO: 202244 - DNA, 25 bp, SARS Virus
actatcgtcgataatgtcccgtcga

SEQ ID NO: 202245 - DNA, 25 bp, SARS Virus
ctatcgtcgatgatgtcccgtcgaa

SEQ ID NO: 202246 - DNA, 25 bp, SARS Virus
tatcgtcgatgaagtcccgtcgaaa

SEQ ID NO: 202247 - DNA, 25 bp, SARS Virus
atcgtcgatgatatcccgtcgaaaa

SEQ ID NO: 202248 - DNA, 25 bp, SARS Virus
tcgtcgatgatgacccgtcgaaaac

SEQ ID NO: 202249 - DNA, 25 bp, SARS Virus
cgtcgatgatgtaccgtcgaaaaca

SEQ ID NO: 202250 - DNA, 25 bp, SARS Virus
gtcgatgatgtcacgtcgaaaacag

SEQ ID NO: 202251 - DNA, 25 bp, SARS Virus
tcgatgatgtccagtcgaaaacagt

SEQ ID NO: 202252 - DNA, 25 bp, SARS Virus
cgatgatgtcccatcgaaaacagta

SEQ ID NO: 202253 - DNA, 25 bp, SARS Virus
gatgatgtcccgacgaaaacagtaa

SEQ ID NO: 202254 - DNA, 25 bp, SARS Virus
atgatgtcccgtagaaaacagtaaa

SEQ ID NO: 202255 - DNA, 25 bp, SARS Virus
tgatgtcccgtcaaaaacagtaaaa

SEQ ID NO: 202256 - DNA, 25 bp, SARS Virus
gatgtcccgtcgaaaacagtaaaaa

SEQ ID NO: 202257 - DNA, 25 bp, SARS Virus
atgtcccgtcgaaaacagtaaaaac

SEQ ID NO: 202258 - DNA, 25 bp, SARS Virus
tgtcccgtcgaaaacagtaaaaaca

SEQ ID NO: 202259 - DNA, 25 bp, SARS Virus
gtcccgtcgaaaacagtaaaaacat

SEQ ID NO: 202260 - DNA, 25 bp, SARS Virus
tcccgtcgaaaaaagtaaaaacata

SEQ ID NO: 202261 - DNA, 25 bp, SARS Virus
cccgtcgaaaacagtaaaaacatac

SEQ ID NO: 202262 - DNA, 25 bp, SARS Virus
ccgtcgaaaacaataaaaacatact

SEQ ID NO: 202263 - DNA, 25 bp, SARS Virus
cgtcgaaaacagaaaaaacatactt

SEQ ID NO: 202264 - DNA, 25 bp, SARS Virus
gtcgaaaacagtaaaaacatacttg

SEQ ID NO: 202265 - DNA, 25 bp, SARS Virus
tcgaaaacagtaaaaacatacttgg

SEQ ID NO: 202266 - DNA, 25 bp, SARS Virus
cgaaaacagtaaaaacatacttggt

SEQ ID NO: 202267 - DNA, 25 bp, SARS Virus
gaaaacagtaaaaacatacttggtg

SEQ ID NO: 202268 - DNA, 25 bp, SARS Virus
aaaacagtaaaaacatacttggtgg

SEQ ID NO: 202269 - DNA, 25 bp, SARS Virus
aaacagtaaaaaaatacttggtggt

SEQ ID NO: 202270 - DNA, 25 bp, SARS Virus
aacagtaaaaacatacttggtggtg

SEQ ID NO: 202271 - DNA, 25 bp, SARS Virus
acagtaaaaacaaacttggtggtgc

SEQ ID NO: 202272 - DNA, 25 bp, SARS Virus
cagtaaaaacatacttggtggtgcg

SEQ ID NO: 202273 - DNA, 25 bp, SARS Virus
agtaaaaacataattggtggtgcga

SEQ ID NO: 202274 - DNA, 25 bp, SARS Virus
gtaaaaacatacatggtggtgcgac

SEQ ID NO: 202275 - DNA, 25 bp, SARS Virus
taaaaacatactaggtggtgcgacc

SEQ ID NO: 202276 - DNA, 25 bp, SARS Virus
aaaaacatacttagtggtgcgaccg

SEQ ID NO: 202277 - DNA, 25 bp, SARS Virus
aaaacatacttgatggtgcgaccga

SEQ ID NO: 202278 - DNA, 25 bp, SARS Virus
aaacatacttggaggtgcgaccgat

SEQ ID NO: 202279 - DNA, 25 bp, SARS Virus
aacatacttggtagtgcgaccgatt

SEQ ID NO: 202280 - DNA, 25 bp, SARS Virus
acatacttggtgatgcgaccgattt

SEQ ID NO: 202281 - DNA, 25 bp, SARS Virus
catacttggtggagcgaccgatttg

SEQ ID NO: 202282 - DNA, 25 bp, SARS Virus
atacttggtggtacgaccgatttgg

SEQ ID NO: 202283 - DNA, 25 bp, SARS Virus
tacttggtggtgagaccgatttggt

SEQ ID NO: 202284 - DNA, 25 bp, SARS Virus
acttggtggtgcaaccgatttggta

SEQ ID NO: 202285 - DNA, 25 bp, SARS Virus
cttggtggtgcgaccgatttggtac

SEQ ID NO: 202286 - DNA, 25 bp, SARS Virus
ttggtggtgcgaacgatttggtacg

SEQ ID NO: 202287 - DNA, 25 bp, SARS Virus
tggtggtgcgacagatttggtacgc

SEQ ID NO: 202288 - DNA, 25 bp, SARS Virus
ggtggtgcgaccaatttggtacgca

SEQ ID NO: 202289 - DNA, 25 bp, SARS Virus
gtggtgcgaccgatttggtacgcag

SEQ ID NO: 202290 - DNA, 25 bp, SARS Virus
tggtgcgaccgaattggtacgcagt

SEQ ID NO: 202291 - DNA, 25 bp, SARS Virus
ggtgcgaccgatatggtacgcagtt

SEQ ID NO: 202292 - DNA, 25 bp, SARS Virus
gtgcgaccgattaggtacgcagttt

SEQ ID NO: 202293 - DNA, 25 bp, SARS Virus
tgcgaccgatttagtacgcagtttt

SEQ ID NO: 202294 - DNA, 25 bp, SARS Virus
gcgaccgatttgatacgcagttttg

SEQ ID NO: 202295 - DNA, 25 bp, SARS Virus
cgaccgatttggaacgcagttttgg

SEQ ID NO: 202296 - DNA, 25 bp, SARS Virus
gaccgatttggtacgcagttttggt

SEQ ID NO: 202297 - DNA, 25 bp, SARS Virus
accgatttggtaagcagttttggtc

SEQ ID NO: 202298 - DNA, 25 bp, SARS Virus
ccgatttggtacacagttttggtcg

SEQ ID NO: 202299 - DNA, 25 bp, SARS Virus
cgatttggtacgaagttttggtcgt

SEQ ID NO: 202300 - DNA, 25 bp, SARS Virus
gatttggtacgcagttttggtcgta

SEQ ID NO: 202301 - DNA, 25 bp, SARS Virus
atttggtacgcaattttggtcgtac

SEQ ID NO: 202302 - DNA, 25 bp, SARS Virus
tttggtacgcagatttggtcgtaca

SEQ ID NO: 202303 - DNA, 25 bp, SARS Virus
ttggtacgcagtattggtcgtacaa

SEQ ID NO: 202304 - DNA, 25 bp, SARS Virus
tggtacgcagttatggtcgtacaaa

SEQ ID NO: 202305 - DNA, 25 bp, SARS Virus
ggtacgcagtttaggtcgtacaaat

SEQ ID NO: 202306 - DNA, 25 bp, SARS Virus
gtacgcagttttagtcgtacaaata

SEQ ID NO: 202307 - DNA, 25 bp, SARS Virus
tacgcagttttgatcgtacaaataa

SEQ ID NO: 202308 - DNA, 25 bp, SARS Virus
acgcagttttggacgtacaaataaa

SEQ ID NO: 202309 - DNA, 25 bp, SARS Virus
cgcagttttggtagtacaaataaac

SEQ ID NO: 202310 - DNA, 25 bp, SARS Virus
gcagttttggtcatacaaataaacg

SEQ ID NO: 202311 - DNA, 25 bp, SARS Virus
cagttttggtcgaacaaataaacgt

SEQ ID NO: 202312 - DNA, 25 bp, SARS Virus
agttttggtcgtacaaataaacgtt

SEQ ID NO: 202313 - DNA, 25 bp, SARS Virus
gttttggtcgtaaaaataaacgttt

SEQ ID NO: 202314 - DNA, 25 bp, SARS Virus
ttttggtcgtacaaataaacgtttt

SEQ ID NO: 202315 - DNA, 25 bp, SARS Virus
tttggtcgtacaaataaacgttttg

SEQ ID NO: 202316 - DNA, 25 bp, SARS Virus
ttggtcgtacaaataaacgttttgt

SEQ ID NO: 202317 - DNA, 25 bp, SARS Virus
tggtcgtacaaaaaaacgttttgtt

SEQ ID NO: 202318 - DNA, 25 bp, SARS Virus
ggtcgtacaaataaacgttttgtta

SEQ ID NO: 202319 - DNA, 25 bp, SARS Virus
gtcgtacaaataaacgttttgttag

SEQ ID NO: 202320 - DNA, 25 bp, SARS Virus
tcgtacaaataaacgttttgttagt

SEQ ID NO: 202321 - DNA, 25 bp, SARS Virus
cgtacaaataaaagttttgttagta

SEQ ID NO: 202322 - DNA, 25 bp, SARS Virus
gtacaaataaacattttgttagtag

SEQ ID NO: 202323 - DNA, 25 bp, SARS Virus
tacaaataaacgatttgttagtagt

SEQ ID NO: 202324 - DNA, 25 bp, SARS Virus
acaaataaacgtattgttagtagtc

SEQ ID NO: 202325 - DNA, 25 bp, SARS Virus
caaataaacgttatgttagtagtca

SEQ ID NO: 202326 - DNA, 25 bp, SARS Virus
aaataaacgtttagttagtagtcat

SEQ ID NO: 202327 - DNA, 25 bp, SARS Virus
aataaacgttttattagtagtcatc

SEQ ID NO: 202328 - DNA, 25 bp, SARS Virus
ataaacgttttgatagtagtcatct

SEQ ID NO: 202329 - DNA, 25 bp, SARS Virus
taaacgttttgtaagtagtcatctt

SEQ ID NO: 202330 - DNA, 25 bp, SARS Virus
aaacgttttgttagtagtcatcttt

SEQ ID NO: 202331 - DNA, 25 bp, SARS Virus
aacgttttgttaatagtcatcttta

SEQ ID NO: 202332 - DNA, 25 bp, SARS Virus
acgttttgttagaagtcatctttac

SEQ ID NO: 202333 - DNA, 25 bp, SARS Virus
cgttttgttagtagtcatctttact

SEQ ID NO: 202334 - DNA, 25 bp, SARS Virus
gttttgttagtaatcatctttacta

SEQ ID NO: 202335 - DNA, 25 bp, SARS Virus
ttttgttagtagacatctttactac

SEQ ID NO: 202336 - DNA, 25 bp, SARS Virus
tttgttagtagtaatctttactaca

SEQ ID NO: 202337 - DNA, 25 bp, SARS Virus
ttgttagtagtcatctttactacag

SEQ ID NO: 202338 - DNA, 25 bp, SARS Virus
tgttagtagtcaactttactacagt

SEQ ID NO: 202339 - DNA, 25 bp, SARS Virus
gttagtagtcatatttactacagtg

SEQ ID NO: 202340 - DNA, 25 bp, SARS Virus
ttagtagtcatcattactacagtgc

SEQ ID NO: 202341 - DNA, 25 bp, SARS Virus
tagtagtcatctatactacagtgct

SEQ ID NO: 202342 - DNA, 25 bp, SARS Virus
agtagtcatcttaactacagtgctc

SEQ ID NO: 202343 - DNA, 25 bp, SARS Virus
gtagtcatctttactacagtgctca

SEQ ID NO: 202344 - DNA, 25 bp, SARS Virus
tagtcatctttaatacagtgctcac

SEQ ID NO: 202345 - DNA, 25 bp, SARS Virus
agtcatctttacaacagtgctcact

SEQ ID NO: 202346 - DNA, 25 bp, SARS Virus
gtcatctttactacagtgctcactg

SEQ ID NO: 202347 - DNA, 25 bp, SARS Virus
tcatctttactaaagtgctcactgt

SEQ ID NO: 202348 - DNA, 25 bp, SARS Virus
catctttactacagtgctcactgtg

SEQ ID NO: 202349 - DNA, 25 bp, SARS Virus
atctttactacaatgctcactgtgg

SEQ ID NO: 202350 - DNA, 25 bp, SARS Virus
tctttactacagagctcactgtggt

SEQ ID NO: 202351 - DNA, 25 bp, SARS Virus
ctttactacagtactcactgtggta

SEQ ID NO: 202352 - DNA, 25 bp, SARS Virus
tttactacagtgatcactgtggtag

SEQ ID NO: 202353 - DNA, 25 bp, SARS Virus
ttactacagtgcacactgtggtagg

SEQ ID NO: 202354 - DNA, 25 bp, SARS Virus
tactacagtgctaactgtggtagga

SEQ ID NO: 202355 - DNA, 25 bp, SARS Virus
actacagtgctcactgtggtaggac

SEQ ID NO: 202356 - DNA, 25 bp, SARS Virus
ctacagtgctcaatgtggtaggact

SEQ ID NO: 202357 - DNA, 25 bp, SARS Virus
tacagtgctcacagtggtaggactt

SEQ ID NO: 202358 - DNA, 25 bp, SARS Virus
acagtgctcactatggtaggactta

SEQ ID NO: 202359 - DNA, 25 bp, SARS Virus
cagtgctcactgaggtaggacttac

SEQ ID NO: 202360 - DNA, 25 bp, SARS Virus
agtgctcactgtagtaggacttacc

SEQ ID NO: 202361 - DNA, 25 bp, SARS Virus
gtgctcactgtgataggacttaccg

SEQ ID NO: 202362 - DNA, 25 bp, SARS Virus
tgctcactgtggaaggacttaccga

SEQ ID NO: 202363 - DNA, 25 bp, SARS Virus
gctcactgtggtaggacttaccgaa

SEQ ID NO: 202364 - DNA, 25 bp, SARS Virus
ctcactgtggtaagacttaccgaaa

SEQ ID NO: 202365 - DNA, 25 bp, SARS Virus
tcactgtggtagaacttaccgaaac

SEQ ID NO: 202366 - DNA, 25 bp, SARS Virus
cactgtggtaggacttaccgaaaca

SEQ ID NO: 202367 - DNA, 25 bp, SARS Virus
actgtggtaggaattaccgaaacat

SEQ ID NO: 202368 - DNA, 25 bp, SARS Virus
ctgtggtaggacataccgaaacatt

SEQ ID NO: 202369 - DNA, 25 bp, SARS Virus
tgtggtaggactaaccgaaacattg

SEQ ID NO: 202370 - DNA, 25 bp, SARS Virus
gtggtaggacttaccgaaacattgg

SEQ ID NO: 202371 - DNA, 25 bp, SARS Virus
tggtaggacttaacgaaacattggt

SEQ ID NO: 202372 - DNA, 25 bp, SARS Virus
ggtaggacttacagaaacattggtt

SEQ ID NO: 202373 - DNA, 25 bp, SARS Virus
gtaggacttaccaaaacattggtta

SEQ ID NO: 202374 - DNA, 25 bp, SARS Virus
taggacttaccgaaacattggttac

SEQ ID NO: 202375 - DNA, 25 bp, SARS Virus
aggacttaccgaaacattggttact

SEQ ID NO: 202376 - DNA, 25 bp, SARS Virus
ggacttaccgaaacattggttacta

SEQ ID NO: 202377 - DNA, 25 bp, SARS Virus
gacttaccgaaaaattggttactaa

SEQ ID NO: 202378 - DNA, 25 bp, SARS Virus
acttaccgaaacattggttactaaa

SEQ ID NO: 202379 - DNA, 25 bp, SARS Virus
cttaccgaaacaatggttactaaag

SEQ ID NO: 202380 - DNA, 25 bp, SARS Virus
ttaccgaaacataggttactaaagt

SEQ ID NO: 202381 - DNA, 25 bp, SARS Virus
taccgaaacattagttactaaagta

SEQ ID NO: 202382 - DNA, 25 bp, SARS Virus
accgaaacattgattactaaagtaa

SEQ ID NO: 202383 - DNA, 25 bp, SARS Virus
ccgaaacattggatactaaagtaaa

SEQ ID NO: 202384 - DNA, 25 bp, SARS Virus
cgaaacattggtaactaaagtaaac

SEQ ID NO: 202385 - DNA, 25 bp, SARS Virus
gaaacattggttactaaagtaaaca

SEQ ID NO: 202386 - DNA, 25 bp, SARS Virus
aaacattggttaataaagtaaacac

SEQ ID NO: 202387 - DNA, 25 bp, SARS Virus
aacattggttacaaaagtaaacaca

SEQ ID NO: 202388 - DNA, 25 bp, SARS Virus
acattggttactaaagtaaacacat

SEQ ID NO: 202389 - DNA, 25 bp, SARS Virus
cattggttactaaagtaaacacatt

SEQ ID NO: 202390 - DNA, 25 bp, SARS Virus
attggttactaaagtaaacacattg

SEQ ID NO: 202391 - DNA, 25 bp, SARS Virus
ttggttactaaaataaacacattgg

SEQ ID NO: 202392 - DNA, 25 bp, SARS Virus
tggttactaaagaaaacacattggt

SEQ ID NO: 202393 - DNA, 25 bp, SARS Virus
ggttactaaagtaaacacattggta

SEQ ID NO: 202394 - DNA, 25 bp, SARS Virus
gttactaaagtaaacacattggtag

SEQ ID NO: 202395 - DNA, 25 bp, SARS Virus
ttactaaagtaaacacattggtagt

SEQ ID NO: 202396 - DNA, 25 bp, SARS Virus
tactaaagtaaaaacattggtagta

SEQ ID NO: 202397 - DNA, 25 bp, SARS Virus
actaaagtaaacacattggtagtac

SEQ ID NO: 202398 - DNA, 25 bp, SARS Virus
ctaaagtaaacaaattggtagtacc

SEQ ID NO: 202399 - DNA, 25 bp, SARS Virus
taaagtaaacacattggtagtacct

SEQ ID NO: 202400 - DNA, 25 bp, SARS Virus
aaagtaaacacaatggtagtaccta

SEQ ID NO: 202401 - DNA, 25 bp, SARS Virus
aagtaaacacataggtagtacctaa

SEQ ID NO: 202402 - DNA, 25 bp, SARS Virus
agtaaacacattagtagtacctaac

SEQ ID NO: 202403 - DNA, 25 bp, SARS Virus
gtaaacacattgatagtacctaact

SEQ ID NO: 202404 - DNA, 25 bp, SARS Virus
taaacacattggaagtacctaactg

SEQ ID NO: 202405 - DNA, 25 bp, SARS Virus
aaacacattggtagtacctaactgt

SEQ ID NO: 202406 - DNA, 25 bp, SARS Virus
aacacattggtaatacctaactgtt

SEQ ID NO: 202407 - DNA, 25 bp, SARS Virus
acacattggtagaacctaactgtta

SEQ ID NO: 202408 - DNA, 25 bp, SARS Virus
cacattggtagtacctaactgttac

SEQ ID NO: 202409 - DNA, 25 bp, SARS Virus
acattggtagtaactaactgttaca

SEQ ID NO: 202410 - DNA, 25 bp, SARS Virus
cattggtagtacataactgttacat

SEQ ID NO: 202411 - DNA, 25 bp, SARS Virus
attggtagtaccaaactgttacata

SEQ ID NO: 202412 - DNA, 25 bp, SARS Virus
ttggtagtacctaactgttacatac

SEQ ID NO: 202413 - DNA, 25 bp, SARS Virus
tggtagtacctaactgttacataca

SEQ ID NO: 202414 - DNA, 25 bp, SARS Virus
ggtagtacctaaatgttacatacat

SEQ ID NO: 202415 - DNA, 25 bp, SARS Virus
gtagtacctaacagttacatacatg

SEQ ID NO: 202416 - DNA, 25 bp, SARS Virus
tagtacctaactattacatacatga

SEQ ID NO: 202417 - DNA, 25 bp, SARS Virus
agtacctaactgatacatacatgac

SEQ ID NO: 202418 - DNA, 25 bp, SARS Virus
gtacctaactgtaacatacatgacc

SEQ ID NO: 202419 - DNA, 25 bp, SARS Virus
tacctaactgttacatacatgaccg

SEQ ID NO: 202420 - DNA, 25 bp, SARS Virus
acctaactgttaaatacatgaccgt

SEQ ID NO: 202421 - DNA, 25 bp, SARS Virus
cctaactgttacatacatgaccgta

SEQ ID NO: 202422 - DNA, 25 bp, SARS Virus
ctaactgttacaaacatgaccgtat

SEQ ID NO: 202423 - DNA, 25 bp, SARS Virus
taactgttacatacatgaccgtatt

SEQ ID NO: 202424 - DNA, 25 bp, SARS Virus
aactgttacataaatgaccgtattg

SEQ ID NO: 202425 - DNA, 25 bp, SARS Virus
actgttacatacatgaccgtattgc

SEQ ID NO: 202426 - DNA, 25 bp, SARS Virus
ctgttacatacaagaccgtattgct

SEQ ID NO: 202427 - DNA, 25 bp, SARS Virus
tgttacatacataaccgtattgcta

SEQ ID NO: 202428 - DNA, 25 bp, SARS Virus
gttacatacatgaccgtattgctat

SEQ ID NO: 202429 - DNA, 25 bp, SARS Virus
ttacatacatgaacgtattgctata

SEQ ID NO: 202430 - DNA, 25 bp, SARS Virus
tacatacatgacagtattgctatat

SEQ ID NO: 202431 - DNA, 25 bp, SARS Virus
acatacatgaccatattgctatatt

SEQ ID NO: 202432 - DNA, 25 bp, SARS Virus
catacatgaccgaattgctatattg

SEQ ID NO: 202433 - DNA, 25 bp, SARS Virus
atacatgaccgtattgctatattgt

SEQ ID NO: 202434 - DNA, 25 bp, SARS Virus
tacatgaccgtaatgctatattgtt

SEQ ID NO: 202435 - DNA, 25 bp, SARS Virus
acatgaccgtatagctatattgttt

SEQ ID NO: 202436 - DNA, 25 bp, SARS Virus
catgaccgtattactatattgtttg

SEQ ID NO: 202437 - DNA, 25 bp, SARS Virus
atgaccgtattgatatattgtttgg

SEQ ID NO: 202438 - DNA, 25 bp, SARS Virus
tgaccgtattgcaatattgtttggt

SEQ ID NO: 202439 - DNA, 25 bp, SARS Virus
gaccgtattgctatattgtttggtt

SEQ ID NO: 202440 - DNA, 25 bp, SARS Virus
accgtattgctaaattgtttggtta

SEQ ID NO: 202441 - DNA, 25 bp, SARS Virus
ccgtattgctatattgtttggttac

SEQ ID NO: 202442 - DNA, 25 bp, SARS Virus
cgtattgctataatgtttggttacg

SEQ ID NO: 202443 - DNA, 25 bp, SARS Virus
gtattgctatatagtttggttacgt

SEQ ID NO: 202444 - DNA, 25 bp, SARS Virus
tattgctatattatttggttacgtc

SEQ ID NO: 202445 - DNA, 25 bp, SARS Virus
attgctatattgattggttacgtcg

SEQ ID NO: 202446 - DNA, 25 bp, SARS Virus
ttgctatattgtatggttacgtcgt

SEQ ID NO: 202447 - DNA, 25 bp, SARS Virus
tgctatattgttaggttacgtcgtt

SEQ ID NO: 202448 - DNA, 25 bp, SARS Virus
gctatattgtttagttacgtcgttc

SEQ ID NO: 202449 - DNA, 25 bp, SARS Virus
ctatattgtttgattacgtcgttct

SEQ ID NO: 202450 - DNA, 25 bp, SARS Virus
tatattgtttggatacgtcgttctt

SEQ ID NO: 202451 - DNA, 25 bp, SARS Virus
atattgtttggtaacgtcgttcttg

SEQ ID NO: 202452 - DNA, 25 bp, SARS Virus
tattgtttggttacgtcgttcttgc

SEQ ID NO: 202453 - DNA, 25 bp, SARS Virus
attgtttggttaagtcgttcttgcg

SEQ ID NO: 202454 - DNA, 25 bp, SARS Virus
ttgtttggttacatcgttcttgcgt

SEQ ID NO: 202455 - DNA, 25 bp, SARS Virus
tgtttggttacgacgttcttgcgtg

SEQ ID NO: 202456 - DNA, 25 bp, SARS Virus
gtttggttacgtagttcttgcgtgt

SEQ ID NO: 202457 - DNA, 25 bp, SARS Virus
tttggttacgtcattcttgcgtgtt

SEQ ID NO: 202458 - DNA, 25 bp, SARS Virus
ttggttacgtcgatcttgcgtgtta

SEQ ID NO: 202459 - DNA, 25 bp, SARS Virus
tggttacgtcgtacttgcgtgttat

SEQ ID NO: 202460 - DNA, 25 bp, SARS Virus
ggttacgtcgttattgcgtgttatt

SEQ ID NO: 202461 - DNA, 25 bp, SARS Virus
gttacgtcgttcatgcgtgttatta

SEQ ID NO: 202462 - DNA, 25 bp, SARS Virus
ttacgtcgttctagcgtgttattac

SEQ ID NO: 202463 - DNA, 25 bp, SARS Virus
tacgtcgttcttacgtgttattaca

SEQ ID NO: 202464 - DNA, 25 bp, SARS Virus
acgtcgttcttgagtgttattacac

SEQ ID NO: 202465 - DNA, 25 bp, SARS Virus
cgtcgttcttgcatgttattacacc

SEQ ID NO: 202466 - DNA, 25 bp, SARS Virus
gtcgttcttgcgagttattacaccg

SEQ ID NO: 202467 - DNA, 25 bp, SARS Virus
tcgttcttgcgtattattacaccgg

SEQ ID NO: 202468 - DNA, 25 bp, SARS Virus
cgttcttgcgtgatattacaccgga

SEQ ID NO: 202469 - DNA, 25 bp, SARS Virus
gttcttgcgtgtaattacaccggaa

SEQ ID NO: 202470 - DNA, 25 bp, SARS Virus
ttcttgcgtgttattacaccggaat

SEQ ID NO: 202471 - DNA, 25 bp, SARS Virus
tcttgcgtgttaatacaccggaatt

SEQ ID NO: 202472 - DNA, 25 bp, SARS Virus
cttgcgtgttataacaccggaattc

SEQ ID NO: 202473 - DNA, 25 bp, SARS Virus
ttgcgtgttattacaccggaattcg

SEQ ID NO: 202474 - DNA, 25 bp, SARS Virus
tgcgtgttattaaaccggaattcgt

SEQ ID NO: 202475 - DNA, 25 bp, SARS Virus
gcgtgttattacaccggaattcgta

SEQ ID NO: 202476 - DNA, 25 bp, SARS Virus
cgtgttattacaacggaattcgtat

SEQ ID NO: 202477 - DNA, 25 bp, SARS Virus
gtgttattacacaggaattcgtatt

SEQ ID NO: 202478 - DNA, 25 bp, SARS Virus
tgttattacaccagaattcgtattc

SEQ ID NO: 202479 - DNA, 25 bp, SARS Virus
gttattacaccgaaattcgtattca

SEQ ID NO: 202480 - DNA, 25 bp, SARS Virus
ttattacaccggaattcgtattcaa

SEQ ID NO: 202481 - DNA, 25 bp, SARS Virus
tattacaccggaattcgtattcaaa

SEQ ID NO: 202482 - DNA, 25 bp, SARS Virus
attacaccggaaatcgtattcaaat

SEQ ID NO: 202483 - DNA, 25 bp, SARS Virus
ttacaccggaatacgtattcaaatt

SEQ ID NO: 202484 - DNA, 25 bp, SARS Virus
tacaccggaattagtattcaaattt

SEQ ID NO: 202485 - DNA, 25 bp, SARS Virus
acaccggaattcatattcaaatttt

SEQ ID NO: 202486 - DNA, 25 bp, SARS Virus
caccggaattcgaattcaaattttg

SEQ ID NO: 202487 - DNA, 25 bp, SARS Virus
accggaattcgtattcaaattttgt

SEQ ID NO: 202488 - DNA, 25 bp, SARS Virus
ccggaattcgtaatcaaattttgtt

SEQ ID NO: 202489 - DNA, 25 bp, SARS Virus
cggaattcgtatacaaattttgttc

SEQ ID NO: 202490 - DNA, 25 bp, SARS Virus
ggaattcgtattaaaattttgttca

SEQ ID NO: 202491 - DNA, 25 bp, SARS Virus
gaattcgtattcaaattttgttcat

SEQ ID NO: 202492 - DNA, 25 bp, SARS Virus
aattcgtattcaaattttgttcatg

SEQ ID NO: 202493 - DNA, 25 bp, SARS Virus
attcgtattcaaattttgttcatga

SEQ ID NO: 202494 - DNA, 25 bp, SARS Virus
ttcgtattcaaaatttgttcatgat

SEQ ID NO: 202495 - DNA, 25 bp, SARS Virus
tcgtattcaaatattgttcatgatt

SEQ ID NO: 202496 - DNA, 25 bp, SARS Virus
cgtattcaaattatgttcatgattg

SEQ ID NO: 202497 - DNA, 25 bp, SARS Virus
gtattcaaatttagttcatgattgt

SEQ ID NO: 202498 - DNA, 25 bp, SARS Virus
tattcaaattttattcatgattgtt

SEQ ID NO: 202499 - DNA, 25 bp, SARS Virus
attcaaattttgatcatgattgtta

SEQ ID NO: 202500 - DNA, 25 bp, SARS Virus
ttcaaattttgtacatgattgttag

SEQ ID NO: 202501 - DNA, 25 bp, SARS Virus
tcaaattttgttaatgattgttaga

SEQ ID NO: 202502 - DNA, 25 bp, SARS Virus
caaattttgttcatgattgttagaa

SEQ ID NO: 202503 - DNA, 25 bp, SARS Virus
aaattttgttcaagattgttagaat

SEQ ID NO: 202504 - DNA, 25 bp, SARS Virus
aattttgttcataattgttagaatg

SEQ ID NO: 202505 - DNA, 25 bp, SARS Virus
attttgttcatgattgttagaatgg

SEQ ID NO: 202506 - DNA, 25 bp, SARS Virus
ttttgttcatgaatgttagaatggt

SEQ ID NO: 202507 - DNA, 25 bp, SARS Virus
tttgttcatgatagttagaatggtg

SEQ ID NO: 202508 - DNA, 25 bp, SARS Virus
ttgttcatgattattagaatggtgg

SEQ ID NO: 202509 - DNA, 25 bp, SARS Virus
tgttcatgattgatagaatggtggg

SEQ ID NO: 202510 - DNA, 25 bp, SARS Virus
gttcatgattgtaagaatggtggga

SEQ ID NO: 202511 - DNA, 25 bp, SARS Virus
ttcatgattgttagaatggtgggaa

SEQ ID NO: 202512 - DNA, 25 bp, SARS Virus
tcatgattgttaaaatggtgggaac

SEQ ID NO: 202513 - DNA, 25 bp, SARS Virus
catgattgttagaatggtgggaact

SEQ ID NO: 202514 - DNA, 25 bp, SARS Virus
atgattgttagaatggtgggaactc

SEQ ID NO: 202515 - DNA, 25 bp, SARS Virus
tgattgttagaaaggtgggaactca

SEQ ID NO: 202516 - DNA, 25 bp, SARS Virus
gattgttagaatagtgggaactcac

SEQ ID NO: 202517 - DNA, 25 bp, SARS Virus
attgttagaatgatgggaactcact

SEQ ID NO: 202518 - DNA, 25 bp, SARS Virus
ttgttagaatggagggaactcactc

SEQ ID NO: 202519 - DNA, 25 bp, SARS Virus
tgttagaatggtaggaactcactct

SEQ ID NO: 202520 - DNA, 25 bp, SARS Virus
gttagaatggtgagaactcactcta

SEQ ID NO: 202521 - DNA, 25 bp, SARS Virus
ttagaatggtggaaactcactctaa

SEQ ID NO: 202522 - DNA, 25 bp, SARS Virus
tagaatggtgggaactcactctaaa

SEQ ID NO: 202523 - DNA, 25 bp, SARS Virus
agaatggtgggaactcactctaaaa

SEQ ID NO: 202524 - DNA, 25 bp, SARS Virus
gaatggtgggaaatcactctaaaat

SEQ ID NO: 202525 - DNA, 25 bp, SARS Virus
aatggtgggaacacactctaaaatc

SEQ ID NO: 202526 - DNA, 25 bp, SARS Virus
atggtgggaactaactctaaaatca

SEQ ID NO: 202527 - DNA, 25 bp, SARS Virus
tggtgggaactcactctaaaatcat

SEQ ID NO: 202528 - DNA, 25 bp, SARS Virus
ggtgggaactcaatctaaaatcatc

SEQ ID NO: 202529 - DNA, 25 bp, SARS Virus
gtgggaactcacactaaaatcatca

SEQ ID NO: 202530 - DNA, 25 bp, SARS Virus
tgggaactcactataaaatcatcaa

SEQ ID NO: 202531 - DNA, 25 bp, SARS Virus
gggaactcactcaaaaatcatcaat

SEQ ID NO: 202532 - DNA, 25 bp, SARS Virus
ggaactcactctaaaatcatcaata

SEQ ID NO: 202533 - DNA, 25 bp, SARS Virus
gaactcactctaaaatcatcaatac

SEQ ID NO: 202534 - DNA, 25 bp, SARS Virus
aactcactctaaaatcatcaatact

SEQ ID NO: 202535 - DNA, 25 bp, SARS Virus
actcactctaaaatcatcaatactg

SEQ ID NO: 202536 - DNA, 25 bp, SARS Virus
ctcactctaaaaacatcaatactgt

SEQ ID NO: 202537 - DNA, 25 bp, SARS Virus
tcactctaaaataatcaatactgta

SEQ ID NO: 202538 - DNA, 25 bp, SARS Virus
cactctaaaatcatcaatactgtaa

SEQ ID NO: 202539 - DNA, 25 bp, SARS Virus
actctaaaatcaacaatactgtaac

SEQ ID NO: 202540 - DNA, 25 bp, SARS Virus
ctctaaaatcataaatactgtaact

SEQ ID NO: 202541 - DNA, 25 bp, SARS Virus
tctaaaatcatcaatactgtaactg

SEQ ID NO: 202542 - DNA, 25 bp, SARS Virus
ctaaaatcatcaatactgtaactgt

SEQ ID NO: 202543 - DNA, 25 bp, SARS Virus
taaaatcatcaaaactgtaactgtt

SEQ ID NO: 202544 - DNA, 25 bp, SARS Virus
aaaatcatcaatactgtaactgttg

SEQ ID NO: 202545 - DNA, 25 bp, SARS Virus
aaatcatcaataatgtaactgttgg

SEQ ID NO: 202546 - DNA, 25 bp, SARS Virus
aatcatcaatacagtaactgttgga

SEQ ID NO: 202547 - DNA, 25 bp, SARS Virus
atcatcaatactataactgttggac

SEQ ID NO: 202548 - DNA, 25 bp, SARS Virus
tcatcaatactgaaactgttggaca

SEQ ID NO: 202549 - DNA, 25 bp, SARS Virus
catcaatactgtaactgttggacag

SEQ ID NO: 202550 - DNA, 25 bp, SARS Virus
atcaatactgtaactgttggacaga

SEQ ID NO: 202551 - DNA, 25 bp, SARS Virus
tcaatactgtaaatgttggacagat

SEQ ID NO: 202552 - DNA, 25 bp, SARS Virus
caatactgtaacagttggacagatc

SEQ ID NO: 202553 - DNA, 25 bp, SARS Virus
tcgtcgttcttgcgttcgtctccat

SEQ ID NO: 202554 - DNA, 25 bp, SARS Virus
cgtcgttcttgccttcgtctccatc

SEQ ID NO: 202555 - DNA, 25 bp, SARS Virus
gtcgttcttgcgctcgtctccatcg

SEQ ID NO: 202556 - DNA, 25 bp, SARS Virus
tcgttcttgcgtccgtctccatcgt

SEQ ID NO: 202557 - DNA, 25 bp, SARS Virus
cgttcttgcgttcgtctccatcgtt

SEQ ID NO: 202558 - DNA, 25 bp, SARS Virus
gttcttgcgttcctctccatcgttt

SEQ ID NO: 202559 - DNA, 25 bp, SARS Virus
ttcttgcgttcgcctccatcgtttt

SEQ ID NO: 202560 - DNA, 25 bp, SARS Virus
tcttgcgttcgtctccatcgtttta

SEQ ID NO: 202561 - DNA, 25 bp, SARS Virus
cttgcgttcgtccccatcgttttag

SEQ ID NO: 202562 - DNA, 25 bp, SARS Virus
ttgcgttcgtctccatcgttttagt

SEQ ID NO: 202563 - DNA, 25 bp, SARS Virus
tgcgttcgtctccatcgttttagtg

SEQ ID NO: 202564 - DNA, 25 bp, SARS Virus
gcgttcgtctccctcgttttagtga

SEQ ID NO: 202565 - DNA, 25 bp, SARS Virus
cgttcgtctccaccgttttagtgat

SEQ ID NO: 202566 - DNA, 25 bp, SARS Virus
gttcgtctccatcgttttagtgata

SEQ ID NO: 202567 - DNA, 25 bp, SARS Virus
ttcgtctccatccttttagtgatat

SEQ ID NO: 202568 - DNA, 25 bp, SARS Virus
tcgtctccatcgctttagtgatatg

SEQ ID NO: 202569 - DNA, 25 bp, SARS Virus
cgtctccatcgtcttagtgatatga

SEQ ID NO: 202570 - DNA, 25 bp, SARS Virus
gtctccatcgttctagtgatatgag

SEQ ID NO: 202571 - DNA, 25 bp, SARS Virus
tctccatcgtttcagtgatatgagt

SEQ ID NO: 202572 - DNA, 25 bp, SARS Virus
ctccatcgttttcgtgatatgagtt

SEQ ID NO: 202573 - DNA, 25 bp, SARS Virus
tccatcgttttactgatatgagtta

SEQ ID NO: 202574 - DNA, 25 bp, SARS Virus
ccatcgttttagcgatatgagttac

SEQ ID NO: 202575 - DNA, 25 bp, SARS Virus
catcgttttagtcatatgagttact

SEQ ID NO: 202576 - DNA, 25 bp, SARS Virus
atcgttttagtgctatgagttactc

SEQ ID NO: 202577 - DNA, 25 bp, SARS Virus
tcgttttagtgacatgagttactca

SEQ ID NO: 202578 - DNA, 25 bp, SARS Virus
cgttttagtgatctgagttactcaa

SEQ ID NO: 202579 - DNA, 25 bp, SARS Virus
gttttagtgatacgagttactcaaa

SEQ ID NO: 202580 - DNA, 25 bp, SARS Virus
ttttagtgatatcagttactcaaac

SEQ ID NO: 202581 - DNA, 25 bp, SARS Virus
tttagtgatatgcgttactcaaacc

SEQ ID NO: 202582 - DNA, 25 bp, SARS Virus
ttagtgatatgacttactcaaacct

SEQ ID NO: 202583 - DNA, 25 bp, SARS Virus
tagtgatatgagctactcaaacctt

SEQ ID NO: 202584 - DNA, 25 bp, SARS Virus
agtgatatgagtcactcaaaccttc

SEQ ID NO: 202585 - DNA, 25 bp, SARS Virus
gtgatatgagttcctcaaaccttcc

SEQ ID NO: 202586 - DNA, 25 bp, SARS Virus
tgatatgagttactcaaaccttcca

SEQ ID NO: 202587 - DNA, 25 bp, SARS Virus
gatatgagttacccaaaccttccac

SEQ ID NO: 202588 - DNA, 25 bp, SARS Virus
atatgagttactcaaaccttccaca

SEQ ID NO: 202589 - DNA, 25 bp, SARS Virus
tatgagttactccaaccttccacac

SEQ ID NO: 202590 - DNA, 25 bp, SARS Virus
atgagttactcacaccttccacaca

SEQ ID NO: 202591 - DNA, 25 bp, SARS Virus
tgagttactcaacccttccacacat

SEQ ID NO: 202592 - DNA, 25 bp, SARS Virus
gagttactcaaaccttccacacatc

SEQ ID NO: 202593 - DNA, 25 bp, SARS Virus
agttactcaaaccttccacacatcg

SEQ ID NO: 202594 - DNA, 25 bp, SARS Virus
gttactcaaaccctccacacatcgt

SEQ ID NO: 202595 - DNA, 25 bp, SARS Virus
ttactcaaacctcccacacatcgtt

SEQ ID NO: 202596 - DNA, 25 bp, SARS Virus
tactcaaaccttccacacatcgttt

SEQ ID NO: 202597 - DNA, 25 bp, SARS Virus
actcaaaccttccacacatcgttta

SEQ ID NO: 202598 - DNA, 25 bp, SARS Virus
ctcaaaccttccccacatcgtttac

SEQ ID NO: 202599 - DNA, 25 bp, SARS Virus
tcaaaccttccacacatcgtttaca

SEQ ID NO: 202600 - DNA, 25 bp, SARS Virus
caaaccttccacccatcgtttacaa

SEQ ID NO: 202601 - DNA, 25 bp, SARS Virus
aaaccttccacacatcgtttacaac

SEQ ID NO: 202602 - DNA, 25 bp, SARS Virus
aaccttccacacctcgtttacaacg

SEQ ID NO: 202603 - DNA, 25 bp, SARS Virus
accttccacacaccgtttacaacgg

SEQ ID NO: 202604 - DNA, 25 bp, SARS Virus
ccttccacacatcgtttacaacggt

SEQ ID NO: 202605 - DNA, 25 bp, SARS Virus
cttccacacatcctttacaacggtt

SEQ ID NO: 202606 - DNA, 25 bp, SARS Virus
ttccacacatcgcttacaacggttg

SEQ ID NO: 202607 - DNA, 25 bp, SARS Virus
tccacacatcgtctacaacggttgt

SEQ ID NO: 202608 - DNA, 25 bp, SARS Virus
ccacacatcgttcacaacggttgtc

SEQ ID NO: 202609 - DNA, 25 bp, SARS Virus
cacacatcgtttccaacggttgtcg

SEQ ID NO: 202610 - DNA, 25 bp, SARS Virus
acacatcgtttacaacggttgtcgt

SEQ ID NO: 202611 - DNA, 25 bp, SARS Virus
cacatcgtttaccacggttgtcgtg

SEQ ID NO: 202612 - DNA, 25 bp, SARS Virus
acatcgtttacaccggttgtcgtga

SEQ ID NO: 202613 - DNA, 25 bp, SARS Virus
catcgtttacaacggttgtcgtgat

SEQ ID NO: 202614 - DNA, 25 bp, SARS Virus
atcgtttacaaccgttgtcgtgatt

SEQ ID NO: 202615 - DNA, 25 bp, SARS Virus
tcgtttacaacgcttgtcgtgattt

SEQ ID NO: 202616 - DNA, 25 bp, SARS Virus
cgtttacaacggctgtcgtgatttt

SEQ ID NO: 202617 - DNA, 25 bp, SARS Virus
gtttacaacggtcgtcgtgattttt

SEQ ID NO: 202618 - DNA, 25 bp, SARS Virus
tttacaacggttctcgtgatttttg

SEQ ID NO: 202619 - DNA, 25 bp, SARS Virus
ttacaacggttgccgtgatttttgt

SEQ ID NO: 202620 - DNA, 25 bp, SARS Virus
tacaacggttgtcgtgatttttgtg

SEQ ID NO: 202621 - DNA, 25 bp, SARS Virus
acaacggttgtcctgatttttgtgc

SEQ ID NO: 202622 - DNA, 25 bp, SARS Virus
caacggttgtcgcgatttttgtgct

SEQ ID NO: 202623 - DNA, 25 bp, SARS Virus
aacggttgtcgtcatttttgtgctc

SEQ ID NO: 202624 - DNA, 25 bp, SARS Virus
acggttgtcgtgctttttgtgctcc

SEQ ID NO: 202625 - DNA, 25 bp, SARS Virus
cggttgtcgtgacttttgtgctcca

SEQ ID NO: 202626 - DNA, 25 bp, SARS Virus
ggttgtcgtgatctttgtgctccat

SEQ ID NO: 202627 - DNA, 25 bp, SARS Virus
gttgtcgtgattcttgtgctccatc

SEQ ID NO: 202628 - DNA, 25 bp, SARS Virus
ttgtcgtgatttctgtgctccatct

SEQ ID NO: 202629 - DNA, 25 bp, SARS Virus
tgtcgtgattttcgtgctccatctt

SEQ ID NO: 202630 - DNA, 25 bp, SARS Virus
gtcgtgatttttctgctccatcttt

SEQ ID NO: 202631 - DNA, 25 bp, SARS Virus
tcgtgatttttgcgctccatctttt

SEQ ID NO: 202632 - DNA, 25 bp, SARS Virus
cgtgatttttgtcctccatctttta

SEQ ID NO: 202633 - DNA, 25 bp, SARS Virus
gtgatttttgtgctccatcttttac

SEQ ID NO: 202634 - DNA, 25 bp, SARS Virus
tgatttttgtgccccatcttttacg

SEQ ID NO: 202635 - DNA, 25 bp, SARS Virus
gatttttgtgctccatcttttacgt

SEQ ID NO: 202636 - DNA, 25 bp, SARS Virus
atttttgtgctccatcttttacgtt

SEQ ID NO: 202637 - DNA, 25 bp, SARS Virus
tttttgtgctccctcttttacgttc

SEQ ID NO: 202638 - DNA, 25 bp, SARS Virus
ttttgtgctccaccttttacgttct

SEQ ID NO: 202639 - DNA, 25 bp, SARS Virus
tttgtgctccatcttttacgttctt

SEQ ID NO: 202640 - DNA, 25 bp, SARS Virus
ttgtgctccatcctttacgttcttc

SEQ ID NO: 202641 - DNA, 25 bp, SARS Virus
tgtgctccatctcttacgttcttca

SEQ ID NO: 202642 - DNA, 25 bp, SARS Virus
gtgctccatcttctacgttcttcag

SEQ ID NO: 202643 - DNA, 25 bp, SARS Virus
tgctccatctttcacgttcttcagt

SEQ ID NO: 202644 - DNA, 25 bp, SARS Virus
gctccatcttttccgttcttcagtg

SEQ ID NO: 202645 - DNA, 25 bp, SARS Virus
ctccatcttttacgttcttcagtgg

SEQ ID NO: 202646 - DNA, 25 bp, SARS Virus
tccatcttttaccttcttcagtggt

SEQ ID NO: 202647 - DNA, 25 bp, SARS Virus
ccatcttttacgctcttcagtggta

SEQ ID NO: 202648 - DNA, 25 bp, SARS Virus
catcttttacgtccttcagtggtaa

SEQ ID NO: 202649 - DNA, 25 bp, SARS Virus
atcttttacgttcttcagtggtaac

SEQ ID NO: 202650 - DNA, 25 bp, SARS Virus
tcttttacgttcctcagtggtaact

SEQ ID NO: 202651 - DNA, 25 bp, SARS Virus
cttttacgttctccagtggtaacta

SEQ ID NO: 202652 - DNA, 25 bp, SARS Virus
ttttacgttcttcagtggtaactaa

SEQ ID NO: 202653 - DNA, 25 bp, SARS Virus
tttacgttcttccgtggtaactaac

SEQ ID NO: 202654 - DNA, 25 bp, SARS Virus
ttacgttcttcactggtaactaacg

SEQ ID NO: 202655 - DNA, 25 bp, SARS Virus
tacgttcttcagcggtaactaacga

SEQ ID NO: 202656 - DNA, 25 bp, SARS Virus
acgttcttcagtcgtaactaacgag

SEQ ID NO: 202657 - DNA, 25 bp, SARS Virus
cgttcttcagtgctaactaacgaga

SEQ ID NO: 202658 - DNA, 25 bp, SARS Virus
gttcttcagtggcaactaacgagag

SEQ ID NO: 202659 - DNA, 25 bp, SARS Virus
ttcttcagtggtcactaacgagagt

SEQ ID NO: 202660 - DNA, 25 bp, SARS Virus
tcttcagtggtacctaacgagagtc

SEQ ID NO: 202661 - DNA, 25 bp, SARS Virus
cttcagtggtaactaacgagagtcg

SEQ ID NO: 202662 - DNA, 25 bp, SARS Virus
ttcagtggtaaccaacgagagtcgt

SEQ ID NO: 202663 - DNA, 25 bp, SARS Virus
tcagtggtaactcacgagagtcgtg

SEQ ID NO: 202664 - DNA, 25 bp, SARS Virus
cagtggtaactaccgagagtcgtgt

SEQ ID NO: 202665 - DNA, 25 bp, SARS Virus
agtggtaactaacgagagtcgtgtc

SEQ ID NO: 202666 - DNA, 25 bp, SARS Virus
gtggtaactaaccagagtcgtgtca

SEQ ID NO: 202667 - DNA, 25 bp, SARS Virus
tggtaactaacgcgagtcgtgtcat

SEQ ID NO: 202668 - DNA, 25 bp, SARS Virus
ggtaactaacgacagtcgtgtcatg

SEQ ID NO: 202669 - DNA, 25 bp, SARS Virus
gtaactaacgagcgtcgtgtcatgg

SEQ ID NO: 202670 - DNA, 25 bp, SARS Virus
taactaacgagactcgtgtcatggg

SEQ ID NO: 202671 - DNA, 25 bp, SARS Virus
aactaacgagagccgtgtcatgggc

SEQ ID NO: 202672 - DNA, 25 bp, SARS Virus
actaacgagagtcgtgtcatgggcc

SEQ ID NO: 202673 - DNA, 25 bp, SARS Virus
ctaacgagagtcctgtcatgggcca

SEQ ID NO: 202674 - DNA, 25 bp, SARS Virus
taacgagagtcgcgtcatgggccat

SEQ ID NO: 202675 - DNA, 25 bp, SARS Virus
aacgagagtcgtctcatgggccatt

SEQ ID NO: 202676 - DNA, 25 bp, SARS Virus
acgagagtcgtgccatgggccattc

SEQ ID NO: 202677 - DNA, 25 bp, SARS Virus
cgagagtcgtgtcatgggccattcg

SEQ ID NO: 202678 - DNA, 25 bp, SARS Virus
gagagtcgtgtcctgggccattcgg

SEQ ID NO: 202679 - DNA, 25 bp, SARS Virus
agagtcgtgtcacgggccattcggt

SEQ ID NO: 202680 - DNA, 25 bp, SARS Virus
gagtcgtgtcatcggccattcggtc

SEQ ID NO: 202681 - DNA, 25 bp, SARS Virus
agtcgtgtcatgcgccattcggtcc

SEQ ID NO: 202682 - DNA, 25 bp, SARS Virus
gtcgtgtcatggcccattcggtccg

SEQ ID NO: 202683 - DNA, 25 bp, SARS Virus
tcgtgtcatgggccattcggtccgt

SEQ ID NO: 202684 - DNA, 25 bp, SARS Virus
cgtgtcatgggccattcggtccgtg

SEQ ID NO: 202685 - DNA, 25 bp, SARS Virus
gtgtcatgggcccttcggtccgtga

SEQ ID NO: 202686 - DNA, 25 bp, SARS Virus
tgtcatgggccactcggtccgtgat

SEQ ID NO: 202687 - DNA, 25 bp, SARS Virus
gtcatgggccatccggtccgtgata

SEQ ID NO: 202688 - DNA, 25 bp, SARS Virus
tcatgggccattcggtccgtgatac

SEQ ID NO: 202689 - DNA, 25 bp, SARS Virus
catgggccattccgtccgtgatact

SEQ ID NO: 202690 - DNA, 25 bp, SARS Virus
atgggccattcgctccgtgatactt

SEQ ID NO: 202691 - DNA, 25 bp, SARS Virus
tgggccattcggcccgtgatacttt

SEQ ID NO: 202692 - DNA, 25 bp, SARS Virus
gggccattcggtccgtgatactttg

SEQ ID NO: 202693 - DNA, 25 bp, SARS Virus
ggccattcggtccgtgatactttgg

SEQ ID NO: 202694 - DNA, 25 bp, SARS Virus
gccattcggtccctgatactttggt

SEQ ID NO: 202695 - DNA, 25 bp, SARS Virus
ccattcggtccgcgatactttggtt

SEQ ID NO: 202696 - DNA, 25 bp, SARS Virus
cattcggtccgtcatactttggtta

SEQ ID NO: 202697 - DNA, 25 bp, SARS Virus
attcggtccgtgctactttggttag

SEQ ID NO: 202698 - DNA, 25 bp, SARS Virus
ttcggtccgtgacactttggttaga

SEQ ID NO: 202699 - DNA, 25 bp, SARS Virus
tcggtccgtgatcctttggttagag

SEQ ID NO: 202700 - DNA, 25 bp, SARS Virus
cggtccgtgatactttggttagaga

SEQ ID NO: 202701 - DNA, 25 bp, SARS Virus
ggtccgtgataccttggttagagag

SEQ ID NO: 202702 - DNA, 25 bp, SARS Virus
gtccgtgatactctggttagagaga

SEQ ID NO: 202703 - DNA, 25 bp, SARS Virus
tccgtgatacttcggttagagagaa

SEQ ID NO: 202704 - DNA, 25 bp, SARS Virus
ccgtgatactttcgttagagagaac

SEQ ID NO: 202705 - DNA, 25 bp, SARS Virus
cgtgatactttgcttagagagaaca

SEQ ID NO: 202706 - DNA, 25 bp, SARS Virus
gtgatactttggctagagagaacat

SEQ ID NO: 202707 - DNA, 25 bp, SARS Virus
tgatactttggtcagagagaacatt

SEQ ID NO: 202708 - DNA, 25 bp, SARS Virus
gatactttggttcgagagaacatta

SEQ ID NO: 202709 - DNA, 25 bp, SARS Virus
atactttggttacagagaacattac

SEQ ID NO: 202710 - DNA, 25 bp, SARS Virus
tactttggttagcgagaacattact

SEQ ID NO: 202711 - DNA, 25 bp, SARS Virus
actttggttagacagaacattacta

SEQ ID NO: 202712 - DNA, 25 bp, SARS Virus
ctttggttagagcgaacattactat

SEQ ID NO: 202713 - DNA, 25 bp, SARS Virus
tttggttagagacaacattactatc

SEQ ID NO: 202714 - DNA, 25 bp, SARS Virus
ttggttagagagcacattactatcg

SEQ ID NO: 202715 - DNA, 25 bp, SARS Virus
tggttagagagaccattactatcgt

SEQ ID NO: 202716 - DNA, 25 bp, SARS Virus
ggttagagagaacattactatcgtc

SEQ ID NO: 202717 - DNA, 25 bp, SARS Virus
gttagagagaaccttactatcgtcg

SEQ ID NO: 202718 - DNA, 25 bp, SARS Virus
ttagagagaacactactatcgtcga

SEQ ID NO: 202719 - DNA, 25 bp, SARS Virus
tagagagaacatcactatcgtcgat

SEQ ID NO: 202720 - DNA, 25 bp, SARS Virus
agagagaacattcctatcgtcgatg

SEQ ID NO: 202721 - DNA, 25 bp, SARS Virus
gagagaacattactatcgtcgatga

SEQ ID NO: 202722 - DNA, 25 bp, SARS Virus
agagaacattaccatcgtcgatgat

SEQ ID NO: 202723 - DNA, 25 bp, SARS Virus
gagaacattactctcgtcgatgatg

SEQ ID NO: 202724 - DNA, 25 bp, SARS Virus
agaacattactaccgtcgatgatgt

SEQ ID NO: 202725 - DNA, 25 bp, SARS Virus
gaacattactatcgtcgatgatgtc

SEQ ID NO: 202726 - DNA, 25 bp, SARS Virus
aacattactatcctcgatgatgtcc

SEQ ID NO: 202727 - DNA, 25 bp, SARS Virus
acattactatcgccgatgatgtccc

SEQ ID NO: 202728 - DNA, 25 bp, SARS Virus
cattactatcgtcgatgatgtcccg

SEQ ID NO: 202729 - DNA, 25 bp, SARS Virus
attactatcgtccatgatgtcccgt

SEQ ID NO: 202730 - DNA, 25 bp, SARS Virus
ttactatcgtcgctgatgtcccgtc

SEQ ID NO: 202731 - DNA, 25 bp, SARS Virus
tactatcgtcgacgatgtcccgtcg

SEQ ID NO: 202732 - DNA, 25 bp, SARS Virus
actatcgtcgatcatgtcccgtcga

SEQ ID NO: 202733 - DNA, 25 bp, SARS Virus
ctatcgtcgatgctgtcccgtcgaa

SEQ ID NO: 202734 - DNA, 25 bp, SARS Virus
tatcgtcgatgacgtcccgtcgaaa

SEQ ID NO: 202735 - DNA, 25 bp, SARS Virus
atcgtcgatgatctcccgtcgaaaa

SEQ ID NO: 202736 - DNA, 25 bp, SARS Virus
tcgtcgatgatgccccgtcgaaaac

SEQ ID NO: 202737 - DNA, 25 bp, SARS Virus
cgtcgatgatgtcccgtcgaaaaca

SEQ ID NO: 202738 - DNA, 25 bp, SARS Virus
gtcgatgatgtcccgtcgaaaacag

SEQ ID NO: 202739 - DNA, 25 bp, SARS Virus
tcgatgatgtcccgtcgaaaacagt

SEQ ID NO: 202740 - DNA, 25 bp, SARS Virus
cgatgatgtcccctcgaaaacagta

SEQ ID NO: 202741 - DNA, 25 bp, SARS Virus
gatgatgtcccgccgaaaacagtaa

SEQ ID NO: 202742 - DNA, 25 bp, SARS Virus
atgatgtcccgtcgaaaacagtaaa

SEQ ID NO: 202743 - DNA, 25 bp, SARS Virus
tgatgtcccgtccaaaacagtaaaa

SEQ ID NO: 202744 - DNA, 25 bp, SARS Virus
gatgtcccgtcgcaaacagtaaaaa

SEQ ID NO: 202745 - DNA, 25 bp, SARS Virus
atgtcccgtcgacaacagtaaaaac

SEQ ID NO: 202746 - DNA, 25 bp, SARS Virus
tgtcccgtcgaacacagtaaaaaca

SEQ ID NO: 202747 - DNA, 25 bp, SARS Virus
gtcccgtcgaaaccagtaaaaacat

SEQ ID NO: 202748 - DNA, 25 bp, SARS Virus
tcccgtcgaaaacagtaaaaacata

SEQ ID NO: 202749 - DNA, 25 bp, SARS Virus
cccgtcgaaaaccgtaaaaacatac

SEQ ID NO: 202750 - DNA, 25 bp, SARS Virus
ccgtcgaaaacactaaaaacatact

SEQ ID NO: 202751 - DNA, 25 bp, SARS Virus
cgtcgaaaacagcaaaaacatactt

SEQ ID NO: 202752 - DNA, 25 bp, SARS Virus
gtcgaaaacagtcaaaacatacttg

SEQ ID NO: 202753 - DNA, 25 bp, SARS Virus
tcgaaaacagtacaaacatacttgg

SEQ ID NO: 202754 - DNA, 25 bp, SARS Virus
cgaaaacagtaacaacatacttggt

SEQ ID NO: 202755 - DNA, 25 bp, SARS Virus
gaaaacagtaaacacatacttggtg

SEQ ID NO: 202756 - DNA, 25 bp, SARS Virus
aaaacagtaaaaccatacttggtgg

SEQ ID NO: 202757 - DNA, 25 bp, SARS Virus
aaacagtaaaaacatacttggtggt

SEQ ID NO: 202758 - DNA, 25 bp, SARS Virus
aacagtaaaaacctacttggtggtg

SEQ ID NO: 202759 - DNA, 25 bp, SARS Virus
acagtaaaaacacacttggtggtgc

SEQ ID NO: 202760 - DNA, 25 bp, SARS Virus
cagtaaaaacatccttggtggtgcg

SEQ ID NO: 202761 - DNA, 25 bp, SARS Virus
agtaaaaacatacttggtggtgcga

SEQ ID NO: 202762 - DNA, 25 bp, SARS Virus
gtaaaaacatacctggtggtgcgac

SEQ ID NO: 202763 - DNA, 25 bp, SARS Virus
taaaaacatactcggtggtgcgacc

SEQ ID NO: 202764 - DNA, 25 bp, SARS Virus
aaaaacatacttcgtggtgcgaccg

SEQ ID NO: 202765 - DNA, 25 bp, SARS Virus
aaaacatacttgctggtgcgaccga

SEQ ID NO: 202766 - DNA, 25 bp, SARS Virus
aaacatacttggcggtgcgaccgat

SEQ ID NO: 202767 - DNA, 25 bp, SARS Virus
aacatacttggtcgtgcgaccgatt

SEQ ID NO: 202768 - DNA, 25 bp, SARS Virus
acatacttggtgctgcgaccgattt

SEQ ID NO: 202769 - DNA, 25 bp, SARS Virus
catacttggtggcgcgaccgatttg

SEQ ID NO: 202770 - DNA, 25 bp, SARS Virus
atacttggtggtccgaccgatttgg

SEQ ID NO: 202771 - DNA, 25 bp, SARS Virus
tacttggtggtgcgaccgatttggt

SEQ ID NO: 202772 - DNA, 25 bp, SARS Virus
acttggtggtgccaccgatttggta

SEQ ID NO: 202773 - DNA, 25 bp, SARS Virus
cttggtggtgcgcccgatttggtac

SEQ ID NO: 202774 - DNA, 25 bp, SARS Virus
ttggtggtgcgaccgatttggtacg

SEQ ID NO: 202775 - DNA, 25 bp, SARS Virus
tggtggtgcgaccgatttggtacgc

SEQ ID NO: 202776 - DNA, 25 bp, SARS Virus
ggtggtgcgacccatttggtacgca

SEQ ID NO: 202777 - DNA, 25 bp, SARS Virus
gtggtgcgaccgctttggtacgcag

SEQ ID NO: 202778 - DNA, 25 bp, SARS Virus
tggtgcgaccgacttggtacgcagt

SEQ ID NO: 202779 - DNA, 25 bp, SARS Virus
ggtgcgaccgatctggtacgcagtt

SEQ ID NO: 202780 - DNA, 25 bp, SARS Virus
gtgcgaccgattcggtacgcagttt

SEQ ID NO: 202781 - DNA, 25 bp, SARS Virus
tgcgaccgatttcgtacgcagtttt

SEQ ID NO: 202782 - DNA, 25 bp, SARS Virus
gcgaccgatttgctacgcagttttg

SEQ ID NO: 202783 - DNA, 25 bp, SARS Virus
cgaccgatttggcacgcagttttgg

SEQ ID NO: 202784 - DNA, 25 bp, SARS Virus
gaccgatttggtccgcagttttggt

SEQ ID NO: 202785 - DNA, 25 bp, SARS Virus
accgatttggtacgcagttttggtc

SEQ ID NO: 202786 - DNA, 25 bp, SARS Virus
ccgatttggtacccagttttggtcg

SEQ ID NO: 202787 - DNA, 25 bp, SARS Virus
cgatttggtacgcagttttggtcgt

SEQ ID NO: 202788 - DNA, 25 bp, SARS Virus
gatttggtacgccgttttggtcgta

SEQ ID NO: 202789 - DNA, 25 bp, SARS Virus
atttggtacgcacttttggtcgtac

SEQ ID NO: 202790 - DNA, 25 bp, SARS Virus
tttggtacgcagctttggtcgtaca

SEQ ID NO: 202791 - DNA, 25 bp, SARS Virus
ttggtacgcagtcttggtcgtacaa

SEQ ID NO: 202792 - DNA, 25 bp, SARS Virus
tggtacgcagttctggtcgtacaaa

SEQ ID NO: 202793 - DNA, 25 bp, SARS Virus
ggtacgcagtttcggtcgtacaaat

SEQ ID NO: 202794 - DNA, 25 bp, SARS Virus
gtacgcagttttcgtcgtacaaata

SEQ ID NO: 202795 - DNA, 25 bp, SARS Virus
tacgcagttttgctcgtacaaataa

SEQ ID NO: 202796 - DNA, 25 bp, SARS Virus
acgcagttttggccgtacaaataaa

SEQ ID NO: 202797 - DNA, 25 bp, SARS Virus
cgcagttttggtcgtacaaataaac

SEQ ID NO: 202798 - DNA, 25 bp, SARS Virus
gcagttttggtcctacaaataaacg

SEQ ID NO: 202799 - DNA, 25 bp, SARS Virus
cagttttggtcgcacaaataaacgt

SEQ ID NO: 202800 - DNA, 25 bp, SARS Virus
agttttggtcgtccaaataaacgtt

SEQ ID NO: 202801 - DNA, 25 bp, SARS Virus
gttttggtcgtacaaataaacgttt

SEQ ID NO: 202802 - DNA, 25 bp, SARS Virus
ttttggtcgtaccaataaacgtttt

SEQ ID NO: 202803 - DNA, 25 bp, SARS Virus
tttggtcgtacacataaacgttttg

SEQ ID NO: 202804 - DNA, 25 bp, SARS Virus
ttggtcgtacaactaaacgttttgt

SEQ ID NO: 202805 - DNA, 25 bp, SARS Virus
tggtcgtacaaacaaacgttttgtt

SEQ ID NO: 202806 - DNA, 25 bp, SARS Virus
ggtcgtacaaatcaacgttttgtta

SEQ ID NO: 202807 - DNA, 25 bp, SARS Virus
gtcgtacaaatacacgttttgttag

SEQ ID NO: 202808 - DNA, 25 bp, SARS Virus
tcgtacaaataaccgttttgttagt

SEQ ID NO: 202809 - DNA, 25 bp, SARS Virus
cgtacaaataaacgttttgttagta

SEQ ID NO: 202810 - DNA, 25 bp, SARS Virus
gtacaaataaaccttttgttagtag

SEQ ID NO: 202811 - DNA, 25 bp, SARS Virus
tacaaataaacgctttgttagtagt

SEQ ID NO: 202812 - DNA, 25 bp, SARS Virus
acaaataaacgtcttgttagtagtc

SEQ ID NO: 202813 - DNA, 25 bp, SARS Virus
caaataaacgttctgttagtagtca

SEQ ID NO: 202814 - DNA, 25 bp, SARS Virus
aaataaacgtttcgttagtagtcat

SEQ ID NO: 202815 - DNA, 25 bp, SARS Virus
aataaacgttttcttagtagtcatc

SEQ ID NO: 202816 - DNA, 25 bp, SARS Virus
ataaacgttttgctagtagtcatct

SEQ ID NO: 202817 - DNA, 25 bp, SARS Virus
taaacgttttgtcagtagtcatctt

SEQ ID NO: 202818 - DNA, 25 bp, SARS Virus
aaacgttttgttcgtagtcatcttt

SEQ ID NO: 202819 - DNA, 25 bp, SARS Virus
aacgttttgttactagtcatcttta

SEQ ID NO: 202820 - DNA, 25 bp, SARS Virus
acgttttgttagcagtcatctttac

SEQ ID NO: 202821 - DNA, 25 bp, SARS Virus
cgttttgttagtcgtcatctttact

SEQ ID NO: 202822 - DNA, 25 bp, SARS Virus
gttttgttagtactcatctttacta

SEQ ID NO: 202823 - DNA, 25 bp, SARS Virus
ttttgttagtagccatctttactac

SEQ ID NO: 202824 - DNA, 25 bp, SARS Virus
tttgttagtagtcatctttactaca

SEQ ID NO: 202825 - DNA, 25 bp, SARS Virus
ttgttagtagtcctctttactacag

SEQ ID NO: 202826 - DNA, 25 bp, SARS Virus
tgttagtagtcacctttactacagt

SEQ ID NO: 202827 - DNA, 25 bp, SARS Virus
gttagtagtcatctttactacagtg

SEQ ID NO: 202828 - DNA, 25 bp, SARS Virus
ttagtagtcatccttactacagtgc

SEQ ID NO: 202829 - DNA, 25 bp, SARS Virus
tagtagtcatctctactacagtgct

SEQ ID NO: 202830 - DNA, 25 bp, SARS Virus
agtagtcatcttcactacagtgctc

SEQ ID NO: 202831 - DNA, 25 bp, SARS Virus
gtagtcatctttcctacagtgctca

SEQ ID NO: 202832 - DNA, 25 bp, SARS Virus
tagtcatctttactacagtgctcac

SEQ ID NO: 202833 - DNA, 25 bp, SARS Virus
agtcatctttaccacagtgctcact

SEQ ID NO: 202834 - DNA, 25 bp, SARS Virus
gtcatctttactccagtgctcactg

SEQ ID NO: 202835 - DNA, 25 bp, SARS Virus
tcatctttactacagtgctcactgt

SEQ ID NO: 202836 - DNA, 25 bp, SARS Virus
catctttactaccgtgctcactgtg

SEQ ID NO: 202837 - DNA, 25 bp, SARS Virus
atctttactacactgctcactgtgg

SEQ ID NO: 202838 - DNA, 25 bp, SARS Virus
tctttactacagcgctcactgtggt

SEQ ID NO: 202839 - DNA, 25 bp, SARS Virus
ctttactacagtcctcactgtggta

SEQ ID NO: 202840 - DNA, 25 bp, SARS Virus
tttactacagtgctcactgtggtag

SEQ ID NO: 202841 - DNA, 25 bp, SARS Virus
ttactacagtgcccactgtggtagg

SEQ ID NO: 202842 - DNA, 25 bp, SARS Virus
tactacagtgctcactgtggtagga

SEQ ID NO: 202843 - DNA, 25 bp, SARS Virus
actacagtgctccctgtggtaggac

SEQ ID NO: 202844 - DNA, 25 bp, SARS Virus
ctacagtgctcactgtggtaggact

SEQ ID NO: 202845 - DNA, 25 bp, SARS Virus
tacagtgctcaccgtggtaggactt

SEQ ID NO: 202846 - DNA, 25 bp, SARS Virus
acagtgctcactctggtaggactta

SEQ ID NO: 202847 - DNA, 25 bp, SARS Virus
cagtgctcactgcggtaggacttac

SEQ ID NO: 202848 - DNA, 25 bp, SARS Virus
agtgctcactgtcgtaggacttacc

SEQ ID NO: 202849 - DNA, 25 bp, SARS Virus
gtgctcactgtgctaggacttaccg

SEQ ID NO: 202850 - DNA, 25 bp, SARS Virus
tgctcactgtggcaggacttaccga

SEQ ID NO: 202851 - DNA, 25 bp, SARS Virus
gctcactgtggtcggacttaccgaa

SEQ ID NO: 202852 - DNA, 25 bp, SARS Virus
ctcactgtggtacgacttaccgaaa

SEQ ID NO: 202853 - DNA, 25 bp, SARS Virus
tcactgtggtagcacttaccgaaac

SEQ ID NO: 202854 - DNA, 25 bp, SARS Virus
cactgtggtaggccttaccgaaaca

SEQ ID NO: 202855 - DNA, 25 bp, SARS Virus
actgtggtaggacttaccgaaacat

SEQ ID NO: 202856 - DNA, 25 bp, SARS Virus
ctgtggtaggacctaccgaaacatt

SEQ ID NO: 202857 - DNA, 25 bp, SARS Virus
tgtggtaggactcaccgaaacattg

SEQ ID NO: 202858 - DNA, 25 bp, SARS Virus
gtggtaggacttcccgaaacattgg

SEQ ID NO: 202859 - DNA, 25 bp, SARS Virus
tggtaggacttaccgaaacattggt

SEQ ID NO: 202860 - DNA, 25 bp, SARS Virus
ggtaggacttaccgaaacattggtt

SEQ ID NO: 202861 - DNA, 25 bp, SARS Virus
gtaggacttacccaaacattggtta

SEQ ID NO: 202862 - DNA, 25 bp, SARS Virus
taggacttaccgcaacattggttac

SEQ ID NO: 202863 - DNA, 25 bp, SARS Virus
aggacttaccgacacattggttact

SEQ ID NO: 202864 - DNA, 25 bp, SARS Virus
ggacttaccgaaccattggttacta

SEQ ID NO: 202865 - DNA, 25 bp, SARS Virus
gacttaccgaaacattggttactaa

SEQ ID NO: 202866 - DNA, 25 bp, SARS Virus
acttaccgaaaccttggttactaaa

SEQ ID NO: 202867 - DNA, 25 bp, SARS Virus
cttaccgaaacactggttactaaag

SEQ ID NO: 202868 - DNA, 25 bp, SARS Virus
ttaccgaaacatcggttactaaagt

SEQ ID NO: 202869 - DNA, 25 bp, SARS Virus
taccgaaacattcgttactaaagta

SEQ ID NO: 202870 - DNA, 25 bp, SARS Virus
accgaaacattgcttactaaagtaa

SEQ ID NO: 202871 - DNA, 25 bp, SARS Virus
ccgaaacattggctactaaagtaaa

SEQ ID NO: 202872 - DNA, 25 bp, SARS Virus
cgaaacattggtcactaaagtaaac

SEQ ID NO: 202873 - DNA, 25 bp, SARS Virus
gaaacattggttcctaaagtaaaca

SEQ ID NO: 202874 - DNA, 25 bp, SARS Virus
aaacattggttactaaagtaaacac

SEQ ID NO: 202875 - DNA, 25 bp, SARS Virus
aacattggttaccaaagtaaacaca

SEQ ID NO: 202876 - DNA, 25 bp, SARS Virus
acattggttactcaagtaaacacat

SEQ ID NO: 202877 - DNA, 25 bp, SARS Virus
cattggttactacagtaaacacatt

SEQ ID NO: 202878 - DNA, 25 bp, SARS Virus
attggttactaacgtaaacacattg

SEQ ID NO: 202879 - DNA, 25 bp, SARS Virus
ttggttactaaactaaacacattgg

SEQ ID NO: 202880 - DNA, 25 bp, SARS Virus
tggttactaaagcaaacacattggt

SEQ ID NO: 202881 - DNA, 25 bp, SARS Virus
ggttactaaagtcaacacattggta

SEQ ID NO: 202882 - DNA, 25 bp, SARS Virus
gttactaaagtacacacattggtag

SEQ ID NO: 202883 - DNA, 25 bp, SARS Virus
ttactaaagtaaccacattggtagt

SEQ ID NO: 202884 - DNA, 25 bp, SARS Virus
tactaaagtaaacacattggtagta

SEQ ID NO: 202885 - DNA, 25 bp, SARS Virus
actaaagtaaacccattggtagtac

SEQ ID NO: 202886 - DNA, 25 bp, SARS Virus
ctaaagtaaacacattggtagtacc

SEQ ID NO: 202887 - DNA, 25 bp, SARS Virus
taaagtaaacaccttggtagtacct

SEQ ID NO: 202888 - DNA, 25 bp, SARS Virus
aaagtaaacacactggtagtaccta

SEQ ID NO: 202889 - DNA, 25 bp, SARS Virus
aagtaaacacatcggtagtacctaa

SEQ ID NO: 202890 - DNA, 25 bp, SARS Virus
agtaaacacattcgtagtacctaac

SEQ ID NO: 202891 - DNA, 25 bp, SARS Virus
gtaaacacattgctagtacctaact

SEQ ID NO: 202892 - DNA, 25 bp, SARS Virus
taaacacattggcagtacctaactg

SEQ ID NO: 202893 - DNA, 25 bp, SARS Virus
aaacacattggtcgtacctaactgt

SEQ ID NO: 202894 - DNA, 25 bp, SARS Virus
aacacattggtactacctaactgtt

SEQ ID NO: 202895 - DNA, 25 bp, SARS Virus
acacattggtagcacctaactgtta

SEQ ID NO: 202896 - DNA, 25 bp, SARS Virus
cacattggtagtccctaactgttac

SEQ ID NO: 202897 - DNA, 25 bp, SARS Virus
acattggtagtacctaactgttaca

SEQ ID NO: 202898 - DNA, 25 bp, SARS Virus
cattggtagtacctaactgttacat

SEQ ID NO: 202899 - DNA, 25 bp, SARS Virus
attggtagtacccaactgttacata

SEQ ID NO: 202900 - DNA, 25 bp, SARS Virus
ttggtagtacctcactgttacatac

SEQ ID NO: 202901 - DNA, 25 bp, SARS Virus
tggtagtacctacctgttacataca

SEQ ID NO: 202902 - DNA, 25 bp, SARS Virus
ggtagtacctaactgttacatacat

SEQ ID NO: 202903 - DNA, 25 bp, SARS Virus
gtagtacctaaccgttacatacatg

SEQ ID NO: 202904 - DNA, 25 bp, SARS Virus
tagtacctaactcttacatacatga

SEQ ID NO: 202905 - DNA, 25 bp, SARS Virus
agtacctaactgctacatacatgac

SEQ ID NO: 202906 - DNA, 25 bp, SARS Virus
gtacctaactgtcacatacatgacc

SEQ ID NO: 202907 - DNA, 25 bp, SARS Virus
tacctaactgttccatacatgaccg

SEQ ID NO: 202908 - DNA, 25 bp, SARS Virus
acctaactgttacatacatgaccgt

SEQ ID NO: 202909 - DNA, 25 bp, SARS Virus
cctaactgttacctacatgaccgta

SEQ ID NO: 202910 - DNA, 25 bp, SARS Virus
ctaactgttacacacatgaccgtat

SEQ ID NO: 202911 - DNA, 25 bp, SARS Virus
taactgttacatccatgaccgtatt

SEQ ID NO: 202912 - DNA, 25 bp, SARS Virus
aactgttacatacatgaccgtattg

SEQ ID NO: 202913 - DNA, 25 bp, SARS Virus
actgttacatacctgaccgtattgc

SEQ ID NO: 202914 - DNA, 25 bp, SARS Virus
ctgttacatacacgaccgtattgct

SEQ ID NO: 202915 - DNA, 25 bp, SARS Virus
tgttacatacatcaccgtattgcta

SEQ ID NO: 202916 - DNA, 25 bp, SARS Virus
gttacatacatgcccgtattgctat

SEQ ID NO: 202917 - DNA, 25 bp, SARS Virus
ttacatacatgaccgtattgctata

SEQ ID NO: 202918 - DNA, 25 bp, SARS Virus
tacatacatgaccgtattgctatat

SEQ ID NO: 202919 - DNA, 25 bp, SARS Virus
acatacatgaccctattgctatatt

SEQ ID NO: 202920 - DNA, 25 bp, SARS Virus
catacatgaccgcattgctatattg

SEQ ID NO: 202921 - DNA, 25 bp, SARS Virus
atacatgaccgtcttgctatattgt

SEQ ID NO: 202922 - DNA, 25 bp, SARS Virus
tacatgaccgtactgctatattgtt

SEQ ID NO: 202923 - DNA, 25 bp, SARS Virus
acatgaccgtatcgctatattgttt

SEQ ID NO: 202924 - DNA, 25 bp, SARS Virus
catgaccgtattcctatattgtttg

SEQ ID NO: 202925 - DNA, 25 bp, SARS Virus
atgaccgtattgctatattgtttgg

SEQ ID NO: 202926 - DNA, 25 bp, SARS Virus
tgaccgtattgccatattgtttggt

SEQ ID NO: 202927 - DNA, 25 bp, SARS Virus
gaccgtattgctctattgtttggtt

SEQ ID NO: 202928 - DNA, 25 bp, SARS Virus
accgtattgctacattgtttggtta

SEQ ID NO: 202929 - DNA, 25 bp, SARS Virus
ccgtattgctatcttgtttggttac

SEQ ID NO: 202930 - DNA, 25 bp, SARS Virus
cgtattgctatactgtttggttacg

SEQ ID NO: 202931 - DNA, 25 bp, SARS Virus
gtattgctatatcgtttggttacgt

SEQ ID NO: 202932 - DNA, 25 bp, SARS Virus
tattgctatattctttggttacgtc

SEQ ID NO: 202933 - DNA, 25 bp, SARS Virus
attgctatattgcttggttacgtcg

SEQ ID NO: 202934 - DNA, 25 bp, SARS Virus
ttgctatattgtctggttacgtcgt

SEQ ID NO: 202935 - DNA, 25 bp, SARS Virus
tgctatattgttcggttacgtcgtt

SEQ ID NO: 202936 - DNA, 25 bp, SARS Virus
gctatattgtttcgttacgtcgttc

SEQ ID NO: 202937 - DNA, 25 bp, SARS Virus
ctatattgtttgcttacgtcgttct

SEQ ID NO: 202938 - DNA, 25 bp, SARS Virus
tatattgtttggctacgtcgttctt

SEQ ID NO: 202939 - DNA, 25 bp, SARS Virus
atattgtttggtcacgtcgttcttg

SEQ ID NO: 202940 - DNA, 25 bp, SARS Virus
tattgtttggttccgtcgttcttgc

SEQ ID NO: 202941 - DNA, 25 bp, SARS Virus
attgtttggttacgtcgttcttgcg

SEQ ID NO: 202942 - DNA, 25 bp, SARS Virus
ttgtttggttacctcgttcttgcgt

SEQ ID NO: 202943 - DNA, 25 bp, SARS Virus
tgtttggttacgccgttcttgcgtg

SEQ ID NO: 202944 - DNA, 25 bp, SARS Virus
gtttggttacgtcgttcttgcgtgt

SEQ ID NO: 202945 - DNA, 25 bp, SARS Virus
tttggttacgtccttcttgcgtgtt

SEQ ID NO: 202946 - DNA, 25 bp, SARS Virus
ttggttacgtcgctcttgcgtgtta

SEQ ID NO: 202947 - DNA, 25 bp, SARS Virus
tggttacgtcgtccttgcgtgttat

SEQ ID NO: 202948 - DNA, 25 bp, SARS Virus
ggttacgtcgttcttgcgtgttatt

SEQ ID NO: 202949 - DNA, 25 bp, SARS Virus
gttacgtcgttcctgcgtgttatta

SEQ ID NO: 202950 - DNA, 25 bp, SARS Virus
ttacgtcgttctcgcgtgttattac

SEQ ID NO: 202951 - DNA, 25 bp, SARS Virus
tacgtcgttcttccgtgttattaca

SEQ ID NO: 202952 - DNA, 25 bp, SARS Virus
acgtcgttcttgcgtgttattacac

SEQ ID NO: 202953 - DNA, 25 bp, SARS Virus
cgtcgttcttgcctgttattacacc

SEQ ID NO: 202954 - DNA, 25 bp, SARS Virus
gtcgttcttgcgcgttattacaccg

SEQ ID NO: 202955 - DNA, 25 bp, SARS Virus
tcgttcttgcgtcttattacaccgg

SEQ ID NO: 202956 - DNA, 25 bp, SARS Virus
cgttcttgcgtgctattacaccgga

SEQ ID NO: 202957 - DNA, 25 bp, SARS Virus
gttcttgcgtgtcattacaccggaa

SEQ ID NO: 202958 - DNA, 25 bp, SARS Virus
ttcttgcgtgttcttacaccggaat

SEQ ID NO: 202959 - DNA, 25 bp, SARS Virus
tcttgcgtgttactacaccggaatt

SEQ ID NO: 202960 - DNA, 25 bp, SARS Virus
cttgcgtgttatcacaccggaattc

SEQ ID NO: 202961 - DNA, 25 bp, SARS Virus
ttgcgtgttattccaccggaattcg

SEQ ID NO: 202962 - DNA, 25 bp, SARS Virus
tgcgtgttattacaccggaattcgt

SEQ ID NO: 202963 - DNA, 25 bp, SARS Virus
gcgtgttattaccccggaattcgta

SEQ ID NO: 202964 - DNA, 25 bp, SARS Virus
cgtgttattacaccggaattcgtat

SEQ ID NO: 202965 - DNA, 25 bp, SARS Virus
gtgttattacaccggaattcgtatt

SEQ ID NO: 202966 - DNA, 25 bp, SARS Virus
tgttattacacccgaattcgtattc

SEQ ID NO: 202967 - DNA, 25 bp, SARS Virus
gttattacaccgcaattcgtattca

SEQ ID NO: 202968 - DNA, 25 bp, SARS Virus
ttattacaccggcattcgtattcaa

SEQ ID NO: 202969 - DNA, 25 bp, SARS Virus
tattacaccggacttcgtattcaaa

SEQ ID NO: 202970 - DNA, 25 bp, SARS Virus
attacaccggaactcgtattcaaat

SEQ ID NO: 202971 - DNA, 25 bp, SARS Virus
ttacaccggaatccgtattcaaatt

SEQ ID NO: 202972 - DNA, 25 bp, SARS Virus
tacaccggaattcgtattcaaattt

SEQ ID NO: 202973 - DNA, 25 bp, SARS Virus
acaccggaattcctattcaaatttt

SEQ ID NO: 202974 - DNA, 25 bp, SARS Virus
caccggaattcgcattcaaattttg

SEQ ID NO: 202975 - DNA, 25 bp, SARS Virus
accggaattcgtcttcaaattttgt

SEQ ID NO: 202976 - DNA, 25 bp, SARS Virus
ccggaattcgtactcaaattttgtt

SEQ ID NO: 202977 - DNA, 25 bp, SARS Virus
cggaattcgtatccaaattttgttc

SEQ ID NO: 202978 - DNA, 25 bp, SARS Virus
ggaattcgtattcaaattttgttca

SEQ ID NO: 202979 - DNA, 25 bp, SARS Virus
gaattcgtattccaattttgttcat

SEQ ID NO: 202980 - DNA, 25 bp, SARS Virus
aattcgtattcacattttgttcatg

SEQ ID NO: 202981 - DNA, 25 bp, SARS Virus
attcgtattcaacttttgttcatga

SEQ ID NO: 202982 - DNA, 25 bp, SARS Virus
ttcgtattcaaactttgttcatgat

SEQ ID NO: 202983 - DNA, 25 bp, SARS Virus
tcgtattcaaatcttgttcatgatt

SEQ ID NO: 202984 - DNA, 25 bp, SARS Virus
cgtattcaaattctgttcatgattg

SEQ ID NO: 202985 - DNA, 25 bp, SARS Virus
gtattcaaatttcgttcatgattgt

SEQ ID NO: 202986 - DNA, 25 bp, SARS Virus
tattcaaattttcttcatgattgtt

SEQ ID NO: 202987 - DNA, 25 bp, SARS Virus
attcaaattttgctcatgattgtta

SEQ ID NO: 202988 - DNA, 25 bp, SARS Virus
ttcaaattttgtccatgattgttag

SEQ ID NO: 202989 - DNA, 25 bp, SARS Virus
tcaaattttgttcatgattgttaga

SEQ ID NO: 202990 - DNA, 25 bp, SARS Virus
caaattttgttcctgattgttagaa

SEQ ID NO: 202991 - DNA, 25 bp, SARS Virus
aaattttgttcacgattgttagaat

SEQ ID NO: 202992 - DNA, 25 bp, SARS Virus
aattttgttcatcattgttagaatg

SEQ ID NO: 202993 - DNA, 25 bp, SARS Virus
attttgttcatgcttgttagaatgg

SEQ ID NO: 202994 - DNA, 25 bp, SARS Virus
ttttgttcatgactgttagaatggt

SEQ ID NO: 202995 - DNA, 25 bp, SARS Virus
tttgttcatgatcgttagaatggtg

SEQ ID NO: 202996 - DNA, 25 bp, SARS Virus
ttgttcatgattcttagaatggtgg

SEQ ID NO: 202997 - DNA, 25 bp, SARS Virus
tgttcatgattgctagaatggtggg

SEQ ID NO: 202998 - DNA, 25 bp, SARS Virus
gttcatgattgtcagaatggtggga

SEQ ID NO: 202999 - DNA, 25 bp, SARS Virus
ttcatgattgttcgaatggtgggaa

SEQ ID NO: 203000 - DNA, 25 bp, SARS Virus
tcatgattgttacaatggtgggaac

SEQ ID NO: 203001 - DNA, 25 bp, SARS Virus
catgattgttagcatggtgggaact

SEQ ID NO: 203002 - DNA, 25 bp, SARS Virus
atgattgttagactggtgggaactc

SEQ ID NO: 203003 - DNA, 25 bp, SARS Virus
tgattgttagaacggtgggaactca

SEQ ID NO: 203004 - DNA, 25 bp, SARS Virus
gattgttagaatcgtgggaactcac

SEQ ID NO: 203005 - DNA, 25 bp, SARS Virus
attgttagaatgctgggaactcact

SEQ ID NO: 203006 - DNA, 25 bp, SARS Virus
ttgttagaatggcgggaactcactc

SEQ ID NO: 203007 - DNA, 25 bp, SARS Virus
tgttagaatggtcggaactcactct

SEQ ID NO: 203008 - DNA, 25 bp, SARS Virus
gttagaatggtgcgaactcactcta

SEQ ID NO: 203009 - DNA, 25 bp, SARS Virus
ttagaatggtggcaactcactctaa

SEQ ID NO: 203010 - DNA, 25 bp, SARS Virus
tagaatggtgggcactcactctaaa

SEQ ID NO: 203011 - DNA, 25 bp, SARS Virus
agaatggtgggacctcactctaaaa

SEQ ID NO: 203012 - DNA, 25 bp, SARS Virus
gaatggtgggaactcactctaaaat

SEQ ID NO: 203013 - DNA, 25 bp, SARS Virus
aatggtgggaacccactctaaaatc

SEQ ID NO: 203014 - DNA, 25 bp, SARS Virus
atggtgggaactcactctaaaatca

SEQ ID NO: 203015 - DNA, 25 bp, SARS Virus
tggtgggaactccctctaaaatcat

SEQ ID NO: 203016 - DNA, 25 bp, SARS Virus
ggtgggaactcactctaaaatcatc

SEQ ID NO: 203017 - DNA, 25 bp, SARS Virus
gtgggaactcaccctaaaatcatca

SEQ ID NO: 203018 - DNA, 25 bp, SARS Virus
tgggaactcactctaaaatcatcaa

SEQ ID NO: 203019 - DNA, 25 bp, SARS Virus
gggaactcactccaaaatcatcaat

SEQ ID NO: 203020 - DNA, 25 bp, SARS Virus
ggaactcactctcaaatcatcaata

SEQ ID NO: 203021 - DNA, 25 bp, SARS Virus
gaactcactctacaatcatcaatac

SEQ ID NO: 203022 - DNA, 25 bp, SARS Virus
aactcactctaacatcatcaatact

SEQ ID NO: 203023 - DNA, 25 bp, SARS Virus
actcactctaaactcatcaatactg

SEQ ID NO: 203024 - DNA, 25 bp, SARS Virus
ctcactctaaaaccatcaatactgt

SEQ ID NO: 203025 - DNA, 25 bp, SARS Virus
tcactctaaaatcatcaatactgta

SEQ ID NO: 203026 - DNA, 25 bp, SARS Virus
cactctaaaatcctcaatactgtaa

SEQ ID NO: 203027 - DNA, 25 bp, SARS Virus
actctaaaatcaccaatactgtaac

SEQ ID NO: 203028 - DNA, 25 bp, SARS Virus
ctctaaaatcatcaatactgtaact

SEQ ID NO: 203029 - DNA, 25 bp, SARS Virus
tctaaaatcatccatactgtaactg

SEQ ID NO: 203030 - DNA, 25 bp, SARS Virus
ctaaaatcatcactactgtaactgt

SEQ ID NO: 203031 - DNA, 25 bp, SARS Virus
taaaatcatcaacactgtaactgtt

SEQ ID NO: 203032 - DNA, 25 bp, SARS Virus
aaaatcatcaatcctgtaactgttg

SEQ ID NO: 203033 - DNA, 25 bp, SARS Virus
aaatcatcaatactgtaactgttgg

SEQ ID NO: 203034 - DNA, 25 bp, SARS Virus
aatcatcaataccgtaactgttgga

SEQ ID NO: 203035 - DNA, 25 bp, SARS Virus
atcatcaatactctaactgttggac

SEQ ID NO: 203036 - DNA, 25 bp, SARS Virus
tcatcaatactgcaactgttggaca

SEQ ID NO: 203037 - DNA, 25 bp, SARS Virus
catcaatactgtcactgttggacag

SEQ ID NO: 203038 - DNA, 25 bp, SARS Virus
atcaatactgtacctgttggacaga

SEQ ID NO: 203039 - DNA, 25 bp, SARS Virus
tcaatactgtaactgttggacagat

SEQ ID NO: 203040 - DNA, 25 bp, SARS Virus
caatactgtaaccgttggacagatc

SEQ ID NO: 203041 - DNA, 25 bp, SARS Virus
tcgtcgttcttgggttcgtctccat

SEQ ID NO: 203042 - DNA, 25 bp, SARS Virus
cgtcgttcttgcgttcgtctccatc

SEQ ID NO: 203043 - DNA, 25 bp, SARS Virus
gtcgttcttgcggtcgtctccatcg

SEQ ID NO: 203044 - DNA, 25 bp, SARS Virus
tcgttcttgcgtgcgtctccatcgt

SEQ ID NO: 203045 - DNA, 25 bp, SARS Virus
cgttcttgcgttggtctccatcgtt

SEQ ID NO: 203046 - DNA, 25 bp, SARS Virus
gttcttgcgttcgtctccatcgttt

SEQ ID NO: 203047 - DNA, 25 bp, SARS Virus
ttcttgcgttcggctccatcgtttt

SEQ ID NO: 203048 - DNA, 25 bp, SARS Virus
tcttgcgttcgtgtccatcgtttta

SEQ ID NO: 203049 - DNA, 25 bp, SARS Virus
cttgcgttcgtcgccatcgttttag

SEQ ID NO: 203050 - DNA, 25 bp, SARS Virus
ttgcgttcgtctgcatcgttttagt

SEQ ID NO: 203051 - DNA, 25 bp, SARS Virus
tgcgttcgtctcgatcgttttagtg

SEQ ID NO: 203052 - DNA, 25 bp, SARS Virus
gcgttcgtctccgtcgttttagtga

SEQ ID NO: 203053 - DNA, 25 bp, SARS Virus
cgttcgtctccagcgttttagtgat

SEQ ID NO: 203054 - DNA, 25 bp, SARS Virus
gttcgtctccatggttttagtgata

SEQ ID NO: 203055 - DNA, 25 bp, SARS Virus
ttcgtctccatcgttttagtgatat

SEQ ID NO: 203056 - DNA, 25 bp, SARS Virus
tcgtctccatcggtttagtgatatg

SEQ ID NO: 203057 - DNA, 25 bp, SARS Virus
cgtctccatcgtgttagtgatatga

SEQ ID NO: 203058 - DNA, 25 bp, SARS Virus
gtctccatcgttgtagtgatatgag

SEQ ID NO: 203059 - DNA, 25 bp, SARS Virus
tctccatcgtttgagtgatatgagt

SEQ ID NO: 203060 - DNA, 25 bp, SARS Virus
ctccatcgttttggtgatatgagtt

SEQ ID NO: 203061 - DNA, 25 bp, SARS Virus
tccatcgttttagtgatatgagtta

SEQ ID NO: 203062 - DNA, 25 bp, SARS Virus
ccatcgttttagggatatgagttac

SEQ ID NO: 203063 - DNA, 25 bp, SARS Virus
catcgttttagtgatatgagttact

SEQ ID NO: 203064 - DNA, 25 bp, SARS Virus
atcgttttagtggtatgagttactc

SEQ ID NO: 203065 - DNA, 25 bp, SARS Virus
tcgttttagtgagatgagttactca

SEQ ID NO: 203066 - DNA, 25 bp, SARS Virus
cgttttagtgatgtgagttactcaa

SEQ ID NO: 203067 - DNA, 25 bp, SARS Virus
gttttagtgataggagttactcaaa

SEQ ID NO: 203068 - DNA, 25 bp, SARS Virus
ttttagtgatatgagttactcaaac

SEQ ID NO: 203069 - DNA, 25 bp, SARS Virus
tttagtgatatgggttactcaaacc

SEQ ID NO: 203070 - DNA, 25 bp, SARS Virus
ttagtgatatgagttactcaaacct

SEQ ID NO: 203071 - DNA, 25 bp, SARS Virus
tagtgatatgaggtactcaaacctt

SEQ ID NO: 203072 - DNA, 25 bp, SARS Virus
agtgatatgagtgactcaaaccttc

SEQ ID NO: 203073 - DNA, 25 bp, SARS Virus
gtgatatgagttgctcaaaccttcc

SEQ ID NO: 203074 - DNA, 25 bp, SARS Virus
tgatatgagttagtcaaaccttcca

SEQ ID NO: 203075 - DNA, 25 bp, SARS Virus
gatatgagttacgcaaaccttccac

SEQ ID NO: 203076 - DNA, 25 bp, SARS Virus
atatgagttactgaaaccttccaca

SEQ ID NO: 203077 - DNA, 25 bp, SARS Virus
tatgagttactcgaaccttccacac

SEQ ID NO: 203078 - DNA, 25 bp, SARS Virus
atgagttactcagaccttccacaca

SEQ ID NO: 203079 - DNA, 25 bp, SARS Virus
tgagttactcaagccttccacacat

SEQ ID NO: 203080 - DNA, 25 bp, SARS Virus
gagttactcaaagcttccacacatc

SEQ ID NO: 203081 - DNA, 25 bp, SARS Virus
agttactcaaacgttccacacatcg

SEQ ID NO: 203082 - DNA, 25 bp, SARS Virus
gttactcaaaccgtccacacatcgt

SEQ ID NO: 203083 - DNA, 25 bp, SARS Virus
ttactcaaacctgccacacatcgtt

SEQ ID NO: 203084 - DNA, 25 bp, SARS Virus
tactcaaaccttgcacacatcgttt

SEQ ID NO: 203085 - DNA, 25 bp, SARS Virus
actcaaaccttcgacacatcgttta

SEQ ID NO: 203086 - DNA, 25 bp, SARS Virus
ctcaaaccttccgcacatcgtttac

SEQ ID NO: 203087 - DNA, 25 bp, SARS Virus
tcaaaccttccagacatcgtttaca

SEQ ID NO: 203088 - DNA, 25 bp, SARS Virus
caaaccttccacgcatcgtttacaa

SEQ ID NO: 203089 - DNA, 25 bp, SARS Virus
aaaccttccacagatcgtttacaac

SEQ ID NO: 203090 - DNA, 25 bp, SARS Virus
aaccttccacacgtcgtttacaacg

SEQ ID NO: 203091 - DNA, 25 bp, SARS Virus
accttccacacagcgtttacaacgg

SEQ ID NO: 203092 - DNA, 25 bp, SARS Virus
ccttccacacatggtttacaacggt

SEQ ID NO: 203093 - DNA, 25 bp, SARS Virus
cttccacacatcgtttacaacggtt

SEQ ID NO: 203094 - DNA, 25 bp, SARS Virus
ttccacacatcggttacaacggttg

SEQ ID NO: 203095 - DNA, 25 bp, SARS Virus
tccacacatcgtgtacaacggttgt

SEQ ID NO: 203096 - DNA, 25 bp, SARS Virus
ccacacatcgttgacaacggttgtc

SEQ ID NO: 203097 - DNA, 25 bp, SARS Virus
cacacatcgtttgcaacggttgtcg

SEQ ID NO: 203098 - DNA, 25 bp, SARS Virus
acacatcgtttagaacggttgtcgt

SEQ ID NO: 203099 - DNA, 25 bp, SARS Virus
cacatcgtttacgacggttgtcgtg

SEQ ID NO: 203100 - DNA, 25 bp, SARS Virus
acatcgtttacagcggttgtcgtga

SEQ ID NO: 203101 - DNA, 25 bp, SARS Virus
catcgtttacaagggttgtcgtgat

SEQ ID NO: 203102 - DNA, 25 bp, SARS Virus
atcgtttacaacggttgtcgtgatt

SEQ ID NO: 203103 - DNA, 25 bp, SARS Virus
tcgtttacaacggttgtcgtgattt

SEQ ID NO: 203104 - DNA, 25 bp, SARS Virus
cgtttacaacgggtgtcgtgatttt

SEQ ID NO: 203105 - DNA, 25 bp, SARS Virus
gtttacaacggtggtcgtgattttt

SEQ ID NO: 203106 - DNA, 25 bp, SARS Virus
tttacaacggttgtcgtgatttttg

SEQ ID NO: 203107 - DNA, 25 bp, SARS Virus
ttacaacggttggcgtgatttttgt

SEQ ID NO: 203108 - DNA, 25 bp, SARS Virus
tacaacggttgtggtgatttttgtg

SEQ ID NO: 203109 - DNA, 25 bp, SARS Virus
acaacggttgtcgtgatttttgtgc

SEQ ID NO: 203110 - DNA, 25 bp, SARS Virus
caacggttgtcgggatttttgtgct

SEQ ID NO: 203111 - DNA, 25 bp, SARS Virus
aacggttgtcgtgatttttgtgctc

SEQ ID NO: 203112 - DNA, 25 bp, SARS Virus
acggttgtcgtggtttttgtgctcc

SEQ ID NO: 203113 - DNA, 25 bp, SARS Virus
cggttgtcgtgagttttgtgctcca

SEQ ID NO: 203114 - DNA, 25 bp, SARS Virus
ggttgtcgtgatgtttgtgctccat

SEQ ID NO: 203115 - DNA, 25 bp, SARS Virus
gttgtcgtgattgttgtgctccatc

SEQ ID NO: 203116 - DNA, 25 bp, SARS Virus
ttgtcgtgatttgtgtgctccatct

SEQ ID NO: 203117 - DNA, 25 bp, SARS Virus
tgtcgtgattttggtgctccatctt

SEQ ID NO: 203118 - DNA, 25 bp, SARS Virus
gtcgtgatttttgtgctccatcttt

SEQ ID NO: 203119 - DNA, 25 bp, SARS Virus
tcgtgatttttgggctccatctttt

SEQ ID NO: 203120 - DNA, 25 bp, SARS Virus
cgtgatttttgtgctccatctttta

SEQ ID NO: 203121 - DNA, 25 bp, SARS Virus
gtgatttttgtggtccatcttttac

SEQ ID NO: 203122 - DNA, 25 bp, SARS Virus
tgatttttgtgcgccatcttttacg

SEQ ID NO: 203123 - DNA, 25 bp, SARS Virus
gatttttgtgctgcatcttttacgt

SEQ ID NO: 203124 - DNA, 25 bp, SARS Virus
atttttgtgctcgatcttttacgtt

SEQ ID NO: 203125 - DNA, 25 bp, SARS Virus
tttttgtgctccgtcttttacgttc

SEQ ID NO: 203126 - DNA, 25 bp, SARS Virus
ttttgtgctccagcttttacgttct

SEQ ID NO: 203127 - DNA, 25 bp, SARS Virus
tttgtgctccatgttttacgttctt

SEQ ID NO: 203128 - DNA, 25 bp, SARS Virus
ttgtgctccatcgtttacgttcttc

SEQ ID NO: 203129 - DNA, 25 bp, SARS Virus
tgtgctccatctgttacgttcttca

SEQ ID NO: 203130 - DNA, 25 bp, SARS Virus
gtgctccatcttgtacgttcttcag

SEQ ID NO: 203131 - DNA, 25 bp, SARS Virus
tgctccatctttgacgttcttcagt

SEQ ID NO: 203132 - DNA, 25 bp, SARS Virus
gctccatcttttgcgttcttcagtg

SEQ ID NO: 203133 - DNA, 25 bp, SARS Virus
ctccatcttttaggttcttcagtgg

SEQ ID NO: 203134 - DNA, 25 bp, SARS Virus
tccatcttttacgttcttcagtggt

SEQ ID NO: 203135 - DNA, 25 bp, SARS Virus
ccatcttttacggtcttcagtggta

SEQ ID NO: 203136 - DNA, 25 bp, SARS Virus
catcttttacgtgcttcagtggtaa

SEQ ID NO: 203137 - DNA, 25 bp, SARS Virus
atcttttacgttgttcagtggtaac

SEQ ID NO: 203138 - DNA, 25 bp, SARS Virus
tcttttacgttcgtcagtggtaact

SEQ ID NO: 203139 - DNA, 25 bp, SARS Virus
cttttacgttctgcagtggtaacta

SEQ ID NO: 203140 - DNA, 25 bp, SARS Virus
ttttacgttcttgagtggtaactaa

SEQ ID NO: 203141 - DNA, 25 bp, SARS Virus
tttacgttcttcggtggtaactaac

SEQ ID NO: 203142 - DNA, 25 bp, SARS Virus
ttacgttcttcagtggtaactaacg

SEQ ID NO: 203143 - DNA, 25 bp, SARS Virus
tacgttcttcaggggtaactaacga

SEQ ID NO: 203144 - DNA, 25 bp, SARS Virus
acgttcttcagtggtaactaacgag

SEQ ID NO: 203145 - DNA, 25 bp, SARS Virus
cgttcttcagtggtaactaacgaga

SEQ ID NO: 203146 - DNA, 25 bp, SARS Virus
gttcttcagtgggaactaacgagag

SEQ ID NO: 203147 - DNA, 25 bp, SARS Virus
ttcttcagtggtgactaacgagagt

SEQ ID NO: 203148 - DNA, 25 bp, SARS Virus
tcttcagtggtagctaacgagagtc

SEQ ID NO: 203149 - DNA, 25 bp, SARS Virus
cttcagtggtaagtaacgagagtcg

SEQ ID NO: 203150 - DNA, 25 bp, SARS Virus
ttcagtggtaacgaacgagagtcgt

SEQ ID NO: 203151 - DNA, 25 bp, SARS Virus
tcagtggtaactgacgagagtcgtg

SEQ ID NO: 203152 - DNA, 25 bp, SARS Virus
cagtggtaactagcgagagtcgtgt

SEQ ID NO: 203153 - DNA, 25 bp, SARS Virus
agtggtaactaaggagagtcgtgtc

SEQ ID NO: 203154 - DNA, 25 bp, SARS Virus
gtggtaactaacgagagtcgtgtca

SEQ ID NO: 203155 - DNA, 25 bp, SARS Virus
tggtaactaacgggagtcgtgtcat

SEQ ID NO: 203156 - DNA, 25 bp, SARS Virus
ggtaactaacgagagtcgtgtcatg

SEQ ID NO: 203157 - DNA, 25 bp, SARS Virus
gtaactaacgagggtcgtgtcatgg

SEQ ID NO: 203158 - DNA, 25 bp, SARS Virus
taactaacgagagtcgtgtcatggg

SEQ ID NO: 203159 - DNA, 25 bp, SARS Virus
aactaacgagaggcgtgtcatgggc

SEQ ID NO: 203160 - DNA, 25 bp, SARS Virus
actaacgagagtggtgtcatgggcc

SEQ ID NO: 203161 - DNA, 25 bp, SARS Virus
ctaacgagagtcgtgtcatgggcca

SEQ ID NO: 203162 - DNA, 25 bp, SARS Virus
taacgagagtcgggtcatgggccat

SEQ ID NO: 203163 - DNA, 25 bp, SARS Virus
aacgagagtcgtgtcatgggccatt

SEQ ID NO: 203164 - DNA, 25 bp, SARS Virus
acgagagtcgtggcatgggccattc

SEQ ID NO: 203165 - DNA, 25 bp, SARS Virus
cgagagtcgtgtgatgggccattcg

SEQ ID NO: 203166 - DNA, 25 bp, SARS Virus
gagagtcgtgtcgtgggccattcgg

SEQ ID NO: 203167 - DNA, 25 bp, SARS Virus
agagtcgtgtcaggggccattcggt

SEQ ID NO: 203168 - DNA, 25 bp, SARS Virus
gagtcgtgtcatgggccattcggtc

SEQ ID NO: 203169 - DNA, 25 bp, SARS Virus
agtcgtgtcatgggccattcggtcc

SEQ ID NO: 203170 - DNA, 25 bp, SARS Virus
gtcgtgtcatgggccattcggtccg

SEQ ID NO: 203171 - DNA, 25 bp, SARS Virus
tcgtgtcatggggcattcggtccgt

SEQ ID NO: 203172 - DNA, 25 bp, SARS Virus
cgtgtcatgggcgattcggtccgtg

SEQ ID NO: 203173 - DNA, 25 bp, SARS Virus
gtgtcatgggccgttcggtccgtga

SEQ ID NO: 203174 - DNA, 25 bp, SARS Virus
tgtcatgggccagtcggtccgtgat

SEQ ID NO: 203175 - DNA, 25 bp, SARS Virus
gtcatgggccatgcggtccgtgata

SEQ ID NO: 203176 - DNA, 25 bp, SARS Virus
tcatgggccattgggtccgtgatac

SEQ ID NO: 203177 - DNA, 25 bp, SARS Virus
catgggccattcggtccgtgatact

SEQ ID NO: 203178 - DNA, 25 bp, SARS Virus
atgggccattcggtccgtgatactt

SEQ ID NO: 203179 - DNA, 25 bp, SARS Virus
tgggccattcgggccgtgatacttt

SEQ ID NO: 203180 - DNA, 25 bp, SARS Virus
gggccattcggtgcgtgatactttg

SEQ ID NO: 203181 - DNA, 25 bp, SARS Virus
ggccattcggtcggtgatactttgg

SEQ ID NO: 203182 - DNA, 25 bp, SARS Virus
gccattcggtccgtgatactttggt

SEQ ID NO: 203183 - DNA, 25 bp, SARS Virus
ccattcggtccgggatactttggtt

SEQ ID NO: 203184 - DNA, 25 bp, SARS Virus
cattcggtccgtgatactttggtta

SEQ ID NO: 203185 - DNA, 25 bp, SARS Virus
attcggtccgtggtactttggttag

SEQ ID NO: 203186 - DNA, 25 bp, SARS Virus
ttcggtccgtgagactttggttaga

SEQ ID NO: 203187 - DNA, 25 bp, SARS Virus
tcggtccgtgatgctttggttagag

SEQ ID NO: 203188 - DNA, 25 bp, SARS Virus
cggtccgtgatagtttggttagaga

SEQ ID NO: 203189 - DNA, 25 bp, SARS Virus
ggtccgtgatacgttggttagagag

SEQ ID NO: 203190 - DNA, 25 bp, SARS Virus
gtccgtgatactgtggttagagaga

SEQ ID NO: 203191 - DNA, 25 bp, SARS Virus
tccgtgatacttgggttagagagaa

SEQ ID NO: 203192 - DNA, 25 bp, SARS Virus
ccgtgatactttggttagagagaac

SEQ ID NO: 203193 - DNA, 25 bp, SARS Virus
cgtgatactttggttagagagaaca

SEQ ID NO: 203194 - DNA, 25 bp, SARS Virus
gtgatactttgggtagagagaacat

SEQ ID NO: 203195 - DNA, 25 bp, SARS Virus
tgatactttggtgagagagaacatt

SEQ ID NO: 203196 - DNA, 25 bp, SARS Virus
gatactttggttggagagaacatta

SEQ ID NO: 203197 - DNA, 25 bp, SARS Virus
atactttggttagagagaacattac

SEQ ID NO: 203198 - DNA, 25 bp, SARS Virus
tactttggttagggagaacattact

SEQ ID NO: 203199 - DNA, 25 bp, SARS Virus
actttggttagagagaacattacta

SEQ ID NO: 203200 - DNA, 25 bp, SARS Virus
ctttggttagagggaacattactat

SEQ ID NO: 203201 - DNA, 25 bp, SARS Virus
tttggttagagagaacattactatc

SEQ ID NO: 203202 - DNA, 25 bp, SARS Virus
ttggttagagaggacattactatcg

SEQ ID NO: 203203 - DNA, 25 bp, SARS Virus
tggttagagagagcattactatcgt

SEQ ID NO: 203204 - DNA, 25 bp, SARS Virus
ggttagagagaagattactatcgtc

SEQ ID NO: 203205 - DNA, 25 bp, SARS Virus
gttagagagaacgttactatcgtcg

SEQ ID NO: 203206 - DNA, 25 bp, SARS Virus
ttagagagaacagtactatcgtcga

SEQ ID NO: 203207 - DNA, 25 bp, SARS Virus
tagagagaacatgactatcgtcgat

SEQ ID NO: 203208 - DNA, 25 bp, SARS Virus
agagagaacattgctatcgtcgatg

SEQ ID NO: 203209 - DNA, 25 bp, SARS Virus
gagagaacattagtatcgtcgatga

SEQ ID NO: 203210 - DNA, 25 bp, SARS Virus
agagaacattacgatcgtcgatgat

SEQ ID NO: 203211 - DNA, 25 bp, SARS Virus
gagaacattactgtcgtcgatgatg

SEQ ID NO: 203212 - DNA, 25 bp, SARS Virus
agaacattactagcgtcgatgatgt

SEQ ID NO: 203213 - DNA, 25 bp, SARS Virus
gaacattactatggtcgatgatgtc

SEQ ID NO: 203214 - DNA, 25 bp, SARS Virus
aacattactatcgtcgatgatgtcc

SEQ ID NO: 203215 - DNA, 25 bp, SARS Virus
acattactatcggcgatgatgtccc

SEQ ID NO: 203216 - DNA, 25 bp, SARS Virus
cattactatcgtggatgatgtcccg

SEQ ID NO: 203217 - DNA, 25 bp, SARS Virus
attactatcgtcgatgatgtcccgt

SEQ ID NO: 203218 - DNA, 25 bp, SARS Virus
ttactatcgtcggtgatgtcccgtc

SEQ ID NO: 203219 - DNA, 25 bp, SARS Virus
tactatcgtcgaggatgtcccgtcg

SEQ ID NO: 203220 - DNA, 25 bp, SARS Virus
actatcgtcgatgatgtcccgtcga

SEQ ID NO: 203221 - DNA, 25 bp, SARS Virus
ctatcgtcgatggtgtcccgtcgaa

SEQ ID NO: 203222 - DNA, 25 bp, SARS Virus
tatcgtcgatgaggtcccgtcgaaa

SEQ ID NO: 203223 - DNA, 25 bp, SARS Virus
atcgtcgatgatgtcccgtcgaaaa

SEQ ID NO: 203224 - DNA, 25 bp, SARS Virus
tcgtcgatgatggcccgtcgaaaac

SEQ ID NO: 203225 - DNA, 25 bp, SARS Virus
cgtcgatgatgtgccgtcgaaaaca

SEQ ID NO: 203226 - DNA, 25 bp, SARS Virus
gtcgatgatgtcgcgtcgaaaacag

SEQ ID NO: 203227 - DNA, 25 bp, SARS Virus
tcgatgatgtccggtcgaaaacagt

SEQ ID NO: 203228 - DNA, 25 bp, SARS Virus
cgatgatgtcccgtcgaaaacagta

SEQ ID NO: 203229 - DNA, 25 bp, SARS Virus
gatgatgtcccggcgaaaacagtaa

SEQ ID NO: 203230 - DNA, 25 bp, SARS Virus
atgatgtcccgtggaaaacagtaaa

SEQ ID NO: 203231 - DNA, 25 bp, SARS Virus
tgatgtcccgtcgaaaacagtaaaa

SEQ ID NO: 203232 - DNA, 25 bp, SARS Virus
gatgtcccgtcggaaacagtaaaaa

SEQ ID NO: 203233 - DNA, 25 bp, SARS Virus
atgtcccgtcgagaacagtaaaaac

SEQ ID NO: 203234 - DNA, 25 bp, SARS Virus
tgtcccgtcgaagacagtaaaaaca

SEQ ID NO: 203235 - DNA, 25 bp, SARS Virus
gtcccgtcgaaagcagtaaaaacat

SEQ ID NO: 203236 - DNA, 25 bp, SARS Virus
tcccgtcgaaaagagtaaaaacata

SEQ ID NO: 203237 - DNA, 25 bp, SARS Virus
cccgtcgaaaacggtaaaaacatac

SEQ ID NO: 203238 - DNA, 25 bp, SARS Virus
ccgtcgaaaacagtaaaaacatact

SEQ ID NO: 203239 - DNA, 25 bp, SARS Virus
cgtcgaaaacaggaaaaacatactt

SEQ ID NO: 203240 - DNA, 25 bp, SARS Virus
gtcgaaaacagtgaaaacatacttg

SEQ ID NO: 203241 - DNA, 25 bp, SARS Virus
tcgaaaacagtagaaacatacttgg

SEQ ID NO: 203242 - DNA, 25 bp, SARS Virus
cgaaaacagtaagaacatacttggt

SEQ ID NO: 203243 - DNA, 25 bp, SARS Virus
gaaaacagtaaagacatacttggtg

SEQ ID NO: 203244 - DNA, 25 bp, SARS Virus
aaaacagtaaaagcatacttggtgg

SEQ ID NO: 203245 - DNA, 25 bp, SARS Virus
aaacagtaaaaagatacttggtggt

SEQ ID NO: 203246 - DNA, 25 bp, SARS Virus
aacagtaaaaacgtacttggtggtg

SEQ ID NO: 203247 - DNA, 25 bp, SARS Virus
acagtaaaaacagacttggtggtgc

SEQ ID NO: 203248 - DNA, 25 bp, SARS Virus
cagtaaaaacatgcttggtggtgcg

SEQ ID NO: 203249 - DNA, 25 bp, SARS Virus
agtaaaaacatagttggtggtgcga

SEQ ID NO: 203250 - DNA, 25 bp, SARS Virus
gtaaaaacatacgtggtggtgcgac

SEQ ID NO: 203251 - DNA, 25 bp, SARS Virus
taaaaacatactgggtggtgcgacc

SEQ ID NO: 203252 - DNA, 25 bp, SARS Virus
aaaaacatacttggtggtgcgaccg

SEQ ID NO: 203253 - DNA, 25 bp, SARS Virus
aaaacatacttggtggtgcgaccga

SEQ ID NO: 203254 - DNA, 25 bp, SARS Virus
aaacatacttgggggtgcgaccgat

SEQ ID NO: 203255 - DNA, 25 bp, SARS Virus
aacatacttggtggtgcgaccgatt

SEQ ID NO: 203256 - DNA, 25 bp, SARS Virus
acatacttggtggtgcgaccgattt

SEQ ID NO: 203257 - DNA, 25 bp, SARS Virus
catacttggtggggcgaccgatttg

SEQ ID NO: 203258 - DNA, 25 bp, SARS Virus
atacttggtggtgcgaccgatttgg

SEQ ID NO: 203259 - DNA, 25 bp, SARS Virus
tacttggtggtgggaccgatttggt

SEQ ID NO: 203260 - DNA, 25 bp, SARS Virus
acttggtggtgcgaccgatttggta

SEQ ID NO: 203261 - DNA, 25 bp, SARS Virus
cttggtggtgcggccgatttggtac

SEQ ID NO: 203262 - DNA, 25 bp, SARS Virus
ttggtggtgcgagcgatttggtacg

SEQ ID NO: 203263 - DNA, 25 bp, SARS Virus
tggtggtgcgacggatttggtacgc

SEQ ID NO: 203264 - DNA, 25 bp, SARS Virus
ggtggtgcgaccgatttggtacgca

SEQ ID NO: 203265 - DNA, 25 bp, SARS Virus
gtggtgcgaccggtttggtacgcag

SEQ ID NO: 203266 - DNA, 25 bp, SARS Virus
tggtgcgaccgagttggtacgcagt

SEQ ID NO: 203267 - DNA, 25 bp, SARS Virus
ggtgcgaccgatgtggtacgcagtt

SEQ ID NO: 203268 - DNA, 25 bp, SARS Virus
gtgcgaccgattgggtacgcagttt

SEQ ID NO: 203269 - DNA, 25 bp, SARS Virus
tgcgaccgatttggtacgcagtttt

SEQ ID NO: 203270 - DNA, 25 bp, SARS Virus
gcgaccgatttggtacgcagttttg

SEQ ID NO: 203271 - DNA, 25 bp, SARS Virus
cgaccgatttgggacgcagttttgg

SEQ ID NO: 203272 - DNA, 25 bp, SARS Virus
gaccgatttggtgcgcagttttggt

SEQ ID NO: 203273 - DNA, 25 bp, SARS Virus
accgatttggtaggcagttttggtc

SEQ ID NO: 203274 - DNA, 25 bp, SARS Virus
ccgatttggtacgcagttttggtcg

SEQ ID NO: 203275 - DNA, 25 bp, SARS Virus
cgatttggtacggagttttggtcgt

SEQ ID NO: 203276 - DNA, 25 bp, SARS Virus
gatttggtacgcggttttggtcgta

SEQ ID NO: 203277 - DNA, 25 bp, SARS Virus
atttggtacgcagttttggtcgtac

SEQ ID NO: 203278 - DNA, 25 bp, SARS Virus
tttggtacgcaggtttggtcgtaca

SEQ ID NO: 203279 - DNA, 25 bp, SARS Virus
ttggtacgcagtgttggtcgtacaa

SEQ ID NO: 203280 - DNA, 25 bp, SARS Virus
tggtacgcagttgtggtcgtacaaa

SEQ ID NO: 203281 - DNA, 25 bp, SARS Virus
ggtacgcagtttgggtcgtacaaat

SEQ ID NO: 203282 - DNA, 25 bp, SARS Virus
gtacgcagttttggtcgtacaaata

SEQ ID NO: 203283 - DNA, 25 bp, SARS Virus
tacgcagttttggtcgtacaaataa

SEQ ID NO: 203284 - DNA, 25 bp, SARS Virus
acgcagttttgggcgtacaaataaa

SEQ ID NO: 203285 - DNA, 25 bp, SARS Virus
cgcagttttggtggtacaaataaac

SEQ ID NO: 203286 - DNA, 25 bp, SARS Virus
gcagttttggtcgtacaaataaacg

SEQ ID NO: 203287 - DNA, 25 bp, SARS Virus
cagttttggtcggacaaataaacgt

SEQ ID NO: 203288 - DNA, 25 bp, SARS Virus
agttttggtcgtgcaaataaacgtt

SEQ ID NO: 203289 - DNA, 25 bp, SARS Virus
gttttggtcgtagaaataaacgttt

SEQ ID NO: 203290 - DNA, 25 bp, SARS Virus
ttttggtcgtacgaataaacgtttt

SEQ ID NO: 203291 - DNA, 25 bp, SARS Virus
tttggtcgtacagataaacgttttg

SEQ ID NO: 203292 - DNA, 25 bp, SARS Virus
ttggtcgtacaagtaaacgttttgt

SEQ ID NO: 203293 - DNA, 25 bp, SARS Virus
tggtcgtacaaagaaacgttttgtt

SEQ ID NO: 203294 - DNA, 25 bp, SARS Virus
ggtcgtacaaatgaacgttttgtta

SEQ ID NO: 203295 - DNA, 25 bp, SARS Virus
gtcgtacaaatagacgttttgttag

SEQ ID NO: 203296 - DNA, 25 bp, SARS Virus
tcgtacaaataagcgttttgttagt

SEQ ID NO: 203297 - DNA, 25 bp, SARS Virus
cgtacaaataaaggttttgttagta

SEQ ID NO: 203298 - DNA, 25 bp, SARS Virus
gtacaaataaacgttttgttagtag

SEQ ID NO: 203299 - DNA, 25 bp, SARS Virus
tacaaataaacggtttgttagtagt

SEQ ID NO: 203300 - DNA, 25 bp, SARS Virus
acaaataaacgtgttgttagtagtc

SEQ ID NO: 203301 - DNA, 25 bp, SARS Virus
caaataaacgttgtgttagtagtca

SEQ ID NO: 203302 - DNA, 25 bp, SARS Virus
aaataaacgtttggttagtagtcat

SEQ ID NO: 203303 - DNA, 25 bp, SARS Virus
aataaacgttttgttagtagtcatc

SEQ ID NO: 203304 - DNA, 25 bp, SARS Virus
ataaacgttttggtagtagtcatct

SEQ ID NO: 203305 - DNA, 25 bp, SARS Virus
taaacgttttgtgagtagtcatctt

SEQ ID NO: 203306 - DNA, 25 bp, SARS Virus
aaacgttttgttggtagtcatcttt

SEQ ID NO: 203307 - DNA, 25 bp, SARS Virus
aacgttttgttagtagtcatcttta

SEQ ID NO: 203308 - DNA, 25 bp, SARS Virus
acgttttgttaggagtcatctttac

SEQ ID NO: 203309 - DNA, 25 bp, SARS Virus
cgttttgttagtggtcatctttact

SEQ ID NO: 203310 - DNA, 25 bp, SARS Virus
gttttgttagtagtcatctttacta

SEQ ID NO: 203311 - DNA, 25 bp, SARS Virus
ttttgttagtaggcatctttactac

SEQ ID NO: 203312 - DNA, 25 bp, SARS Virus
tttgttagtagtgatctttactaca

SEQ ID NO: 203313 - DNA, 25 bp, SARS Virus
ttgttagtagtcgtctttactacag

SEQ ID NO: 203314 - DNA, 25 bp, SARS Virus
tgttagtagtcagctttactacagt

SEQ ID NO: 203315 - DNA, 25 bp, SARS Virus
gttagtagtcatgtttactacagtg

SEQ ID NO: 203316 - DNA, 25 bp, SARS Virus
ttagtagtcatcgttactacagtgc

SEQ ID NO: 203317 - DNA, 25 bp, SARS Virus
tagtagtcatctgtactacagtgct

SEQ ID NO: 203318 - DNA, 25 bp, SARS Virus
agtagtcatcttgactacagtgctc

SEQ ID NO: 203319 - DNA, 25 bp, SARS Virus
gtagtcatctttgctacagtgctca

SEQ ID NO: 203320 - DNA, 25 bp, SARS Virus
tagtcatctttagtacagtgctcac

SEQ ID NO: 203321 - DNA, 25 bp, SARS Virus
agtcatctttacgacagtgctcact

SEQ ID NO: 203322 - DNA, 25 bp, SARS Virus
gtcatctttactgcagtgctcactg

SEQ ID NO: 203323 - DNA, 25 bp, SARS Virus
tcatctttactagagtgctcactgt

SEQ ID NO: 203324 - DNA, 25 bp, SARS Virus
catctttactacggtgctcactgtg

SEQ ID NO: 203325 - DNA, 25 bp, SARS Virus
atctttactacagtgctcactgtgg

SEQ ID NO: 203326 - DNA, 25 bp, SARS Virus
tctttactacagggctcactgtggt

SEQ ID NO: 203327 - DNA, 25 bp, SARS Virus
ctttactacagtgctcactgtggta

SEQ ID NO: 203328 - DNA, 25 bp, SARS Virus
tttactacagtggtcactgtggtag

SEQ ID NO: 203329 - DNA, 25 bp, SARS Virus
ttactacagtgcgcactgtggtagg

SEQ ID NO: 203330 - DNA, 25 bp, SARS Virus
tactacagtgctgactgtggtagga

SEQ ID NO: 203331 - DNA, 25 bp, SARS Virus
actacagtgctcgctgtggtaggac

SEQ ID NO: 203332 - DNA, 25 bp, SARS Virus
ctacagtgctcagtgtggtaggact

SEQ ID NO: 203333 - DNA, 25 bp, SARS Virus
tacagtgctcacggtggtaggactt

SEQ ID NO: 203334 - DNA, 25 bp, SARS Virus
acagtgctcactgtggtaggactta

SEQ ID NO: 203335 - DNA, 25 bp, SARS Virus
cagtgctcactggggtaggacttac

SEQ ID NO: 203336 - DNA, 25 bp, SARS Virus
agtgctcactgtggtaggacttacc

SEQ ID NO: 203337 - DNA, 25 bp, SARS Virus
gtgctcactgtggtaggacttaccg

SEQ ID NO: 203338 - DNA, 25 bp, SARS Virus
tgctcactgtgggaggacttaccga

SEQ ID NO: 203339 - DNA, 25 bp, SARS Virus
gctcactgtggtgggacttaccgaa

SEQ ID NO: 203340 - DNA, 25 bp, SARS Virus
ctcactgtggtaggacttaccgaaa

SEQ ID NO: 203341 - DNA, 25 bp, SARS Virus
tcactgtggtaggacttaccgaaac

SEQ ID NO: 203342 - DNA, 25 bp, SARS Virus
cactgtggtagggcttaccgaaaca

SEQ ID NO: 203343 - DNA, 25 bp, SARS Virus
actgtggtaggagttaccgaaacat

SEQ ID NO: 203344 - DNA, 25 bp, SARS Virus
ctgtggtaggacgtaccgaaacatt

SEQ ID NO: 203345 - DNA, 25 bp, SARS Virus
tgtggtaggactgaccgaaacattg

SEQ ID NO: 203346 - DNA, 25 bp, SARS Virus
gtggtaggacttgccgaaacattgg

SEQ ID NO: 203347 - DNA, 25 bp, SARS Virus
tggtaggacttagcgaaacattggt

SEQ ID NO: 203348 - DNA, 25 bp, SARS Virus
ggtaggacttacggaaacattggtt

SEQ ID NO: 203349 - DNA, 25 bp, SARS Virus
gtaggacttaccgaaacattggtta

SEQ ID NO: 203350 - DNA, 25 bp, SARS Virus
taggacttaccggaacattggttac

SEQ ID NO: 203351 - DNA, 25 bp, SARS Virus
aggacttaccgagacattggttact

SEQ ID NO: 203352 - DNA, 25 bp, SARS Virus
ggacttaccgaagcattggttacta

SEQ ID NO: 203353 - DNA, 25 bp, SARS Virus
gacttaccgaaagattggttactaa

SEQ ID NO: 203354 - DNA, 25 bp, SARS Virus
acttaccgaaacgttggttactaaa

SEQ ID NO: 203355 - DNA, 25 bp, SARS Virus
cttaccgaaacagtggttactaaag

SEQ ID NO: 203356 - DNA, 25 bp, SARS Virus
ttaccgaaacatgggttactaaagt

SEQ ID NO: 203357 - DNA, 25 bp, SARS Virus
taccgaaacattggttactaaagta

SEQ ID NO: 203358 - DNA, 25 bp, SARS Virus
accgaaacattggttactaaagtaa

SEQ ID NO: 203359 - DNA, 25 bp, SARS Virus
ccgaaacattgggtactaaagtaaa

SEQ ID NO: 203360 - DNA, 25 bp, SARS Virus
cgaaacattggtgactaaagtaaac

SEQ ID NO: 203361 - DNA, 25 bp, SARS Virus
gaaacattggttgctaaagtaaaca

SEQ ID NO: 203362 - DNA, 25 bp, SARS Virus
aaacattggttagtaaagtaaacac

SEQ ID NO: 203363 - DNA, 25 bp, SARS Virus
aacattggttacgaaagtaaacaca

SEQ ID NO: 203364 - DNA, 25 bp, SARS Virus
acattggttactgaagtaaacacat

SEQ ID NO: 203365 - DNA, 25 bp, SARS Virus
cattggttactagagtaaacacatt

SEQ ID NO: 203366 - DNA, 25 bp, SARS Virus
attggttactaaggtaaacacattg

SEQ ID NO: 203367 - DNA, 25 bp, SARS Virus
ttggttactaaagtaaacacattgg

SEQ ID NO: 203368 - DNA, 25 bp, SARS Virus
tggttactaaaggaaacacattggt

SEQ ID NO: 203369 - DNA, 25 bp, SARS Virus
ggttactaaagtgaacacattggta

SEQ ID NO: 203370 - DNA, 25 bp, SARS Virus
gttactaaagtagacacattggtag

SEQ ID NO: 203371 - DNA, 25 bp, SARS Virus
ttactaaagtaagcacattggtagt

SEQ ID NO: 203372 - DNA, 25 bp, SARS Virus
tactaaagtaaagacattggtagta

SEQ ID NO: 203373 - DNA, 25 bp, SARS Virus
actaaagtaaacgcattggtagtac

SEQ ID NO: 203374 - DNA, 25 bp, SARS Virus
ctaaagtaaacagattggtagtacc

SEQ ID NO: 203375 - DNA, 25 bp, SARS Virus
taaagtaaacacgttggtagtacct

SEQ ID NO: 203376 - DNA, 25 bp, SARS Virus
aaagtaaacacagtggtagtaccta

SEQ ID NO: 203377 - DNA, 25 bp, SARS Virus
aagtaaacacatgggtagtacctaa

SEQ ID NO: 203378 - DNA, 25 bp, SARS Virus
agtaaacacattggtagtacctaac

SEQ ID NO: 203379 - DNA, 25 bp, SARS Virus
gtaaacacattggtagtacctaact

SEQ ID NO: 203380 - DNA, 25 bp, SARS Virus
taaacacattgggagtacctaactg

SEQ ID NO: 203381 - DNA, 25 bp, SARS Virus
aaacacattggtggtacctaactgt

SEQ ID NO: 203382 - DNA, 25 bp, SARS Virus
aacacattggtagtacctaactgtt

SEQ ID NO: 203383 - DNA, 25 bp, SARS Virus
acacattggtaggacctaactgtta

SEQ ID NO: 203384 - DNA, 25 bp, SARS Virus
cacattggtagtgcctaactgttac

SEQ ID NO: 203385 - DNA, 25 bp, SARS Virus
acattggtagtagctaactgttaca

SEQ ID NO: 203386 - DNA, 25 bp, SARS Virus
cattggtagtacgtaactgttacat

SEQ ID NO: 203387 - DNA, 25 bp, SARS Virus
attggtagtaccgaactgttacata

SEQ ID NO: 203388 - DNA, 25 bp, SARS Virus
ttggtagtacctgactgttacatac

SEQ ID NO: 203389 - DNA, 25 bp, SARS Virus
tggtagtacctagctgttacataca

SEQ ID NO: 203390 - DNA, 25 bp, SARS Virus
ggtagtacctaagtgttacatacat

SEQ ID NO: 203391 - DNA, 25 bp, SARS Virus
gtagtacctaacggttacatacatg

SEQ ID NO: 203392 - DNA, 25 bp, SARS Virus
tagtacctaactgttacatacatga

SEQ ID NO: 203393 - DNA, 25 bp, SARS Virus
agtacctaactggtacatacatgac

SEQ ID NO: 203394 - DNA, 25 bp, SARS Virus
gtacctaactgtgacatacatgacc

SEQ ID NO: 203395 - DNA, 25 bp, SARS Virus
tacctaactgttgcatacatgaccg

SEQ ID NO: 203396 - DNA, 25 bp, SARS Virus
acctaactgttagatacatgaccgt

SEQ ID NO: 203397 - DNA, 25 bp, SARS Virus
cctaactgttacgtacatgaccgta

SEQ ID NO: 203398 - DNA, 25 bp, SARS Virus
ctaactgttacagacatgaccgtat

SEQ ID NO: 203399 - DNA, 25 bp, SARS Virus
taactgttacatgcatgaccgtatt

SEQ ID NO: 203400 - DNA, 25 bp, SARS Virus
aactgttacatagatgaccgtattg

SEQ ID NO: 203401 - DNA, 25 bp, SARS Virus
actgttacatacgtgaccgtattgc

SEQ ID NO: 203402 - DNA, 25 bp, SARS Virus
ctgttacatacaggaccgtattgct

SEQ ID NO: 203403 - DNA, 25 bp, SARS Virus
tgttacatacatgaccgtattgcta

SEQ ID NO: 203404 - DNA, 25 bp, SARS Virus
gttacatacatggccgtattgctat

SEQ ID NO: 203405 - DNA, 25 bp, SARS Virus
ttacatacatgagcgtattgctata

SEQ ID NO: 203406 - DNA, 25 bp, SARS Virus
tacatacatgacggtattgctatat

SEQ ID NO: 203407 - DNA, 25 bp, SARS Virus
acatacatgaccgtattgctatatt

SEQ ID NO: 203408 - DNA, 25 bp, SARS Virus
catacatgaccggattgctatattg

SEQ ID NO: 203409 - DNA, 25 bp, SARS Virus
atacatgaccgtgttgctatattgt

SEQ ID NO: 203410 - DNA, 25 bp, SARS Virus
tacatgaccgtagtgctatattgtt

SEQ ID NO: 203411 - DNA, 25 bp, SARS Virus
acatgaccgtatggctatattgttt

SEQ ID NO: 203412 - DNA, 25 bp, SARS Virus
catgaccgtattgctatattgtttg

SEQ ID NO: 203413 - DNA, 25 bp, SARS Virus
atgaccgtattggtatattgtttgg

SEQ ID NO: 203414 - DNA, 25 bp, SARS Virus
tgaccgtattgcgatattgtttggt

SEQ ID NO: 203415 - DNA, 25 bp, SARS Virus
gaccgtattgctgtattgtttggtt

SEQ ID NO: 203416 - DNA, 25 bp, SARS Virus
accgtattgctagattgtttggtta

SEQ ID NO: 203417 - DNA, 25 bp, SARS Virus
ccgtattgctatgttgtttggttac

SEQ ID NO: 203418 - DNA, 25 bp, SARS Virus
cgtattgctatagtgtttggttacg

SEQ ID NO: 203419 - DNA, 25 bp, SARS Virus
gtattgctatatggtttggttacgt

SEQ ID NO: 203420 - DNA, 25 bp, SARS Virus
tattgctatattgtttggttacgtc

SEQ ID NO: 203421 - DNA, 25 bp, SARS Virus
attgctatattggttggttacgtcg

SEQ ID NO: 203422 - DNA, 25 bp, SARS Virus
ttgctatattgtgtggttacgtcgt

SEQ ID NO: 203423 - DNA, 25 bp, SARS Virus
tgctatattgttgggttacgtcgtt

SEQ ID NO: 203424 - DNA, 25 bp, SARS Virus
gctatattgtttggttacgtcgttc

SEQ ID NO: 203425 - DNA, 25 bp, SARS Virus
ctatattgtttggttacgtcgttct

SEQ ID NO: 203426 - DNA, 25 bp, SARS Virus
tatattgtttgggtacgtcgttctt

SEQ ID NO: 203427 - DNA, 25 bp, SARS Virus
atattgtttggtgacgtcgttcttg

SEQ ID NO: 203428 - DNA, 25 bp, SARS Virus
tattgtttggttgcgtcgttcttgc

SEQ ID NO: 203429 - DNA, 25 bp, SARS Virus
attgtttggttaggtcgttcttgcg

SEQ ID NO: 203430 - DNA, 25 bp, SARS Virus
ttgtttggttacgtcgttcttgcgt

SEQ ID NO: 203431 - DNA, 25 bp, SARS Virus
tgtttggttacggcgttcttgcgtg

SEQ ID NO: 203432 - DNA, 25 bp, SARS Virus
gtttggttacgtggttcttgcgtgt

SEQ ID NO: 203433 - DNA, 25 bp, SARS Virus
tttggttacgtcgttcttgcgtgtt

SEQ ID NO: 203434 - DNA, 25 bp, SARS Virus
ttggttacgtcggtcttgcgtgtta

SEQ ID NO: 203435 - DNA, 25 bp, SARS Virus
tggttacgtcgtgcttgcgtgttat

SEQ ID NO: 203436 - DNA, 25 bp, SARS Virus
ggttacgtcgttgttgcgtgttatt

SEQ ID NO: 203437 - DNA, 25 bp, SARS Virus
gttacgtcgttcgtgcgtgttatta

SEQ ID NO: 203438 - DNA, 25 bp, SARS Virus
ttacgtcgttctggcgtgttattac

SEQ ID NO: 203439 - DNA, 25 bp, SARS Virus
tacgtcgttcttgcgtgttattaca

SEQ ID NO: 203440 - DNA, 25 bp, SARS Virus
acgtcgttcttgggtgttattacac

SEQ ID NO: 203441 - DNA, 25 bp, SARS Virus
cgtcgttcttgcgtgttattacacc

SEQ ID NO: 203442 - DNA, 25 bp, SARS Virus
gtcgttcttgcgggttattacaccg

SEQ ID NO: 203443 - DNA, 25 bp, SARS Virus
tcgttcttgcgtgttattacaccgg

SEQ ID NO: 203444 - DNA, 25 bp, SARS Virus
cgttcttgcgtggtattacaccgga

SEQ ID NO: 203445 - DNA, 25 bp, SARS Virus
gttcttgcgtgtgattacaccggaa

SEQ ID NO: 203446 - DNA, 25 bp, SARS Virus
ttcttgcgtgttgttacaccggaat

SEQ ID NO: 203447 - DNA, 25 bp, SARS Virus
tcttgcgtgttagtacaccggaatt

SEQ ID NO: 203448 - DNA, 25 bp, SARS Virus
cttgcgtgttatgacaccggaattc

SEQ ID NO: 203449 - DNA, 25 bp, SARS Virus
ttgcgtgttattgcaccggaattcg

SEQ ID NO: 203450 - DNA, 25 bp, SARS Virus
tgcgtgttattagaccggaattcgt

SEQ ID NO: 203451 - DNA, 25 bp, SARS Virus
gcgtgttattacgccggaattcgta

SEQ ID NO: 203452 - DNA, 25 bp, SARS Virus
cgtgttattacagcggaattcgtat

SEQ ID NO: 203453 - DNA, 25 bp, SARS Virus
gtgttattacacgggaattcgtatt

SEQ ID NO: 203454 - DNA, 25 bp, SARS Virus
tgttattacaccggaattcgtattc

SEQ ID NO: 203455 - DNA, 25 bp, SARS Virus
gttattacaccggaattcgtattca

SEQ ID NO: 203456 - DNA, 25 bp, SARS Virus
ttattacaccgggattcgtattcaa

SEQ ID NO: 203457 - DNA, 25 bp, SARS Virus
tattacaccggagttcgtattcaaa

SEQ ID NO: 203458 - DNA, 25 bp, SARS Virus
attacaccggaagtcgtattcaaat

SEQ ID NO: 203459 - DNA, 25 bp, SARS Virus
ttacaccggaatgcgtattcaaatt

SEQ ID NO: 203460 - DNA, 25 bp, SARS Virus
tacaccggaattggtattcaaattt

SEQ ID NO: 203461 - DNA, 25 bp, SARS Virus
acaccggaattcgtattcaaatttt

SEQ ID NO: 203462 - DNA, 25 bp, SARS Virus
caccggaattcggattcaaattttg

SEQ ID NO: 203463 - DNA, 25 bp, SARS Virus
accggaattcgtgttcaaattttgt

SEQ ID NO: 203464 - DNA, 25 bp, SARS Virus
ccggaattcgtagtcaaattttgtt

SEQ ID NO: 203465 - DNA, 25 bp, SARS Virus
cggaattcgtatgcaaattttgttc

SEQ ID NO: 203466 - DNA, 25 bp, SARS Virus
ggaattcgtattgaaattttgttca

SEQ ID NO: 203467 - DNA, 25 bp, SARS Virus
gaattcgtattcgaattttgttcat

SEQ ID NO: 203468 - DNA, 25 bp, SARS Virus
aattcgtattcagattttgttcatg

SEQ ID NO: 203469 - DNA, 25 bp, SARS Virus
attcgtattcaagttttgttcatga

SEQ ID NO: 203470 - DNA, 25 bp, SARS Virus
ttcgtattcaaagtttgttcatgat

SEQ ID NO: 203471 - DNA, 25 bp, SARS Virus
tcgtattcaaatgttgttcatgatt

SEQ ID NO: 203472 - DNA, 25 bp, SARS Virus
cgtattcaaattgtgttcatgattg

SEQ ID NO: 203473 - DNA, 25 bp, SARS Virus
gtattcaaatttggttcatgattgt

SEQ ID NO: 203474 - DNA, 25 bp, SARS Virus
tattcaaattttgttcatgattgtt

SEQ ID NO: 203475 - DNA, 25 bp, SARS Virus
attcaaattttggtcatgattgtta

SEQ ID NO: 203476 - DNA, 25 bp, SARS Virus
ttcaaattttgtgcatgattgttag

SEQ ID NO: 203477 - DNA, 25 bp, SARS Virus
tcaaattttgttgatgattgttaga

SEQ ID NO: 203478 - DNA, 25 bp, SARS Virus
caaattttgttcgtgattgttagaa

SEQ ID NO: 203479 - DNA, 25 bp, SARS Virus
aaattttgttcaggattgttagaat

SEQ ID NO: 203480 - DNA, 25 bp, SARS Virus
aattttgttcatgattgttagaatg

SEQ ID NO: 203481 - DNA, 25 bp, SARS Virus
attttgttcatggttgttagaatgg

SEQ ID NO: 203482 - DNA, 25 bp, SARS Virus
ttttgttcatgagtgttagaatggt

SEQ ID NO: 203483 - DNA, 25 bp, SARS Virus
tttgttcatgatggttagaatggtg

SEQ ID NO: 203484 - DNA, 25 bp, SARS Virus
ttgttcatgattgttagaatggtgg

SEQ ID NO: 203485 - DNA, 25 bp, SARS Virus
tgttcatgattggtagaatggtggg

SEQ ID NO: 203486 - DNA, 25 bp, SARS Virus
gttcatgattgtgagaatggtggga

SEQ ID NO: 203487 - DNA, 25 bp, SARS Virus
ttcatgattgttggaatggtgggaa

SEQ ID NO: 203488 - DNA, 25 bp, SARS Virus
tcatgattgttagaatggtgggaac

SEQ ID NO: 203489 - DNA, 25 bp, SARS Virus
catgattgttaggatggtgggaact

SEQ ID NO: 203490 - DNA, 25 bp, SARS Virus
atgattgttagagtggtgggaactc

SEQ ID NO: 203491 - DNA, 25 bp, SARS Virus
tgattgttagaagggtgggaactca

SEQ ID NO: 203492 - DNA, 25 bp, SARS Virus
gattgttagaatggtgggaactcac

SEQ ID NO: 203493 - DNA, 25 bp, SARS Virus
attgttagaatggtgggaactcact

SEQ ID NO: 203494 - DNA, 25 bp, SARS Virus
ttgttagaatggggggaactcactc

SEQ ID NO: 203495 - DNA, 25 bp, SARS Virus
tgttagaatggtgggaactcactct

SEQ ID NO: 203496 - DNA, 25 bp, SARS Virus
gttagaatggtgggaactcactcta

SEQ ID NO: 203497 - DNA, 25 bp, SARS Virus
ttagaatggtgggaactcactctaa

SEQ ID NO: 203498 - DNA, 25 bp, SARS Virus
tagaatggtggggactcactctaaa

SEQ ID NO: 203499 - DNA, 25 bp, SARS Virus
agaatggtgggagctcactctaaaa

SEQ ID NO: 203500 - DNA, 25 bp, SARS Virus
gaatggtgggaagtcactctaaaat

SEQ ID NO: 203501 - DNA, 25 bp, SARS Virus
aatggtgggaacgcactctaaaatc

SEQ ID NO: 203502 - DNA, 25 bp, SARS Virus
atggtgggaactgactctaaaatca

SEQ ID NO: 203503 - DNA, 25 bp, SARS Virus
tggtgggaactcgctctaaaatcat

SEQ ID NO: 203504 - DNA, 25 bp, SARS Virus
ggtgggaactcagtctaaaatcatc

SEQ ID NO: 203505 - DNA, 25 bp, SARS Virus
gtgggaactcacgctaaaatcatca

SEQ ID NO: 203506 - DNA, 25 bp, SARS Virus
tgggaactcactgtaaaatcatcaa

SEQ ID NO: 203507 - DNA, 25 bp, SARS Virus
gggaactcactcgaaaatcatcaat

SEQ ID NO: 203508 - DNA, 25 bp, SARS Virus
ggaactcactctgaaatcatcaata

SEQ ID NO: 203509 - DNA, 25 bp, SARS Virus
gaactcactctagaatcatcaatac

SEQ ID NO: 203510 - DNA, 25 bp, SARS Virus
aactcactctaagatcatcaatact

SEQ ID NO: 203511 - DNA, 25 bp, SARS Virus
actcactctaaagtcatcaatactg

SEQ ID NO: 203512 - DNA, 25 bp, SARS Virus
ctcactctaaaagcatcaatactgt

SEQ ID NO: 203513 - DNA, 25 bp, SARS Virus
tcactctaaaatgatcaatactgta

SEQ ID NO: 203514 - DNA, 25 bp, SARS Virus
cactctaaaatcgtcaatactgtaa

SEQ ID NO: 203515 - DNA, 25 bp, SARS Virus
actctaaaatcagcaatactgtaac

SEQ ID NO: 203516 - DNA, 25 bp, SARS Virus
ctctaaaatcatgaatactgtaact

SEQ ID NO: 203517 - DNA, 25 bp, SARS Virus
tctaaaatcatcgatactgtaactg

SEQ ID NO: 203518 - DNA, 25 bp, SARS Virus
ctaaaatcatcagtactgtaactgt

SEQ ID NO: 203519 - DNA, 25 bp, SARS Virus
taaaatcatcaagactgtaactgtt

SEQ ID NO: 203520 - DNA, 25 bp, SARS Virus
aaaatcatcaatgctgtaactgttg

SEQ ID NO: 203521 - DNA, 25 bp, SARS Virus
aaatcatcaatagtgtaactgttgg

SEQ ID NO: 203522 - DNA, 25 bp, SARS Virus
aatcatcaatacggtaactgttgga

SEQ ID NO: 203523 - DNA, 25 bp, SARS Virus
atcatcaatactgtaactgttggac

SEQ ID NO: 203524 - DNA, 25 bp, SARS Virus
tcatcaatactggaactgttggaca

SEQ ID NO: 203525 - DNA, 25 bp, SARS Virus
catcaatactgtgactgttggacag

SEQ ID NO: 203526 - DNA, 25 bp, SARS Virus
atcaatactgtagctgttggacaga

SEQ ID NO: 203527 - DNA, 25 bp, SARS Virus
tcaatactgtaagtgttggacagat

SEQ ID NO: 203528 - DNA, 25 bp, SARS Virus
caatactgtaacggttggacagatc

SEQ ID NO: 203529 - DNA, 25 bp, SARS Virus
tcgtcgttcttgtgttcgtctccat

SEQ ID NO: 203530 - DNA, 25 bp, SARS Virus
cgtcgttcttgctttcgtctccatc

SEQ ID NO: 203531 - DNA, 25 bp, SARS Virus
gtcgttcttgcgttcgtctccatcg

SEQ ID NO: 203532 - DNA, 25 bp, SARS Virus
tcgttcttgcgttcgtctccatcgt

SEQ ID NO: 203533 - DNA, 25 bp, SARS Virus
cgttcttgcgtttgtctccatcgtt

SEQ ID NO: 203534 - DNA, 25 bp, SARS Virus
gttcttgcgttcttctccatcgttt

SEQ ID NO: 203535 - DNA, 25 bp, SARS Virus
ttcttgcgttcgtctccatcgtttt

SEQ ID NO: 203536 - DNA, 25 bp, SARS Virus
tcttgcgttcgtttccatcgtttta

SEQ ID NO: 203537 - DNA, 25 bp, SARS Virus
cttgcgttcgtctccatcgttttag

SEQ ID NO: 203538 - DNA, 25 bp, SARS Virus
ttgcgttcgtcttcatcgttttagt

SEQ ID NO: 203539 - DNA, 25 bp, SARS Virus
tgcgttcgtctctatcgttttagtg

SEQ ID NO: 203540 - DNA, 25 bp, SARS Virus
gcgttcgtctccttcgttttagtga

SEQ ID NO: 203541 - DNA, 25 bp, SARS Virus
cgttcgtctccatcgttttagtgat

SEQ ID NO: 203542 - DNA, 25 bp, SARS Virus
gttcgtctccattgttttagtgata

SEQ ID NO: 203543 - DNA, 25 bp, SARS Virus
ttcgtctccatctttttagtgatat

SEQ ID NO: 203544 - DNA, 25 bp, SARS Virus
tcgtctccatcgttttagtgatatg

SEQ ID NO: 203545 - DNA, 25 bp, SARS Virus
cgtctccatcgttttagtgatatga

SEQ ID NO: 203546 - DNA, 25 bp, SARS Virus
gtctccatcgttttagtgatatgag

SEQ ID NO: 203547 - DNA, 25 bp, SARS Virus
tctccatcgttttagtgatatgagt

SEQ ID NO: 203548 - DNA, 25 bp, SARS Virus
ctccatcgtttttgtgatatgagtt

SEQ ID NO: 203549 - DNA, 25 bp, SARS Virus
tccatcgttttattgatatgagtta

SEQ ID NO: 203550 - DNA, 25 bp, SARS Virus
ccatcgttttagtgatatgagttac

SEQ ID NO: 203551 - DNA, 25 bp, SARS Virus
catcgttttagttatatgagttact

SEQ ID NO: 203552 - DNA, 25 bp, SARS Virus
atcgttttagtgttatgagttactc

SEQ ID NO: 203553 - DNA, 25 bp, SARS Virus
tcgttttagtgatatgagttactca

SEQ ID NO: 203554 - DNA, 25 bp, SARS Virus
cgttttagtgatttgagttactcaa

SEQ ID NO: 203555 - DNA, 25 bp, SARS Virus
gttttagtgatatgagttactcaaa

SEQ ID NO: 203556 - DNA, 25 bp, SARS Virus
ttttagtgatattagttactcaaac

SEQ ID NO: 203557 - DNA, 25 bp, SARS Virus
tttagtgatatgtgttactcaaacc

SEQ ID NO: 203558 - DNA, 25 bp, SARS Virus
ttagtgatatgatttactcaaacct

SEQ ID NO: 203559 - DNA, 25 bp, SARS Virus
tagtgatatgagttactcaaacctt

SEQ ID NO: 203560 - DNA, 25 bp, SARS Virus
agtgatatgagttactcaaaccttc

SEQ ID NO: 203561 - DNA, 25 bp, SARS Virus
gtgatatgagtttctcaaaccttcc

SEQ ID NO: 203562 - DNA, 25 bp, SARS Virus
tgatatgagttattcaaaccttcca

SEQ ID NO: 203563 - DNA, 25 bp, SARS Virus
gatatgagttactcaaaccttccac

SEQ ID NO: 203564 - DNA, 25 bp, SARS Virus
atatgagttacttaaaccttccaca

SEQ ID NO: 203565 - DNA, 25 bp, SARS Virus
tatgagttactctaaccttccacac

SEQ ID NO: 203566 - DNA, 25 bp, SARS Virus
atgagttactcataccttccacaca

SEQ ID NO: 203567 - DNA, 25 bp, SARS Virus
tgagttactcaatccttccacacat

SEQ ID NO: 203568 - DNA, 25 bp, SARS Virus
gagttactcaaatcttccacacatc

SEQ ID NO: 203569 - DNA, 25 bp, SARS Virus
agttactcaaactttccacacatcg

SEQ ID NO: 203570 - DNA, 25 bp, SARS Virus
gttactcaaaccttccacacatcgt

SEQ ID NO: 203571 - DNA, 25 bp, SARS Virus
ttactcaaaccttccacacatcgtt

SEQ ID NO: 203572 - DNA, 25 bp, SARS Virus
tactcaaacctttcacacatcgttt

SEQ ID NO: 203573 - DNA, 25 bp, SARS Virus
actcaaaccttctacacatcgttta

SEQ ID NO: 203574 - DNA, 25 bp, SARS Virus
ctcaaaccttcctcacatcgtttac

SEQ ID NO: 203575 - DNA, 25 bp, SARS Virus
tcaaaccttccatacatcgtttaca

SEQ ID NO: 203576 - DNA, 25 bp, SARS Virus
caaaccttccactcatcgtttacaa

SEQ ID NO: 203577 - DNA, 25 bp, SARS Virus
aaaccttccacatatcgtttacaac

SEQ ID NO: 203578 - DNA, 25 bp, SARS Virus
aaccttccacacttcgtttacaacg

SEQ ID NO: 203579 - DNA, 25 bp, SARS Virus
accttccacacatcgtttacaacgg

SEQ ID NO: 203580 - DNA, 25 bp, SARS Virus
ccttccacacattgtttacaacggt

SEQ ID NO: 203581 - DNA, 25 bp, SARS Virus
cttccacacatcttttacaacggtt

SEQ ID NO: 203582 - DNA, 25 bp, SARS Virus
ttccacacatcgtttacaacggttg

SEQ ID NO: 203583 - DNA, 25 bp, SARS Virus
tccacacatcgtttacaacggttgt

SEQ ID NO: 203584 - DNA, 25 bp, SARS Virus
ccacacatcgtttacaacggttgtc

SEQ ID NO: 203585 - DNA, 25 bp, SARS Virus
cacacatcgttttcaacggttgtcg

SEQ ID NO: 203586 - DNA, 25 bp, SARS Virus
acacatcgtttataacggttgtcgt

SEQ ID NO: 203587 - DNA, 25 bp, SARS Virus
cacatcgtttactacggttgtcgtg

SEQ ID NO: 203588 - DNA, 25 bp, SARS Virus
acatcgtttacatcggttgtcgtga

SEQ ID NO: 203589 - DNA, 25 bp, SARS Virus
catcgtttacaatggttgtcgtgat

SEQ ID NO: 203590 - DNA, 25 bp, SARS Virus
atcgtttacaactgttgtcgtgatt

SEQ ID NO: 203591 - DNA, 25 bp, SARS Virus
tcgtttacaacgtttgtcgtgattt

SEQ ID NO: 203592 - DNA, 25 bp, SARS Virus
cgtttacaacggttgtcgtgatttt

SEQ ID NO: 203593 - DNA, 25 bp, SARS Virus
gtttacaacggttgtcgtgattttt

SEQ ID NO: 203594 - DNA, 25 bp, SARS Virus
tttacaacggttttcgtgatttttg

SEQ ID NO: 203595 - DNA, 25 bp, SARS Virus
ttacaacggttgtcgtgatttttgt

SEQ ID NO: 203596 - DNA, 25 bp, SARS Virus
tacaacggttgttgtgatttttgtg

SEQ ID NO: 203597 - DNA, 25 bp, SARS Virus
acaacggttgtcttgatttttgtgc

SEQ ID NO: 203598 - DNA, 25 bp, SARS Virus
caacggttgtcgtgatttttgtgct

SEQ ID NO: 203599 - DNA, 25 bp, SARS Virus
aacggttgtcgttatttttgtgctc

SEQ ID NO: 203600 - DNA, 25 bp, SARS Virus
acggttgtcgtgttttttgtgctcc

SEQ ID NO: 203601 - DNA, 25 bp, SARS Virus
cggttgtcgtgatttttgtgctcca

SEQ ID NO: 203602 - DNA, 25 bp, SARS Virus
ggttgtcgtgatttttgtgctccat

SEQ ID NO: 203603 - DNA, 25 bp, SARS Virus
gttgtcgtgatttttgtgctccatc

SEQ ID NO: 203604 - DNA, 25 bp, SARS Virus
ttgtcgtgatttttgtgctccatct

SEQ ID NO: 203605 - DNA, 25 bp, SARS Virus
tgtcgtgatttttgtgctccatctt

SEQ ID NO: 203606 - DNA, 25 bp, SARS Virus
gtcgtgatttttttgctccatcttt

SEQ ID NO: 203607 - DNA, 25 bp, SARS Virus
tcgtgatttttgtgctccatctttt

SEQ ID NO: 203608 - DNA, 25 bp, SARS Virus
cgtgatttttgttctccatctttta

SEQ ID NO: 203609 - DNA, 25 bp, SARS Virus
gtgatttttgtgttccatcttttac

SEQ ID NO: 203610 - DNA, 25 bp, SARS Virus
tgatttttgtgctccatcttttacg

SEQ ID NO: 203611 - DNA, 25 bp, SARS Virus
gatttttgtgcttcatcttttacgt

SEQ ID NO: 203612 - DNA, 25 bp, SARS Virus
atttttgtgctctatcttttacgtt

SEQ ID NO: 203613 - DNA, 25 bp, SARS Virus
tttttgtgctccttcttttacgttc

SEQ ID NO: 203614 - DNA, 25 bp, SARS Virus
ttttgtgctccatcttttacgttct

SEQ ID NO: 203615 - DNA, 25 bp, SARS Virus
tttgtgctccattttttacgttctt

SEQ ID NO: 203616 - DNA, 25 bp, SARS Virus
ttgtgctccatcttttacgttcttc

SEQ ID NO: 203617 - DNA, 25 bp, SARS Virus
tgtgctccatcttttacgttcttca

SEQ ID NO: 203618 - DNA, 25 bp, SARS Virus
gtgctccatcttttacgttcttcag

SEQ ID NO: 203619 - DNA, 25 bp, SARS Virus
tgctccatcttttacgttcttcagt

SEQ ID NO: 203620 - DNA, 25 bp, SARS Virus
gctccatctttttcgttcttcagtg

SEQ ID NO: 203621 - DNA, 25 bp, SARS Virus
ctccatcttttatgttcttcagtgg

SEQ ID NO: 203622 - DNA, 25 bp, SARS Virus
tccatcttttactttcttcagtggt

SEQ ID NO: 203623 - DNA, 25 bp, SARS Virus
ccatcttttacgttcttcagtggta

SEQ ID NO: 203624 - DNA, 25 bp, SARS Virus
catcttttacgttcttcagtggtaa

SEQ ID NO: 203625 - DNA, 25 bp, SARS Virus
atcttttacgtttttcagtggtaac

SEQ ID NO: 203626 - DNA, 25 bp, SARS Virus
tcttttacgttcttcagtggtaact

SEQ ID NO: 203627 - DNA, 25 bp, SARS Virus
cttttacgttcttcagtggtaacta

SEQ ID NO: 203628 - DNA, 25 bp, SARS Virus
ttttacgttctttagtggtaactaa

SEQ ID NO: 203629 - DNA, 25 bp, SARS Virus
tttacgttcttctgtggtaactaac

SEQ ID NO: 203630 - DNA, 25 bp, SARS Virus
ttacgttcttcattggtaactaacg

SEQ ID NO: 203631 - DNA, 25 bp, SARS Virus
tacgttcttcagtggtaactaacga

SEQ ID NO: 203632 - DNA, 25 bp, SARS Virus
acgttcttcagttgtaactaacgag

SEQ ID NO: 203633 - DNA, 25 bp, SARS Virus
cgttcttcagtgttaactaacgaga

SEQ ID NO: 203634 - DNA, 25 bp, SARS Virus
gttcttcagtggtaactaacgagag

SEQ ID NO: 203635 - DNA, 25 bp, SARS Virus
ttcttcagtggttactaacgagagt

SEQ ID NO: 203636 - DNA, 25 bp, SARS Virus
tcttcagtggtatctaacgagagtc

SEQ ID NO: 203637 - DNA, 25 bp, SARS Virus
cttcagtggtaattaacgagagtcg

SEQ ID NO: 203638 - DNA, 25 bp, SARS Virus
ttcagtggtaactaacgagagtcgt

SEQ ID NO: 203639 - DNA, 25 bp, SARS Virus
tcagtggtaacttacgagagtcgtg

SEQ ID NO: 203640 - DNA, 25 bp, SARS Virus
cagtggtaactatcgagagtcgtgt

SEQ ID NO: 203641 - DNA, 25 bp, SARS Virus
agtggtaactaatgagagtcgtgtc

SEQ ID NO: 203642 - DNA, 25 bp, SARS Virus
gtggtaactaactagagtcgtgtca

SEQ ID NO: 203643 - DNA, 25 bp, SARS Virus
tggtaactaacgtgagtcgtgtcat

SEQ ID NO: 203644 - DNA, 25 bp, SARS Virus
ggtaactaacgatagtcgtgtcatg

SEQ ID NO: 203645 - DNA, 25 bp, SARS Virus
gtaactaacgagtgtcgtgtcatgg

SEQ ID NO: 203646 - DNA, 25 bp, SARS Virus
taactaacgagattcgtgtcatggg

SEQ ID NO: 203647 - DNA, 25 bp, SARS Virus
aactaacgagagtcgtgtcatgggc

SEQ ID NO: 203648 - DNA, 25 bp, SARS Virus
actaacgagagttgtgtcatgggcc

SEQ ID NO: 203649 - DNA, 25 bp, SARS Virus
ctaacgagagtcttgtcatgggcca

SEQ ID NO: 203650 - DNA, 25 bp, SARS Virus
taacgagagtcgtgtcatgggccat

SEQ ID NO: 203651 - DNA, 25 bp, SARS Virus
aacgagagtcgtttcatgggccatt

SEQ ID NO: 203652 - DNA, 25 bp, SARS Virus
acgagagtcgtgtcatgggccattc

SEQ ID NO: 203653 - DNA, 25 bp, SARS Virus
cgagagtcgtgttatgggccattcg

SEQ ID NO: 203654 - DNA, 25 bp, SARS Virus
gagagtcgtgtcttgggccattcgg

SEQ ID NO: 203655 - DNA, 25 bp, SARS Virus
agagtcgtgtcatgggccattcggt

SEQ ID NO: 203656 - DNA, 25 bp, SARS Virus
gagtcgtgtcattggccattcggtc

SEQ ID NO: 203657 - DNA, 25 bp, SARS Virus
agtcgtgtcatgtgccattcggtcc

SEQ ID NO: 203658 - DNA, 25 bp, SARS Virus
gtcgtgtcatggtccattcggtccg

SEQ ID NO: 203659 - DNA, 25 bp, SARS Virus
tcgtgtcatgggtcattcggtccgt

SEQ ID NO: 203660 - DNA, 25 bp, SARS Virus
cgtgtcatgggctattcggtccgtg

SEQ ID NO: 203661 - DNA, 25 bp, SARS Virus
gtgtcatgggcctttcggtccgtga

SEQ ID NO: 203662 - DNA, 25 bp, SARS Virus
tgtcatgggccattcggtccgtgat

SEQ ID NO: 203663 - DNA, 25 bp, SARS Virus
gtcatgggccattcggtccgtgata

SEQ ID NO: 203664 - DNA, 25 bp, SARS Virus
tcatgggccatttggtccgtgatac

SEQ ID NO: 203665 - DNA, 25 bp, SARS Virus
catgggccattctgtccgtgatact

SEQ ID NO: 203666 - DNA, 25 bp, SARS Virus
atgggccattcgttccgtgatactt

SEQ ID NO: 203667 - DNA, 25 bp, SARS Virus
tgggccattcggtccgtgatacttt

SEQ ID NO: 203668 - DNA, 25 bp, SARS Virus
gggccattcggttcgtgatactttg

SEQ ID NO: 203669 - DNA, 25 bp, SARS Virus
ggccattcggtctgtgatactttgg

SEQ ID NO: 203670 - DNA, 25 bp, SARS Virus
gccattcggtccttgatactttggt

SEQ ID NO: 203671 - DNA, 25 bp, SARS Virus
ccattcggtccgtgatactttggtt

SEQ ID NO: 203672 - DNA, 25 bp, SARS Virus
cattcggtccgttatactttggtta

SEQ ID NO: 203673 - DNA, 25 bp, SARS Virus
attcggtccgtgttactttggttag

SEQ ID NO: 203674 - DNA, 25 bp, SARS Virus
ttcggtccgtgatactttggttaga

SEQ ID NO: 203675 - DNA, 25 bp, SARS Virus
tcggtccgtgattctttggttagag

SEQ ID NO: 203676 - DNA, 25 bp, SARS Virus
cggtccgtgatattttggttagaga

SEQ ID NO: 203677 - DNA, 25 bp, SARS Virus
ggtccgtgatactttggttagagag

SEQ ID NO: 203678 - DNA, 25 bp, SARS Virus
gtccgtgatactttggttagagaga

SEQ ID NO: 203679 - DNA, 25 bp, SARS Virus
tccgtgatactttggttagagagaa

SEQ ID NO: 203680 - DNA, 25 bp, SARS Virus
ccgtgatacttttgttagagagaac

SEQ ID NO: 203681 - DNA, 25 bp, SARS Virus
cgtgatactttgtttagagagaaca

SEQ ID NO: 203682 - DNA, 25 bp, SARS Virus
gtgatactttggttagagagaacat

SEQ ID NO: 203683 - DNA, 25 bp, SARS Virus
tgatactttggttagagagaacatt

SEQ ID NO: 203684 - DNA, 25 bp, SARS Virus
gatactttggtttgagagaacatta

SEQ ID NO: 203685 - DNA, 25 bp, SARS Virus
atactttggttatagagaacattac

SEQ ID NO: 203686 - DNA, 25 bp, SARS Virus
tactttggttagtgagaacattact

SEQ ID NO: 203687 - DNA, 25 bp, SARS Virus
actttggttagatagaacattacta

SEQ ID NO: 203688 - DNA, 25 bp, SARS Virus
ctttggttagagtgaacattactat

SEQ ID NO: 203689 - DNA, 25 bp, SARS Virus
tttggttagagataacattactatc

SEQ ID NO: 203690 - DNA, 25 bp, SARS Virus
ttggttagagagtacattactatcg

SEQ ID NO: 203691 - DNA, 25 bp, SARS Virus
tggttagagagatcattactatcgt

SEQ ID NO: 203692 - DNA, 25 bp, SARS Virus
ggttagagagaatattactatcgtc

SEQ ID NO: 203693 - DNA, 25 bp, SARS Virus
gttagagagaactttactatcgtcg

SEQ ID NO: 203694 - DNA, 25 bp, SARS Virus
ttagagagaacattactatcgtcga

SEQ ID NO: 203695 - DNA, 25 bp, SARS Virus
tagagagaacattactatcgtcgat

SEQ ID NO: 203696 - DNA, 25 bp, SARS Virus
agagagaacatttctatcgtcgatg

SEQ ID NO: 203697 - DNA, 25 bp, SARS Virus
gagagaacattattatcgtcgatga

SEQ ID NO: 203698 - DNA, 25 bp, SARS Virus
agagaacattactatcgtcgatgat

SEQ ID NO: 203699 - DNA, 25 bp, SARS Virus
gagaacattactttcgtcgatgatg

SEQ ID NO: 203700 - DNA, 25 bp, SARS Virus
agaacattactatcgtcgatgatgt

SEQ ID NO: 203701 - DNA, 25 bp, SARS Virus
gaacattactattgtcgatgatgtc

SEQ ID NO: 203702 - DNA, 25 bp, SARS Virus
aacattactatcttcgatgatgtcc

SEQ ID NO: 203703 - DNA, 25 bp, SARS Virus
acattactatcgtcgatgatgtccc

SEQ ID NO: 203704 - DNA, 25 bp, SARS Virus
cattactatcgttgatgatgtcccg

SEQ ID NO: 203705 - DNA, 25 bp, SARS Virus
attactatcgtctatgatgtcccgt

SEQ ID NO: 203706 - DNA, 25 bp, SARS Virus
ttactatcgtcgttgatgtcccgtc

SEQ ID NO: 203707 - DNA, 25 bp, SARS Virus
tactatcgtcgatgatgtcccgtcg

SEQ ID NO: 203708 - DNA, 25 bp, SARS Virus
actatcgtcgattatgtcccgtcga

SEQ ID NO: 203709 - DNA, 25 bp, SARS Virus
ctatcgtcgatgttgtcccgtcgaa

SEQ ID NO: 203710 - DNA, 25 bp, SARS Virus
tatcgtcgatgatgtcccgtcgaaa

SEQ ID NO: 203711 - DNA, 25 bp, SARS Virus
atcgtcgatgatttcccgtcgaaaa

SEQ ID NO: 203712 - DNA, 25 bp, SARS Virus
tcgtcgatgatgtcccgtcgaaaac

SEQ ID NO: 203713 - DNA, 25 bp, SARS Virus
cgtcgatgatgttccgtcgaaaaca

SEQ ID NO: 203714 - DNA, 25 bp, SARS Virus
gtcgatgatgtctcgtcgaaaacag

SEQ ID NO: 203715 - DNA, 25 bp, SARS Virus
tcgatgatgtcctgtcgaaaacagt

SEQ ID NO: 203716 - DNA, 25 bp, SARS Virus
cgatgatgtcccttcgaaaacagta

SEQ ID NO: 203717 - DNA, 25 bp, SARS Virus
gatgatgtcccgtcgaaaacagtaa

SEQ ID NO: 203718 - DNA, 25 bp, SARS Virus
atgatgtcccgttgaaaacagtaaa

SEQ ID NO: 203719 - DNA, 25 bp, SARS Virus
tgatgtcccgtctaaaacagtaaaa

SEQ ID NO: 203720 - DNA, 25 bp, SARS Virus
gatgtcccgtcgtaaacagtaaaaa

SEQ ID NO: 203721 - DNA, 25 bp, SARS Virus
atgtcccgtcgataacagtaaaaac

SEQ ID NO: 203722 - DNA, 25 bp, SARS Virus
tgtcccgtcgaatacagtaaaaaca

SEQ ID NO: 203723 - DNA, 25 bp, SARS Virus
gtcccgtcgaaatcagtaaaaacat

SEQ ID NO: 203724 - DNA, 25 bp, SARS Virus
tcccgtcgaaaatagtaaaaacata

SEQ ID NO: 203725 - DNA, 25 bp, SARS Virus
cccgtcgaaaactgtaaaaacatac

SEQ ID NO: 203726 - DNA, 25 bp, SARS Virus
ccgtcgaaaacattaaaaacatact

SEQ ID NO: 203727 - DNA, 25 bp, SARS Virus
cgtcgaaaacagtaaaaacatactt

SEQ ID NO: 203728 - DNA, 25 bp, SARS Virus
gtcgaaaacagttaaaacatacttg

SEQ ID NO: 203729 - DNA, 25 bp, SARS Virus
tcgaaaacagtataaacatacttgg

SEQ ID NO: 203730 - DNA, 25 bp, SARS Virus
cgaaaacagtaataacatacttggt

SEQ ID NO: 203731 - DNA, 25 bp, SARS Virus
gaaaacagtaaatacatacttggtg

SEQ ID NO: 203732 - DNA, 25 bp, SARS Virus
aaaacagtaaaatcatacttggtgg

SEQ ID NO: 203733 - DNA, 25 bp, SARS Virus
aaacagtaaaaatatacttggtggt

SEQ ID NO: 203734 - DNA, 25 bp, SARS Virus
aacagtaaaaacttacttggtggtg

SEQ ID NO: 203735 - DNA, 25 bp, SARS Virus
acagtaaaaacatacttggtggtgc

SEQ ID NO: 203736 - DNA, 25 bp, SARS Virus
cagtaaaaacattcttggtggtgcg

SEQ ID NO: 203737 - DNA, 25 bp, SARS Virus
agtaaaaacatatttggtggtgcga

SEQ ID NO: 203738 - DNA, 25 bp, SARS Virus
gtaaaaacatacttggtggtgcgac

SEQ ID NO: 203739 - DNA, 25 bp, SARS Virus
taaaaacatacttggtggtgcgacc

SEQ ID NO: 203740 - DNA, 25 bp, SARS Virus
aaaaacatactttgtggtgcgaccg

SEQ ID NO: 203741 - DNA, 25 bp, SARS Virus
aaaacatacttgttggtgcgaccga

SEQ ID NO: 203742 - DNA, 25 bp, SARS Virus
aaacatacttggtggtgcgaccgat

SEQ ID NO: 203743 - DNA, 25 bp, SARS Virus
aacatacttggttgtgcgaccgatt

SEQ ID NO: 203744 - DNA, 25 bp, SARS Virus
acatacttggtgttgcgaccgattt

SEQ ID NO: 203745 - DNA, 25 bp, SARS Virus
catacttggtggtgcgaccgatttg

SEQ ID NO: 203746 - DNA, 25 bp, SARS Virus
atacttggtggttcgaccgatttgg

SEQ ID NO: 203747 - DNA, 25 bp, SARS Virus
tacttggtggtgtgaccgatttggt

SEQ ID NO: 203748 - DNA, 25 bp, SARS Virus
acttggtggtgctaccgatttggta

SEQ ID NO: 203749 - DNA, 25 bp, SARS Virus
cttggtggtgcgtccgatttggtac

SEQ ID NO: 203750 - DNA, 25 bp, SARS Virus
ttggtggtgcgatcgatttggtacg

SEQ ID NO: 203751 - DNA, 25 bp, SARS Virus
tggtggtgcgactgatttggtacgc

SEQ ID NO: 203752 - DNA, 25 bp, SARS Virus
ggtggtgcgacctatttggtacgca

SEQ ID NO: 203753 - DNA, 25 bp, SARS Virus
gtggtgcgaccgttttggtacgcag

SEQ ID NO: 203754 - DNA, 25 bp, SARS Virus
tggtgcgaccgatttggtacgcagt

SEQ ID NO: 203755 - DNA, 25 bp, SARS Virus
ggtgcgaccgatttggtacgcagtt

SEQ ID NO: 203756 - DNA, 25 bp, SARS Virus
gtgcgaccgatttggtacgcagttt

SEQ ID NO: 203757 - DNA, 25 bp, SARS Virus
tgcgaccgattttgtacgcagtttt

SEQ ID NO: 203758 - DNA, 25 bp, SARS Virus
gcgaccgatttgttacgcagttttg

SEQ ID NO: 203759 - DNA, 25 bp, SARS Virus
cgaccgatttggtacgcagttttgg

SEQ ID NO: 203760 - DNA, 25 bp, SARS Virus
gaccgatttggttcgcagttttggt

SEQ ID NO: 203761 - DNA, 25 bp, SARS Virus
accgatttggtatgcagttttggtc

SEQ ID NO: 203762 - DNA, 25 bp, SARS Virus
ccgatttggtactcagttttggtcg

SEQ ID NO: 203763 - DNA, 25 bp, SARS Virus
cgatttggtacgtagttttggtcgt

SEQ ID NO: 203764 - DNA, 25 bp, SARS Virus
gatttggtacgctgttttggtcgta

SEQ ID NO: 203765 - DNA, 25 bp, SARS Virus
atttggtacgcatttttggtcgtac

SEQ ID NO: 203766 - DNA, 25 bp, SARS Virus
tttggtacgcagttttggtcgtaca

SEQ ID NO: 203767 - DNA, 25 bp, SARS Virus
ttggtacgcagttttggtcgtacaa

SEQ ID NO: 203768 - DNA, 25 bp, SARS Virus
tggtacgcagttttggtcgtacaaa

SEQ ID NO: 203769 - DNA, 25 bp, SARS Virus
ggtacgcagttttggtcgtacaaat

SEQ ID NO: 203770 - DNA, 25 bp, SARS Virus
gtacgcagtttttgtcgtacaaata

SEQ ID NO: 203771 - DNA, 25 bp, SARS Virus
tacgcagttttgttcgtacaaataa

SEQ ID NO: 203772 - DNA, 25 bp, SARS Virus
acgcagttttggtcgtacaaataaa

SEQ ID NO: 203773 - DNA, 25 bp, SARS Virus
cgcagttttggttgtacaaataaac

SEQ ID NO: 203774 - DNA, 25 bp, SARS Virus
gcagttttggtcttacaaataaacg

SEQ ID NO: 203775 - DNA, 25 bp, SARS Virus
cagttttggtcgtacaaataaacgt

SEQ ID NO: 203776 - DNA, 25 bp, SARS Virus
agttttggtcgttcaaataaacgtt

SEQ ID NO: 203777 - DNA, 25 bp, SARS Virus
gttttggtcgtataaataaacgttt

SEQ ID NO: 203778 - DNA, 25 bp, SARS Virus
ttttggtcgtactaataaacgtttt

SEQ ID NO: 203779 - DNA, 25 bp, SARS Virus
tttggtcgtacatataaacgttttg

SEQ ID NO: 203780 - DNA, 25 bp, SARS Virus
ttggtcgtacaattaaacgttttgt

SEQ ID NO: 203781 - DNA, 25 bp, SARS Virus
tggtcgtacaaataaacgttttgtt

SEQ ID NO: 203782 - DNA, 25 bp, SARS Virus
ggtcgtacaaattaacgttttgtta

SEQ ID NO: 203783 - DNA, 25 bp, SARS Virus
gtcgtacaaatatacgttttgttag

SEQ ID NO: 203784 - DNA, 25 bp, SARS Virus
tcgtacaaataatcgttttgttagt

SEQ ID NO: 203785 - DNA, 25 bp, SARS Virus
cgtacaaataaatgttttgttagta

SEQ ID NO: 203786 - DNA, 25 bp, SARS Virus
gtacaaataaactttttgttagtag

SEQ ID NO: 203787 - DNA, 25 bp, SARS Virus
tacaaataaacgttttgttagtagt

SEQ ID NO: 203788 - DNA, 25 bp, SARS Virus
acaaataaacgttttgttagtagtc

SEQ ID NO: 203789 - DNA, 25 bp, SARS Virus
caaataaacgttttgttagtagtca

SEQ ID NO: 203790 - DNA, 25 bp, SARS Virus
aaataaacgttttgttagtagtcat

SEQ ID NO: 203791 - DNA, 25 bp, SARS Virus
aataaacgtttttttagtagtcatc

SEQ ID NO: 203792 - DNA, 25 bp, SARS Virus
ataaacgttttgttagtagtcatct

SEQ ID NO: 203793 - DNA, 25 bp, SARS Virus
taaacgttttgttagtagtcatctt

SEQ ID NO: 203794 - DNA, 25 bp, SARS Virus
aaacgttttgtttgtagtcatcttt

SEQ ID NO: 203795 - DNA, 25 bp, SARS Virus
aacgttttgttattagtcatcttta

SEQ ID NO: 203796 - DNA, 25 bp, SARS Virus
acgttttgttagtagtcatctttac

SEQ ID NO: 203797 - DNA, 25 bp, SARS Virus
cgttttgttagttgtcatctttact

SEQ ID NO: 203798 - DNA, 25 bp, SARS Virus
gttttgttagtattcatctttacta

SEQ ID NO: 203799 - DNA, 25 bp, SARS Virus
ttttgttagtagtcatctttactac

SEQ ID NO: 203800 - DNA, 25 bp, SARS Virus
tttgttagtagttatctttactaca

SEQ ID NO: 203801 - DNA, 25 bp, SARS Virus
ttgttagtagtcttctttactacag

SEQ ID NO: 203802 - DNA, 25 bp, SARS Virus
tgttagtagtcatctttactacagt

SEQ ID NO: 203803 - DNA, 25 bp, SARS Virus
gttagtagtcatttttactacagtg

SEQ ID NO: 203804 - DNA, 25 bp, SARS Virus
ttagtagtcatctttactacagtgc

SEQ ID NO: 203805 - DNA, 25 bp, SARS Virus
tagtagtcatctttactacagtgct

SEQ ID NO: 203806 - DNA, 25 bp, SARS Virus
agtagtcatctttactacagtgctc

SEQ ID NO: 203807 - DNA, 25 bp, SARS Virus
gtagtcatcttttctacagtgctca

SEQ ID NO: 203808 - DNA, 25 bp, SARS Virus
tagtcatctttattacagtgctcac

SEQ ID NO: 203809 - DNA, 25 bp, SARS Virus
agtcatctttactacagtgctcact

SEQ ID NO: 203810 - DNA, 25 bp, SARS Virus
gtcatctttacttcagtgctcactg

SEQ ID NO: 203811 - DNA, 25 bp, SARS Virus
tcatctttactatagtgctcactgt

SEQ ID NO: 203812 - DNA, 25 bp, SARS Virus
catctttactactgtgctcactgtg

SEQ ID NO: 203813 - DNA, 25 bp, SARS Virus
atctttactacattgctcactgtgg

SEQ ID NO: 203814 - DNA, 25 bp, SARS Virus
tctttactacagtgctcactgtggt

SEQ ID NO: 203815 - DNA, 25 bp, SARS Virus
ctttactacagttctcactgtggta

SEQ ID NO: 203816 - DNA, 25 bp, SARS Virus
tttactacagtgttcactgtggtag

SEQ ID NO: 203817 - DNA, 25 bp, SARS Virus
ttactacagtgctcactgtggtagg

SEQ ID NO: 203818 - DNA, 25 bp, SARS Virus
tactacagtgcttactgtggtagga

SEQ ID NO: 203819 - DNA, 25 bp, SARS Virus
actacagtgctctctgtggtaggac

SEQ ID NO: 203820 - DNA, 25 bp, SARS Virus
ctacagtgctcattgtggtaggact

SEQ ID NO: 203821 - DNA, 25 bp, SARS Virus
tacagtgctcactgtggtaggactt

SEQ ID NO: 203822 - DNA, 25 bp, SARS Virus
acagtgctcactttggtaggactta

SEQ ID NO: 203823 - DNA, 25 bp, SARS Virus
cagtgctcactgtggtaggacttac

SEQ ID NO: 203824 - DNA, 25 bp, SARS Virus
agtgctcactgttgtaggacttacc

SEQ ID NO: 203825 - DNA, 25 bp, SARS Virus
gtgctcactgtgttaggacttaccg

SEQ ID NO: 203826 - DNA, 25 bp, SARS Virus
tgctcactgtggtaggacttaccga

SEQ ID NO: 203827 - DNA, 25 bp, SARS Virus
gctcactgtggttggacttaccgaa

SEQ ID NO: 203828 - DNA, 25 bp, SARS Virus
ctcactgtggtatgacttaccgaaa

SEQ ID NO: 203829 - DNA, 25 bp, SARS Virus
tcactgtggtagtacttaccgaaac

SEQ ID NO: 203830 - DNA, 25 bp, SARS Virus
cactgtggtaggtcttaccgaaaca

SEQ ID NO: 203831 - DNA, 25 bp, SARS Virus
actgtggtaggatttaccgaaacat

SEQ ID NO: 203832 - DNA, 25 bp, SARS Virus
ctgtggtaggacttaccgaaacatt

SEQ ID NO: 203833 - DNA, 25 bp, SARS Virus
tgtggtaggacttaccgaaacattg

SEQ ID NO: 203834 - DNA, 25 bp, SARS Virus
gtggtaggactttccgaaacattgg

SEQ ID NO: 203835 - DNA, 25 bp, SARS Virus
tggtaggacttatcgaaacattggt

SEQ ID NO: 203836 - DNA, 25 bp, SARS Virus
ggtaggacttactgaaacattggtt

SEQ ID NO: 203837 - DNA, 25 bp, SARS Virus
gtaggacttacctaaacattggtta

SEQ ID NO: 203838 - DNA, 25 bp, SARS Virus
taggacttaccgtaacattggttac

SEQ ID NO: 203839 - DNA, 25 bp, SARS Virus
aggacttaccgatacattggttact

SEQ ID NO: 203840 - DNA, 25 bp, SARS Virus
ggacttaccgaatcattggttacta

SEQ ID NO: 203841 - DNA, 25 bp, SARS Virus
gacttaccgaaatattggttactaa

SEQ ID NO: 203842 - DNA, 25 bp, SARS Virus
acttaccgaaactttggttactaaa

SEQ ID NO: 203843 - DNA, 25 bp, SARS Virus
cttaccgaaacattggttactaaag

SEQ ID NO: 203844 - DNA, 25 bp, SARS Virus
ttaccgaaacattggttactaaagt

SEQ ID NO: 203845 - DNA, 25 bp, SARS Virus
taccgaaacatttgttactaaagta

SEQ ID NO: 203846 - DNA, 25 bp, SARS Virus
accgaaacattgtttactaaagtaa

SEQ ID NO: 203847 - DNA, 25 bp, SARS Virus
ccgaaacattggttactaaagtaaa

SEQ ID NO: 203848 - DNA, 25 bp, SARS Virus
cgaaacattggttactaaagtaaac

SEQ ID NO: 203849 - DNA, 25 bp, SARS Virus
gaaacattggtttctaaagtaaaca

SEQ ID NO: 203850 - DNA, 25 bp, SARS Virus
aaacattggttattaaagtaaacac

SEQ ID NO: 203851 - DNA, 25 bp, SARS Virus
aacattggttactaaagtaaacaca

SEQ ID NO: 203852 - DNA, 25 bp, SARS Virus
acattggttacttaagtaaacacat

SEQ ID NO: 203853 - DNA, 25 bp, SARS Virus
cattggttactatagtaaacacatt

SEQ ID NO: 203854 - DNA, 25 bp, SARS Virus
attggttactaatgtaaacacattg

SEQ ID NO: 203855 - DNA, 25 bp, SARS Virus
ttggttactaaattaaacacattgg

SEQ ID NO: 203856 - DNA, 25 bp, SARS Virus
tggttactaaagtaaacacattggt

SEQ ID NO: 203857 - DNA, 25 bp, SARS Virus
ggttactaaagttaacacattggta

SEQ ID NO: 203858 - DNA, 25 bp, SARS Virus
gttactaaagtatacacattggtag

SEQ ID NO: 203859 - DNA, 25 bp, SARS Virus
ttactaaagtaatcacattggtagt

SEQ ID NO: 203860 - DNA, 25 bp, SARS Virus
tactaaagtaaatacattggtagta

SEQ ID NO: 203861 - DNA, 25 bp, SARS Virus
actaaagtaaactcattggtagtac

SEQ ID NO: 203862 - DNA, 25 bp, SARS Virus
ctaaagtaaacatattggtagtacc

SEQ ID NO: 203863 - DNA, 25 bp, SARS Virus
taaagtaaacactttggtagtacct

SEQ ID NO: 203864 - DNA, 25 bp, SARS Virus
aaagtaaacacattggtagtaccta

SEQ ID NO: 203865 - DNA, 25 bp, SARS Virus
aagtaaacacattggtagtacctaa

SEQ ID NO: 203866 - DNA, 25 bp, SARS Virus
agtaaacacatttgtagtacctaac

SEQ ID NO: 203867 - DNA, 25 bp, SARS Virus
gtaaacacattgttagtacctaact

SEQ ID NO: 203868 - DNA, 25 bp, SARS Virus
taaacacattggtagtacctaactg

SEQ ID NO: 203869 - DNA, 25 bp, SARS Virus
aaacacattggttgtacctaactgt

SEQ ID NO: 203870 - DNA, 25 bp, SARS Virus
aacacattggtattacctaactgtt

SEQ ID NO: 203871 - DNA, 25 bp, SARS Virus
acacattggtagtacctaactgtta

SEQ ID NO: 203872 - DNA, 25 bp, SARS Virus
cacattggtagttcctaactgttac

SEQ ID NO: 203873 - DNA, 25 bp, SARS Virus
acattggtagtatctaactgttaca

SEQ ID NO: 203874 - DNA, 25 bp, SARS Virus
cattggtagtacttaactgttacat

SEQ ID NO: 203875 - DNA, 25 bp, SARS Virus
attggtagtacctaactgttacata

SEQ ID NO: 203876 - DNA, 25 bp, SARS Virus
ttggtagtaccttactgttacatac

SEQ ID NO: 203877 - DNA, 25 bp, SARS Virus
tggtagtacctatctgttacataca

SEQ ID NO: 203878 - DNA, 25 bp, SARS Virus
ggtagtacctaattgttacatacat

SEQ ID NO: 203879 - DNA, 25 bp, SARS Virus
gtagtacctaactgttacatacatg

SEQ ID NO: 203880 - DNA, 25 bp, SARS Virus
tagtacctaacttttacatacatga

SEQ ID NO: 203881 - DNA, 25 bp, SARS Virus
agtacctaactgttacatacatgac

SEQ ID NO: 203882 - DNA, 25 bp, SARS Virus
gtacctaactgttacatacatgacc

SEQ ID NO: 203883 - DNA, 25 bp, SARS Virus
tacctaactgtttcatacatgaccg

SEQ ID NO: 203884 - DNA, 25 bp, SARS Virus
acctaactgttatatacatgaccgt

SEQ ID NO: 203885 - DNA, 25 bp, SARS Virus
cctaactgttacttacatgaccgta

SEQ ID NO: 203886 - DNA, 25 bp, SARS Virus
ctaactgttacatacatgaccgtat

SEQ ID NO: 203887 - DNA, 25 bp, SARS Virus
taactgttacattcatgaccgtatt

SEQ ID NO: 203888 - DNA, 25 bp, SARS Virus
aactgttacatatatgaccgtattg

SEQ ID NO: 203889 - DNA, 25 bp, SARS Virus
actgttacatacttgaccgtattgc

SEQ ID NO: 203890 - DNA, 25 bp, SARS Virus
ctgttacatacatgaccgtattgct

SEQ ID NO: 203891 - DNA, 25 bp, SARS Virus
tgttacatacattaccgtattgcta

SEQ ID NO: 203892 - DNA, 25 bp, SARS Virus
gttacatacatgtccgtattgctat

SEQ ID NO: 203893 - DNA, 25 bp, SARS Virus
ttacatacatgatcgtattgctata

SEQ ID NO: 203894 - DNA, 25 bp, SARS Virus
tacatacatgactgtattgctatat

SEQ ID NO: 203895 - DNA, 25 bp, SARS Virus
acatacatgaccttattgctatatt

SEQ ID NO: 203896 - DNA, 25 bp, SARS Virus
catacatgaccgtattgctatattg

SEQ ID NO: 203897 - DNA, 25 bp, SARS Virus
atacatgaccgttttgctatattgt

SEQ ID NO: 203898 - DNA, 25 bp, SARS Virus
tacatgaccgtattgctatattgtt

SEQ ID NO: 203899 - DNA, 25 bp, SARS Virus
acatgaccgtattgctatattgttt

SEQ ID NO: 203900 - DNA, 25 bp, SARS Virus
catgaccgtatttctatattgtttg

SEQ ID NO: 203901 - DNA, 25 bp, SARS Virus
atgaccgtattgttatattgtttgg

SEQ ID NO: 203902 - DNA, 25 bp, SARS Virus
tgaccgtattgctatattgtttggt

SEQ ID NO: 203903 - DNA, 25 bp, SARS Virus
gaccgtattgctttattgtttggtt

SEQ ID NO: 203904 - DNA, 25 bp, SARS Virus
accgtattgctatattgtttggtta

SEQ ID NO: 203905 - DNA, 25 bp, SARS Virus
ccgtattgctattttgtttggttac

SEQ ID NO: 203906 - DNA, 25 bp, SARS Virus
cgtattgctatattgtttggttacg

SEQ ID NO: 203907 - DNA, 25 bp, SARS Virus
gtattgctatattgtttggttacgt

SEQ ID NO: 203908 - DNA, 25 bp, SARS Virus
tattgctatattttttggttacgtc

SEQ ID NO: 203909 - DNA, 25 bp, SARS Virus
attgctatattgtttggttacgtcg

SEQ ID NO: 203910 - DNA, 25 bp, SARS Virus
ttgctatattgtttggttacgtcgt

SEQ ID NO: 203911 - DNA, 25 bp, SARS Virus
tgctatattgtttggttacgtcgtt

SEQ ID NO: 203912 - DNA, 25 bp, SARS Virus
gctatattgttttgttacgtcgttc

SEQ ID NO: 203913 - DNA, 25 bp, SARS Virus
ctatattgtttgtttacgtcgttct

SEQ ID NO: 203914 - DNA, 25 bp, SARS Virus
tatattgtttggttacgtcgttctt

SEQ ID NO: 203915 - DNA, 25 bp, SARS Virus
atattgtttggttacgtcgttcttg

SEQ ID NO: 203916 - DNA, 25 bp, SARS Virus
tattgtttggtttcgtcgttcttgc

SEQ ID NO: 203917 - DNA, 25 bp, SARS Virus
attgtttggttatgtcgttcttgcg

SEQ ID NO: 203918 - DNA, 25 bp, SARS Virus
ttgtttggttacttcgttcttgcgt

SEQ ID NO: 203919 - DNA, 25 bp, SARS Virus
tgtttggttacgtcgttcttgcgtg

SEQ ID NO: 203920 - DNA, 25 bp, SARS Virus
gtttggttacgttgttcttgcgtgt

SEQ ID NO: 203921 - DNA, 25 bp, SARS Virus
tttggttacgtctttcttgcgtgtt

SEQ ID NO: 203922 - DNA, 25 bp, SARS Virus
ttggttacgtcgttcttgcgtgtta

SEQ ID NO: 203923 - DNA, 25 bp, SARS Virus
tggttacgtcgttcttgcgtgttat

SEQ ID NO: 203924 - DNA, 25 bp, SARS Virus
ggttacgtcgtttttgcgtgttatt

SEQ ID NO: 203925 - DNA, 25 bp, SARS Virus
gttacgtcgttcttgcgtgttatta

SEQ ID NO: 203926 - DNA, 25 bp, SARS Virus
ttacgtcgttcttgcgtgttattac

SEQ ID NO: 203927 - DNA, 25 bp, SARS Virus
tacgtcgttctttcgtgttattaca

SEQ ID NO: 203928 - DNA, 25 bp, SARS Virus
acgtcgttcttgtgtgttattacac

SEQ ID NO: 203929 - DNA, 25 bp, SARS Virus
cgtcgttcttgcttgttattacacc

SEQ ID NO: 203930 - DNA, 25 bp, SARS Virus
gtcgttcttgcgtgttattacaccg

SEQ ID NO: 203931 - DNA, 25 bp, SARS Virus
tcgttcttgcgttttattacaccgg

SEQ ID NO: 203932 - DNA, 25 bp, SARS Virus
cgttcttgcgtgttattacaccgga

SEQ ID NO: 203933 - DNA, 25 bp, SARS Virus
gttcttgcgtgttattacaccggaa

SEQ ID NO: 203934 - DNA, 25 bp, SARS Virus
ttcttgcgtgtttttacaccggaat

SEQ ID NO: 203935 - DNA, 25 bp, SARS Virus
tcttgcgtgttattacaccggaatt

SEQ ID NO: 203936 - DNA, 25 bp, SARS Virus
cttgcgtgttattacaccggaattc

SEQ ID NO: 203937 - DNA, 25 bp, SARS Virus
ttgcgtgttatttcaccggaattcg

SEQ ID NO: 203938 - DNA, 25 bp, SARS Virus
tgcgtgttattataccggaattcgt

SEQ ID NO: 203939 - DNA, 25 bp, SARS Virus
gcgtgttattactccggaattcgta

SEQ ID NO: 203940 - DNA, 25 bp, SARS Virus
cgtgttattacatcggaattcgtat

SEQ ID NO: 203941 - DNA, 25 bp, SARS Virus
gtgttattacactggaattcgtatt

SEQ ID NO: 203942 - DNA, 25 bp, SARS Virus
tgttattacacctgaattcgtattc

SEQ ID NO: 203943 - DNA, 25 bp, SARS Virus
gttattacaccgtaattcgtattca

SEQ ID NO: 203944 - DNA, 25 bp, SARS Virus
ttattacaccggtattcgtattcaa

SEQ ID NO: 203945 - DNA, 25 bp, SARS Virus
tattacaccggatttcgtattcaaa

SEQ ID NO: 203946 - DNA, 25 bp, SARS Virus
attacaccggaattcgtattcaaat

SEQ ID NO: 203947 - DNA, 25 bp, SARS Virus
ttacaccggaattcgtattcaaatt

SEQ ID NO: 203948 - DNA, 25 bp, SARS Virus
tacaccggaatttgtattcaaattt

SEQ ID NO: 203949 - DNA, 25 bp, SARS Virus
acaccggaattcttattcaaatttt

SEQ ID NO: 203950 - DNA, 25 bp, SARS Virus
caccggaattcgtattcaaattttg

SEQ ID NO: 203951 - DNA, 25 bp, SARS Virus
accggaattcgttttcaaattttgt

SEQ ID NO: 203952 - DNA, 25 bp, SARS Virus
ccggaattcgtattcaaattttgtt

SEQ ID NO: 203953 - DNA, 25 bp, SARS Virus
cggaattcgtattcaaattttgttc

SEQ ID NO: 203954 - DNA, 25 bp, SARS Virus
ggaattcgtatttaaattttgttca

SEQ ID NO: 203955 - DNA, 25 bp, SARS Virus
gaattcgtattctaattttgttcat

SEQ ID NO: 203956 - DNA, 25 bp, SARS Virus
aattcgtattcatattttgttcatg

SEQ ID NO: 203957 - DNA, 25 bp, SARS Virus
attcgtattcaatttttgttcatga

SEQ ID NO: 203958 - DNA, 25 bp, SARS Virus
ttcgtattcaaattttgttcatgat

SEQ ID NO: 203959 - DNA, 25 bp, SARS Virus
tcgtattcaaattttgttcatgatt

SEQ ID NO: 203960 - DNA, 25 bp, SARS Virus
cgtattcaaattttgttcatgattg

SEQ ID NO: 203961 - DNA, 25 bp, SARS Virus
gtattcaaattttgttcatgattgt

SEQ ID NO: 203962 - DNA, 25 bp, SARS Virus
tattcaaatttttttcatgattgtt

SEQ ID NO: 203963 - DNA, 25 bp, SARS Virus
attcaaattttgttcatgattgtta

SEQ ID NO: 203964 - DNA, 25 bp, SARS Virus
ttcaaattttgttcatgattgttag

SEQ ID NO: 203965 - DNA, 25 bp, SARS Virus
tcaaattttgtttatgattgttaga

SEQ ID NO: 203966 - DNA, 25 bp, SARS Virus
caaattttgttcttgattgttagaa

SEQ ID NO: 203967 - DNA, 25 bp, SARS Virus
aaattttgttcatgattgttagaat

SEQ ID NO: 203968 - DNA, 25 bp, SARS Virus
aattttgttcattattgttagaatg

SEQ ID NO: 203969 - DNA, 25 bp, SARS Virus
attttgttcatgtttgttagaatgg

SEQ ID NO: 203970 - DNA, 25 bp, SARS Virus
ttttgttcatgattgttagaatggt

SEQ ID NO: 203971 - DNA, 25 bp, SARS Virus
tttgttcatgattgttagaatggtg

SEQ ID NO: 203972 - DNA, 25 bp, SARS Virus
ttgttcatgatttttagaatggtgg

SEQ ID NO: 203973 - DNA, 25 bp, SARS Virus
tgttcatgattgttagaatggtggg

SEQ ID NO: 203974 - DNA, 25 bp, SARS Virus
gttcatgattgttagaatggtggga

SEQ ID NO: 203975 - DNA, 25 bp, SARS Virus
ttcatgattgtttgaatggtgggaa

SEQ ID NO: 203976 - DNA, 25 bp, SARS Virus
tcatgattgttataatggtgggaac

SEQ ID NO: 203977 - DNA, 25 bp, SARS Virus
catgattgttagtatggtgggaact

SEQ ID NO: 203978 - DNA, 25 bp, SARS Virus
atgattgttagattggtgggaactc

SEQ ID NO: 203979 - DNA, 25 bp, SARS Virus
tgattgttagaatggtgggaactca

SEQ ID NO: 203980 - DNA, 25 bp, SARS Virus
gattgttagaattgtgggaactcac

SEQ ID NO: 203981 - DNA, 25 bp, SARS Virus
attgttagaatgttgggaactcact

SEQ ID NO: 203982 - DNA, 25 bp, SARS Virus
ttgttagaatggtgggaactcactc

SEQ ID NO: 203983 - DNA, 25 bp, SARS Virus
tgttagaatggttggaactcactct

SEQ ID NO: 203984 - DNA, 25 bp, SARS Virus
gttagaatggtgtgaactcactcta

SEQ ID NO: 203985 - DNA, 25 bp, SARS Virus
ttagaatggtggtaactcactctaa

SEQ ID NO: 203986 - DNA, 25 bp, SARS Virus
tagaatggtgggtactcactctaaa

SEQ ID NO: 203987 - DNA, 25 bp, SARS Virus
agaatggtgggatctcactctaaaa

SEQ ID NO: 203988 - DNA, 25 bp, SARS Virus
gaatggtgggaattcactctaaaat

SEQ ID NO: 203989 - DNA, 25 bp, SARS Virus
aatggtgggaactcactctaaaatc

SEQ ID NO: 203990 - DNA, 25 bp, SARS Virus
atggtgggaacttactctaaaatca

SEQ ID NO: 203991 - DNA, 25 bp, SARS Virus
tggtgggaactctctctaaaatcat

SEQ ID NO: 203992 - DNA, 25 bp, SARS Virus
ggtgggaactcattctaaaatcatc

SEQ ID NO: 203993 - DNA, 25 bp, SARS Virus
gtgggaactcactctaaaatcatca

SEQ ID NO: 203994 - DNA, 25 bp, SARS Virus
tgggaactcactttaaaatcatcaa

SEQ ID NO: 203995 - DNA, 25 bp, SARS Virus
gggaactcactctaaaatcatcaat

SEQ ID NO: 203996 - DNA, 25 bp, SARS Virus
ggaactcactcttaaatcatcaata

SEQ ID NO: 203997 - DNA, 25 bp, SARS Virus
gaactcactctataatcatcaatac

SEQ ID NO: 203998 - DNA, 25 bp, SARS Virus
aactcactctaatatcatcaatact

SEQ ID NO: 203999 - DNA, 25 bp, SARS Virus
actcactctaaattcatcaatactg

SEQ ID NO: 204000 - DNA, 25 bp, SARS Virus
ctcactctaaaatcatcaatactgt

SEQ ID NO: 204001 - DNA, 25 bp, SARS Virus
tcactctaaaattatcaatactgta

SEQ ID NO: 204002 - DNA, 25 bp, SARS Virus
cactctaaaatcttcaatactgtaa

SEQ ID NO: 204003 - DNA, 25 bp, SARS Virus
actctaaaatcatcaatactgtaac

SEQ ID NO: 204004 - DNA, 25 bp, SARS Virus
ctctaaaatcattaatactgtaact

SEQ ID NO: 204005 - DNA, 25 bp, SARS Virus
tctaaaatcatctatactgtaactg

SEQ ID NO: 204006 - DNA, 25 bp, SARS Virus
ctaaaatcatcattactgtaactgt

SEQ ID NO: 204007 - DNA, 25 bp, SARS Virus
taaaatcatcaatactgtaactgtt

SEQ ID NO: 204008 - DNA, 25 bp, SARS Virus
aaaatcatcaattctgtaactgttg

SEQ ID NO: 204009 - DNA, 25 bp, SARS Virus
aaatcatcaatattgtaactgttgg

SEQ ID NO: 204010 - DNA, 25 bp, SARS Virus
aatcatcaatactgtaactgttgga

SEQ ID NO: 204011 - DNA, 25 bp, SARS Virus
atcatcaatactttaactgttggac

SEQ ID NO: 204012 - DNA, 25 bp, SARS Virus
tcatcaatactgtaactgttggaca

SEQ ID NO: 204013 - DNA, 25 bp, SARS Virus
catcaatactgttactgttggacag

SEQ ID NO: 204014 - DNA, 25 bp, SARS Virus
atcaatactgtatctgttggacaga

SEQ ID NO: 204015 - DNA, 25 bp, SARS Virus
tcaatactgtaattgttggacagat

SEQ ID NO: 204016 - DNA, 25 bp, SARS Virus
caatactgtaactgttggacagatc

SEQ ID NO: 204017 - DNA, 25 bp, SARS Virus
aatactgtaactattggacagatca

SEQ ID NO: 204018 - DNA, 25 bp, SARS Virus
atactgtaactgatggacagatcaa

SEQ ID NO: 204019 - DNA, 25 bp, SARS Virus
tactgtaactgtaggacagatcaac

SEQ ID NO: 204020 - DNA, 25 bp, SARS Virus
actgtaactgttagacagatcaaca

SEQ ID NO: 204021 - DNA, 25 bp, SARS Virus
ctgtaactgttgaacagatcaacat

SEQ ID NO: 204022 - DNA, 25 bp, SARS Virus
tgtaactgttggacagatcaacatc

SEQ ID NO: 204023 - DNA, 25 bp, SARS Virus
gtaactgttggaaagatcaacatcg

SEQ ID NO: 204024 - DNA, 25 bp, SARS Virus
taactgttggacagatcaacatcgt

SEQ ID NO: 204025 - DNA, 25 bp, SARS Virus
aactgttggacaaatcaacatcgtg

SEQ ID NO: 204026 - DNA, 25 bp, SARS Virus
actgttggacagatcaacatcgtgt

SEQ ID NO: 204027 - DNA, 25 bp, SARS Virus
ctgttggacagaacaacatcgtgtt

SEQ ID NO: 204028 - DNA, 25 bp, SARS Virus
tgttggacagataaacatcgtgttc

SEQ ID NO: 204029 - DNA, 25 bp, SARS Virus
gttggacagatcaacatcgtgttca

SEQ ID NO: 204030 - DNA, 25 bp, SARS Virus
ttggacagatcaacatcgtgttcaa

SEQ ID NO: 204031 - DNA, 25 bp, SARS Virus
tggacagatcaaaatcgtgttcaat

SEQ ID NO: 204032 - DNA, 25 bp, SARS Virus
ggacagatcaacatcgtgttcaatc

SEQ ID NO: 204033 - DNA, 25 bp, SARS Virus
gacagatcaacaacgtgttcaatca

SEQ ID NO: 204034 - DNA, 25 bp, SARS Virus
acagatcaacatagtgttcaatcag

SEQ ID NO: 204035 - DNA, 25 bp, SARS Virus
cagatcaacatcatgttcaatcaga

SEQ ID NO: 204036 - DNA, 25 bp, SARS Virus
agatcaacatcgagttcaatcagat

SEQ ID NO: 204037 - DNA, 25 bp, SARS Virus
gatcaacatcgtattcaatcagatt

SEQ ID NO: 204038 - DNA, 25 bp, SARS Virus
atcaacatcgtgatcaatcagattt

SEQ ID NO: 204039 - DNA, 25 bp, SARS Virus
tcaacatcgtgtacaatcagatttt

SEQ ID NO: 204040 - DNA, 25 bp, SARS Virus
caacatcgtgttaaatcagattttc

SEQ ID NO: 204041 - DNA, 25 bp, SARS Virus
aacatcgtgttcaatcagattttcc

SEQ ID NO: 204042 - DNA, 25 bp, SARS Virus
acatcgtgttcaatcagattttcca

SEQ ID NO: 204043 - DNA, 25 bp, SARS Virus
catcgtgttcaaacagattttccat

SEQ ID NO: 204044 - DNA, 25 bp, SARS Virus
atcgtgttcaataagattttccata

SEQ ID NO: 204045 - DNA, 25 bp, SARS Virus
tcgtgttcaatcagattttccatac

SEQ ID NO: 204046 - DNA, 25 bp, SARS Virus
cgtgttcaatcaaattttccataca

SEQ ID NO: 204047 - DNA, 25 bp, SARS Virus
gtgttcaatcagattttccatacaa

SEQ ID NO: 204048 - DNA, 25 bp, SARS Virus
tgttcaatcagaatttccatacaac

SEQ ID NO: 204049 - DNA, 25 bp, SARS Virus
gttcaatcagatattccatacaaca

SEQ ID NO: 204050 - DNA, 25 bp, SARS Virus
ttcaatcagattatccatacaacaa

SEQ ID NO: 204051 - DNA, 25 bp, SARS Virus
tcaatcagatttaccatacaacaag

SEQ ID NO: 204052 - DNA, 25 bp, SARS Virus
caatcagattttacatacaacaaga

SEQ ID NO: 204053 - DNA, 25 bp, SARS Virus
aatcagattttcaatacaacaagaa

SEQ ID NO: 204054 - DNA, 25 bp, SARS Virus
atcagattttccatacaacaagaag

SEQ ID NO: 204055 - DNA, 25 bp, SARS Virus
tcagattttccaaacaacaagaaga

SEQ ID NO: 204056 - DNA, 25 bp, SARS Virus
cagattttccatacaacaagaagaa

SEQ ID NO: 204057 - DNA, 25 bp, SARS Virus
agattttccataaaacaagaagaac

SEQ ID NO: 204058 - DNA, 25 bp, SARS Virus
gattttccatacaacaagaagaacc

SEQ ID NO: 204059 - DNA, 25 bp, SARS Virus
attttccatacaacaagaagaaccg

SEQ ID NO: 204060 - DNA, 25 bp, SARS Virus
ttttccatacaaaaagaagaaccgt

SEQ ID NO: 204061 - DNA, 25 bp, SARS Virus
tttccatacaacaagaagaaccgtc

SEQ ID NO: 204062 - DNA, 25 bp, SARS Virus
ttccatacaacaagaagaaccgtcg

SEQ ID NO: 204063 - DNA, 25 bp, SARS Virus
tccatacaacaaaaagaaccgtcgt

SEQ ID NO: 204064 - DNA, 25 bp, SARS Virus
ccatacaacaagaagaaccgtcgtg

SEQ ID NO: 204065 - DNA, 25 bp, SARS Virus
catacaacaagaagaaccgtcgtga

SEQ ID NO: 204066 - DNA, 25 bp, SARS Virus
atacaacaagaaaaaccgtcgtgat

SEQ ID NO: 204067 - DNA, 25 bp, SARS Virus
tacaacaagaagaaccgtcgtgatg

SEQ ID NO: 204068 - DNA, 25 bp, SARS Virus
acaacaagaagaaccgtcgtgatgc

SEQ ID NO: 204069 - DNA, 25 bp, SARS Virus
caacaagaagaaacgtcgtgatgct

SEQ ID NO: 204070 - DNA, 25 bp, SARS Virus
aacaagaagaacagtcgtgatgctt

SEQ ID NO: 204071 - DNA, 25 bp, SARS Virus
acaagaagaaccatcgtgatgctta

SEQ ID NO: 204072 - DNA, 25 bp, SARS Virus
caagaagaaccgacgtgatgcttaa

SEQ ID NO: 204073 - DNA, 25 bp, SARS Virus
aagaagaaccgtagtgatgcttaaa

SEQ ID NO: 204074 - DNA, 25 bp, SARS Virus
agaagaaccgtcatgatgcttaaac

SEQ ID NO: 204075 - DNA, 25 bp, SARS Virus
gaagaaccgtcgagatgcttaaaca

SEQ ID NO: 204076 - DNA, 25 bp, SARS Virus
aagaaccgtcgtaatgcttaaacaa

SEQ ID NO: 204077 - DNA, 25 bp, SARS Virus
agaaccgtcgtgatgcttaaacaaa

SEQ ID NO: 204078 - DNA, 25 bp, SARS Virus
gaaccgtcgtgaagcttaaacaaat

SEQ ID NO: 204079 - DNA, 25 bp, SARS Virus
aaccgtcgtgatacttaaacaaatg

SEQ ID NO: 204080 - DNA, 25 bp, SARS Virus
accgtcgtgatgattaaacaaatgc

SEQ ID NO: 204081 - DNA, 25 bp, SARS Virus
ccgtcgtgatgcataaacaaatgcg

SEQ ID NO: 204082 - DNA, 25 bp, SARS Virus
cgtcgtgatgctaaaacaaatgcgt

SEQ ID NO: 204083 - DNA, 25 bp, SARS Virus
gtcgtgatgcttaaacaaatgcgtc

SEQ ID NO: 204084 - DNA, 25 bp, SARS Virus
tcgtgatgcttaaacaaatgcgtcg

SEQ ID NO: 204085 - DNA, 25 bp, SARS Virus
cgtgatgcttaaacaaatgcgtcga

SEQ ID NO: 204086 - DNA, 25 bp, SARS Virus
gtgatgcttaaaaaaatgcgtcgac

SEQ ID NO: 204087 - DNA, 25 bp, SARS Virus
tgatgcttaaacaaatgcgtcgaca

SEQ ID NO: 204088 - DNA, 25 bp, SARS Virus
gatgcttaaacaaatgcgtcgacaa

SEQ ID NO: 204089 - DNA, 25 bp, SARS Virus
atgcttaaacaaatgcgtcgacaag

SEQ ID NO: 204090 - DNA, 25 bp, SARS Virus
tgcttaaacaaaagcgtcgacaagt

SEQ ID NO: 204091 - DNA, 25 bp, SARS Virus
gcttaaacaaatacgtcgacaagtc

SEQ ID NO: 204092 - DNA, 25 bp, SARS Virus
cttaaacaaatgagtcgacaagtct

SEQ ID NO: 204093 - DNA, 25 bp, SARS Virus
ttaaacaaatgcatcgacaagtcta

SEQ ID NO: 204094 - DNA, 25 bp, SARS Virus
taaacaaatgcgacgacaagtctat

SEQ ID NO: 204095 - DNA, 25 bp, SARS Virus
aaacaaatgcgtagacaagtctatt

SEQ ID NO: 204096 - DNA, 25 bp, SARS Virus
aacaaatgcgtcaacaagtctattt

SEQ ID NO: 204097 - DNA, 25 bp, SARS Virus
acaaatgcgtcgacaagtctatttc

SEQ ID NO: 204098 - DNA, 25 bp, SARS Virus
caaatgcgtcgaaaagtctatttct

SEQ ID NO: 204099 - DNA, 25 bp, SARS Virus
aaatgcgtcgacaagtctatttctg

SEQ ID NO: 204100 - DNA, 25 bp, SARS Virus
aatgcgtcgacaagtctatttctgt

SEQ ID NO: 204101 - DNA, 25 bp, SARS Virus
atgcgtcgacaaatctatttctgta

SEQ ID NO: 204102 - DNA, 25 bp, SARS Virus
tgcgtcgacaagactatttctgtac

SEQ ID NO: 204103 - DNA, 25 bp, SARS Virus
gcgtcgacaagtatatttctgtaca

SEQ ID NO: 204104 - DNA, 25 bp, SARS Virus
cgtcgacaagtcaatttctgtacat

SEQ ID NO: 204105 - DNA, 25 bp, SARS Virus
gtcgacaagtctatttctgtacatc

SEQ ID NO: 204106 - DNA, 25 bp, SARS Virus
tcgacaagtctaattctgtacatca

SEQ ID NO: 204107 - DNA, 25 bp, SARS Virus
cgacaagtctatatctgtacatcag

SEQ ID NO: 204108 - DNA, 25 bp, SARS Virus
gacaagtctattactgtacatcaga

SEQ ID NO: 204109 - DNA, 25 bp, SARS Virus
acaagtctatttatgtacatcagaa

SEQ ID NO: 204110 - DNA, 25 bp, SARS Virus
caagtctatttcagtacatcagaaa

SEQ ID NO: 204111 - DNA, 25 bp, SARS Virus
aagtctatttctatacatcagaaaa

SEQ ID NO: 204112 - DNA, 25 bp, SARS Virus
agtctatttctgaacatcagaaaat

SEQ ID NO: 204113 - DNA, 25 bp, SARS Virus
gtctatttctgtacatcagaaaatg

SEQ ID NO: 204114 - DNA, 25 bp, SARS Virus
tctatttctgtaaatcagaaaatgt

SEQ ID NO: 204115 - DNA, 25 bp, SARS Virus
ctatttctgtacatcagaaaatgta

SEQ ID NO: 204116 - DNA, 25 bp, SARS Virus
tatttctgtacaacagaaaatgtaa

SEQ ID NO: 204117 - DNA, 25 bp, SARS Virus
atttctgtacataagaaaatgtaag

SEQ ID NO: 204118 - DNA, 25 bp, SARS Virus
tttctgtacatcagaaaatgtaagg

SEQ ID NO: 204119 - DNA, 25 bp, SARS Virus
ttctgtacatcaaaaaatgtaaggt

SEQ ID NO: 204120 - DNA, 25 bp, SARS Virus
tctgtacatcagaaaatgtaaggtc

SEQ ID NO: 204121 - DNA, 25 bp, SARS Virus
ctgtacatcagaaaatgtaaggtct

SEQ ID NO: 204122 - DNA, 25 bp, SARS Virus
tgtacatcagaaaatgtaaggtcta

SEQ ID NO: 204123 - DNA, 25 bp, SARS Virus
gtacatcagaaaatgtaaggtctac

SEQ ID NO: 204124 - DNA, 25 bp, SARS Virus
tacatcagaaaaagtaaggtctact

SEQ ID NO: 204125 - DNA, 25 bp, SARS Virus
acatcagaaaatataaggtctactc

SEQ ID NO: 204126 - DNA, 25 bp, SARS Virus
catcagaaaatgaaaggtctactca

SEQ ID NO: 204127 - DNA, 25 bp, SARS Virus
atcagaaaatgtaaggtctactcac

SEQ ID NO: 204128 - DNA, 25 bp, SARS Virus
tcagaaaatgtaaggtctactcact

SEQ ID NO: 204129 - DNA, 25 bp, SARS Virus
cagaaaatgtaaagtctactcactt

SEQ ID NO: 204130 - DNA, 25 bp, SARS Virus
agaaaatgtaagatctactcacttt

SEQ ID NO: 204131 - DNA, 25 bp, SARS Virus
gaaaatgtaaggactactcactttg

SEQ ID NO: 204132 - DNA, 25 bp, SARS Virus
aaaatgtaaggtatactcactttgt

SEQ ID NO: 204133 - DNA, 25 bp, SARS Virus
aaatgtaaggtcaactcactttgta

SEQ ID NO: 204134 - DNA, 25 bp, SARS Virus
aatgtaaggtctactcactttgtaa

SEQ ID NO: 204135 - DNA, 25 bp, SARS Virus
atgtaaggtctaatcactttgtaac

SEQ ID NO: 204136 - DNA, 25 bp, SARS Virus
tgtaaggtctacacactttgtaaca

SEQ ID NO: 204137 - DNA, 25 bp, SARS Virus
gtaaggtctactaactttgtaacac

SEQ ID NO: 204138 - DNA, 25 bp, SARS Virus
taaggtctactcactttgtaacact

SEQ ID NO: 204139 - DNA, 25 bp, SARS Virus
aaggtctactcaatttgtaacactg

SEQ ID NO: 204140 - DNA, 25 bp, SARS Virus
aggtctactcacattgtaacactga

SEQ ID NO: 204141 - DNA, 25 bp, SARS Virus
ggtctactcactatgtaacactgaa

SEQ ID NO: 204142 - DNA, 25 bp, SARS Virus
gtctactcacttagtaacactgaaa

SEQ ID NO: 204143 - DNA, 25 bp, SARS Virus
tctactcactttataacactgaaaa

SEQ ID NO: 204144 - DNA, 25 bp, SARS Virus
ctactcactttgaaacactgaaaaa

SEQ ID NO: 204145 - DNA, 25 bp, SARS Virus
tactcactttgtaacactgaaaaac

SEQ ID NO: 204146 - DNA, 25 bp, SARS Virus
actcactttgtaacactgaaaaacg

SEQ ID NO: 204147 - DNA, 25 bp, SARS Virus
ctcactttgtaaaactgaaaaacga

SEQ ID NO: 204148 - DNA, 25 bp, SARS Virus
tcactttgtaacactgaaaaacgat

SEQ ID NO: 204149 - DNA, 25 bp, SARS Virus
cactttgtaacaatgaaaaacgatg

SEQ ID NO: 204150 - DNA, 25 bp, SARS Virus
actttgtaacacagaaaaacgatga

SEQ ID NO: 204151 - DNA, 25 bp, SARS Virus
ctttgtaacactaaaaaacgatgaa

SEQ ID NO: 204152 - DNA, 25 bp, SARS Virus
tttgtaacactgaaaaacgatgaac

SEQ ID NO: 204153 - DNA, 25 bp, SARS Virus
ttgtaacactgaaaaacgatgaacc

SEQ ID NO: 204154 - DNA, 25 bp, SARS Virus
tgtaacactgaaaaacgatgaaccc

SEQ ID NO: 204155 - DNA, 25 bp, SARS Virus
gtaacactgaaaaacgatgaacccg

SEQ ID NO: 204156 - DNA, 25 bp, SARS Virus
taacactgaaaaacgatgaacccgt

SEQ ID NO: 204157 - DNA, 25 bp, SARS Virus
aacactgaaaaaagatgaacccgta

SEQ ID NO: 204158 - DNA, 25 bp, SARS Virus
acactgaaaaacaatgaacccgtaa

SEQ ID NO: 204159 - DNA, 25 bp, SARS Virus
cactgaaaaacgatgaacccgtaac

SEQ ID NO: 204160 - DNA, 25 bp, SARS Virus
actgaaaaacgaagaacccgtaact

SEQ ID NO: 204161 - DNA, 25 bp, SARS Virus
ctgaaaaacgataaacccgtaacta

SEQ ID NO: 204162 - DNA, 25 bp, SARS Virus
tgaaaaacgatgaacccgtaactat

SEQ ID NO: 204163 - DNA, 25 bp, SARS Virus
gaaaaacgatgaacccgtaactata

SEQ ID NO: 204164 - DNA, 25 bp, SARS Virus
aaaaacgatgaaaccgtaactatac

SEQ ID NO: 204165 - DNA, 25 bp, SARS Virus
aaaacgatgaacacgtaactatacg

SEQ ID NO: 204166 - DNA, 25 bp, SARS Virus
aaacgatgaaccagtaactatacgg

SEQ ID NO: 204167 - DNA, 25 bp, SARS Virus
aacgatgaacccataactatacgga

SEQ ID NO: 204168 - DNA, 25 bp, SARS Virus
acgatgaacccgaaactatacggaa

SEQ ID NO: 204169 - DNA, 25 bp, SARS Virus
cgatgaacccgtaactatacggaac

SEQ ID NO: 204170 - DNA, 25 bp, SARS Virus
gatgaacccgtaactatacggaacg

SEQ ID NO: 204171 - DNA, 25 bp, SARS Virus
atgaacccgtaaatatacggaacgt

SEQ ID NO: 204172 - DNA, 25 bp, SARS Virus
tgaacccgtaacaatacggaacgta

SEQ ID NO: 204173 - DNA, 25 bp, SARS Virus
gaacccgtaactatacggaacgtaa

SEQ ID NO: 204174 - DNA, 25 bp, SARS Virus
aacccgtaactaaacggaacgtaat

SEQ ID NO: 204175 - DNA, 25 bp, SARS Virus
acccgtaactatacggaacgtaatg

SEQ ID NO: 204176 - DNA, 25 bp, SARS Virus
cccgtaactataaggaacgtaatgt

SEQ ID NO: 204177 - DNA, 25 bp, SARS Virus
ccgtaactatacagaacgtaatgtc

SEQ ID NO: 204178 - DNA, 25 bp, SARS Virus
cgtaactatacgaaacgtaatgtca

SEQ ID NO: 204179 - DNA, 25 bp, SARS Virus
gtaactatacggaacgtaatgtcag

SEQ ID NO: 204180 - DNA, 25 bp, SARS Virus
taactatacggaacgtaatgtcagt

SEQ ID NO: 204181 - DNA, 25 bp, SARS Virus
aactatacggaaagtaatgtcagtt

SEQ ID NO: 204182 - DNA, 25 bp, SARS Virus
actatacggaacataatgtcagtta

SEQ ID NO: 204183 - DNA, 25 bp, SARS Virus
ctatacggaacgaaatgtcagttat

SEQ ID NO: 204184 - DNA, 25 bp, SARS Virus
tatacggaacgtaatgtcagttatg

SEQ ID NO: 204185 - DNA, 25 bp, SARS Virus
atacggaacgtaatgtcagttatgt

SEQ ID NO: 204186 - DNA, 25 bp, SARS Virus
tacggaacgtaaagtcagttatgta

SEQ ID NO: 204187 - DNA, 25 bp, SARS Virus
acggaacgtaatatcagttatgtac

SEQ ID NO: 204188 - DNA, 25 bp, SARS Virus
cggaacgtaatgacagttatgtacg

SEQ ID NO: 204189 - DNA, 25 bp, SARS Virus
ggaacgtaatgtaagttatgtacgc

SEQ ID NO: 204190 - DNA, 25 bp, SARS Virus
gaacgtaatgtcagttatgtacgcg

SEQ ID NO: 204191 - DNA, 25 bp, SARS Virus
aacgtaatgtcaattatgtacgcgg

SEQ ID NO: 204192 - DNA, 25 bp, SARS Virus
acgtaatgtcagatatgtacgcggt

SEQ ID NO: 204193 - DNA, 25 bp, SARS Virus
cgtaatgtcagtaatgtacgcggtt

SEQ ID NO: 204194 - DNA, 25 bp, SARS Virus
gtaatgtcagttatgtacgcggttc

SEQ ID NO: 204195 - DNA, 25 bp, SARS Virus
taatgtcagttaagtacgcggttct

SEQ ID NO: 204196 - DNA, 25 bp, SARS Virus
aatgtcagttatatacgcggttcta

SEQ ID NO: 204197 - DNA, 25 bp, SARS Virus
atgtcagttatgaacgcggttctag

SEQ ID NO: 204198 - DNA, 25 bp, SARS Virus
tgtcagttatgtacgcggttctaga

SEQ ID NO: 204199 - DNA, 25 bp, SARS Virus
gtcagttatgtaagcggttctagag

SEQ ID NO: 204200 - DNA, 25 bp, SARS Virus
tcagttatgtacacggttctagaga

SEQ ID NO: 204201 - DNA, 25 bp, SARS Virus
cagttatgtacgaggttctagagac

SEQ ID NO: 204202 - DNA, 25 bp, SARS Virus
agttatgtacgcagttctagagacc

SEQ ID NO: 204203 - DNA, 25 bp, SARS Virus
gttatgtacgcgattctagagaccc

SEQ ID NO: 204204 - DNA, 25 bp, SARS Virus
ttatgtacgcggatctagagacccg

SEQ ID NO: 204205 - DNA, 25 bp, SARS Virus
tatgtacgcggtactagagacccgc

SEQ ID NO: 204206 - DNA, 25 bp, SARS Virus
atgtacgcggttatagagacccgca

SEQ ID NO: 204207 - DNA, 25 bp, SARS Virus
tgtacgcggttcaagagacccgcag

SEQ ID NO: 204208 - DNA, 25 bp, SARS Virus
gtacgcggttctagagacccgcagt

SEQ ID NO: 204209 - DNA, 25 bp, SARS Virus
tacgcggttctaaagacccgcagta

SEQ ID NO: 204210 - DNA, 25 bp, SARS Virus
acgcggttctagagacccgcagtac

SEQ ID NO: 204211 - DNA, 25 bp, SARS Virus
cgcggttctagaaacccgcagtaca

SEQ ID NO: 204212 - DNA, 25 bp, SARS Virus
gcggttctagagacccgcagtacaa

SEQ ID NO: 204213 - DNA, 25 bp, SARS Virus
cggttctagagaaccgcagtacaaa

SEQ ID NO: 204214 - DNA, 25 bp, SARS Virus
ggttctagagacacgcagtacaaaa

SEQ ID NO: 204215 - DNA, 25 bp, SARS Virus
gttctagagaccagcagtacaaaag

SEQ ID NO: 204216 - DNA, 25 bp, SARS Virus
ttctagagacccacagtacaaaagt

SEQ ID NO: 204217 - DNA, 25 bp, SARS Virus
tctagagacccgaagtacaaaagtt

SEQ ID NO: 204218 - DNA, 25 bp, SARS Virus
ctagagacccgcagtacaaaagttg

SEQ ID NO: 204219 - DNA, 25 bp, SARS Virus
tagagacccgcaatacaaaagttgg

SEQ ID NO: 204220 - DNA, 25 bp, SARS Virus
agagacccgcagaacaaaagttgga

SEQ ID NO: 204221 - DNA, 25 bp, SARS Virus
gagacccgcagtacaaaagttggaa

SEQ ID NO: 204222 - DNA, 25 bp, SARS Virus
agacccgcagtaaaaaagttggaat

SEQ ID NO: 204223 - DNA, 25 bp, SARS Virus
gacccgcagtacaaaagttggaata

SEQ ID NO: 204224 - DNA, 25 bp, SARS Virus
acccgcagtacaaaagttggaataa

SEQ ID NO: 204225 - DNA, 25 bp, SARS Virus
cccgcagtacaaaagttggaataat

SEQ ID NO: 204226 - DNA, 25 bp, SARS Virus
ccgcagtacaaaagttggaataata

SEQ ID NO: 204227 - DNA, 25 bp, SARS Virus
cgcagtacaaaaattggaataatat

SEQ ID NO: 204228 - DNA, 25 bp, SARS Virus
gcagtacaaaagatggaataatatc

SEQ ID NO: 204229 - DNA, 25 bp, SARS Virus
cagtacaaaagtaggaataatatcc

SEQ ID NO: 204230 - DNA, 25 bp, SARS Virus
agtacaaaagttagaataatatcca

SEQ ID NO: 204231 - DNA, 25 bp, SARS Virus
gtacaaaagttgaaataatatccac

SEQ ID NO: 204232 - DNA, 25 bp, SARS Virus
tacaaaagttggaataatatccact

SEQ ID NO: 204233 - DNA, 25 bp, SARS Virus
acaaaagttggaataatatccactc

SEQ ID NO: 204234 - DNA, 25 bp, SARS Virus
caaaagttggaaaaatatccactcg

SEQ ID NO: 204235 - DNA, 25 bp, SARS Virus
aaaagttggaataatatccactcgt

SEQ ID NO: 204236 - DNA, 25 bp, SARS Virus
aaagttggaataatatccactcgta

SEQ ID NO: 204237 - DNA, 25 bp, SARS Virus
aagttggaataaaatccactcgtac

SEQ ID NO: 204238 - DNA, 25 bp, SARS Virus
agttggaataatatccactcgtact

SEQ ID NO: 204239 - DNA, 25 bp, SARS Virus
gttggaataataaccactcgtactt

SEQ ID NO: 204240 - DNA, 25 bp, SARS Virus
ttggaataatatacactcgtacttt

SEQ ID NO: 204241 - DNA, 25 bp, SARS Virus
tggaataatatcaactcgtacttta

SEQ ID NO: 204242 - DNA, 25 bp, SARS Virus
ggaataatatccactcgtactttaa

SEQ ID NO: 204243 - DNA, 25 bp, SARS Virus
gaataatatccaatcgtactttaac

SEQ ID NO: 204244 - DNA, 25 bp, SARS Virus
aataatatccacacgtactttaaca

SEQ ID NO: 204245 - DNA, 25 bp, SARS Virus
ataatatccactagtactttaacaa

SEQ ID NO: 204246 - DNA, 25 bp, SARS Virus
taatatccactcatactttaacaat

SEQ ID NO: 204247 - DNA, 25 bp, SARS Virus
aatatccactcgaactttaacaatg

SEQ ID NO: 204248 - DNA, 25 bp, SARS Virus
atatccactcgtactttaacaatgt

SEQ ID NO: 204249 - DNA, 25 bp, SARS Virus
tatccactcgtaatttaacaatgtt

SEQ ID NO: 204250 - DNA, 25 bp, SARS Virus
atccactcgtacattaacaatgttg

SEQ ID NO: 204251 - DNA, 25 bp, SARS Virus
tccactcgtactataacaatgttga

SEQ ID NO: 204252 - DNA, 25 bp, SARS Virus
ccactcgtacttaaacaatgttgac

SEQ ID NO: 204253 - DNA, 25 bp, SARS Virus
cactcgtactttaacaatgttgaca

SEQ ID NO: 204254 - DNA, 25 bp, SARS Virus
actcgtactttaacaatgttgacag

SEQ ID NO: 204255 - DNA, 25 bp, SARS Virus
ctcgtactttaaaaatgttgacagt

SEQ ID NO: 204256 - DNA, 25 bp, SARS Virus
tcgtactttaacaatgttgacagtg

SEQ ID NO: 204257 - DNA, 25 bp, SARS Virus
cgtactttaacaatgttgacagtgg

SEQ ID NO: 204258 - DNA, 25 bp, SARS Virus
gtactttaacaaagttgacagtgga

SEQ ID NO: 204259 - DNA, 25 bp, SARS Virus
tactttaacaatattgacagtggac

SEQ ID NO: 204260 - DNA, 25 bp, SARS Virus
actttaacaatgatgacagtggaca

SEQ ID NO: 204261 - DNA, 25 bp, SARS Virus
ctttaacaatgtagacagtggacag

SEQ ID NO: 204262 - DNA, 25 bp, SARS Virus
tttaacaatgttaacagtggacagt

SEQ ID NO: 204263 - DNA, 25 bp, SARS Virus
ttaacaatgttgacagtggacagtg

SEQ ID NO: 204264 - DNA, 25 bp, SARS Virus
taacaatgttgaaagtggacagtga

SEQ ID NO: 204265 - DNA, 25 bp, SARS Virus
aacaatgttgacagtggacagtgaa

SEQ ID NO: 204266 - DNA, 25 bp, SARS Virus
acaatgttgacaatggacagtgaag

SEQ ID NO: 204267 - DNA, 25 bp, SARS Virus
caatgttgacagaggacagtgaaga

SEQ ID NO: 204268 - DNA, 25 bp, SARS Virus
aatgttgacagtagacagtgaagat

SEQ ID NO: 204269 - DNA, 25 bp, SARS Virus
atgttgacagtgaacagtgaagatt

SEQ ID NO: 204270 - DNA, 25 bp, SARS Virus
tgttgacagtggacagtgaagattc

SEQ ID NO: 204271 - DNA, 25 bp, SARS Virus
gttgacagtggaaagtgaagattca

SEQ ID NO: 204272 - DNA, 25 bp, SARS Virus
ttgacagtggacagtgaagattcag

SEQ ID NO: 204273 - DNA, 25 bp, SARS Virus
tgacagtggacaatgaagattcagt

SEQ ID NO: 204274 - DNA, 25 bp, SARS Virus
gacagtggacagagaagattcagtc

SEQ ID NO: 204275 - DNA, 25 bp, SARS Virus
acagtggacagtaaagattcagtct

SEQ ID NO: 204276 - DNA, 25 bp, SARS Virus
cagtggacagtgaagattcagtctc

SEQ ID NO: 204277 - DNA, 25 bp, SARS Virus
agtggacagtgaagattcagtctca

SEQ ID NO: 204278 - DNA, 25 bp, SARS Virus
gtggacagtgaaaattcagtctcac

SEQ ID NO: 204279 - DNA, 25 bp, SARS Virus
tggacagtgaagattcagtctcact

SEQ ID NO: 204280 - DNA, 25 bp, SARS Virus
ggacagtgaagaatcagtctcacta

SEQ ID NO: 204281 - DNA, 25 bp, SARS Virus
gacagtgaagatacagtctcactac

SEQ ID NO: 204282 - DNA, 25 bp, SARS Virus
acagtgaagattaagtctcactaca

SEQ ID NO: 204283 - DNA, 25 bp, SARS Virus
cagtgaagattcagtctcactacac

SEQ ID NO: 204284 - DNA, 25 bp, SARS Virus
agtgaagattcaatctcactacact

SEQ ID NO: 204285 - DNA, 25 bp, SARS Virus
gtgaagattcagactcactacactt

SEQ ID NO: 204286 - DNA, 25 bp, SARS Virus
tgaagattcagtatcactacacttt

SEQ ID NO: 204287 - DNA, 25 bp, SARS Virus
gaagattcagtcacactacactttc

SEQ ID NO: 204288 - DNA, 25 bp, SARS Virus
aagattcagtctaactacactttca

SEQ ID NO: 204289 - DNA, 25 bp, SARS Virus
agattcagtctcactacactttcaa

SEQ ID NO: 204290 - DNA, 25 bp, SARS Virus
gattcagtctcaatacactttcaaa

SEQ ID NO: 204291 - DNA, 25 bp, SARS Virus
attcagtctcacaacactttcaaac

SEQ ID NO: 204292 - DNA, 25 bp, SARS Virus
ttcagtctcactacactttcaaact

SEQ ID NO: 204293 - DNA, 25 bp, SARS Virus
tcagtctcactaaactttcaaactc

SEQ ID NO: 204294 - DNA, 25 bp, SARS Virus
cagtctcactacactttcaaactct

SEQ ID NO: 204295 - DNA, 25 bp, SARS Virus
agtctcactacaatttcaaactctg

SEQ ID NO: 204296 - DNA, 25 bp, SARS Virus
gtctcactacacattcaaactctgt

SEQ ID NO: 204297 - DNA, 25 bp, SARS Virus
tctcactacactatcaaactctgta

SEQ ID NO: 204298 - DNA, 25 bp, SARS Virus
ctcactacacttacaaactctgtaa

SEQ ID NO: 204299 - DNA, 25 bp, SARS Virus
tcactacactttaaaactctgtaag

SEQ ID NO: 204300 - DNA, 25 bp, SARS Virus
cactacactttcaaactctgtaagt

SEQ ID NO: 204301 - DNA, 25 bp, SARS Virus
actacactttcaaactctgtaagtt

SEQ ID NO: 204302 - DNA, 25 bp, SARS Virus
ctacactttcaaactctgtaagtta

SEQ ID NO: 204303 - DNA, 25 bp, SARS Virus
tacactttcaaaatctgtaagttat

SEQ ID NO: 204304 - DNA, 25 bp, SARS Virus
acactttcaaacactgtaagttatt

SEQ ID NO: 204305 - DNA, 25 bp, SARS Virus
cactttcaaactatgtaagttattg

SEQ ID NO: 204306 - DNA, 25 bp, SARS Virus
actttcaaactcagtaagttattgt

SEQ ID NO: 204307 - DNA, 25 bp, SARS Virus
ctttcaaactctataagttattgta

SEQ ID NO: 204308 - DNA, 25 bp, SARS Virus
tttcaaactctgaaagttattgtag

SEQ ID NO: 204309 - DNA, 25 bp, SARS Virus
ttcaaactctgtaagttattgtagg

SEQ ID NO: 204310 - DNA, 25 bp, SARS Virus
tcaaactctgtaagttattgtagga

SEQ ID NO: 204311 - DNA, 25 bp, SARS Virus
caaactctgtaaattattgtaggaa

SEQ ID NO: 204312 - DNA, 25 bp, SARS Virus
aaactctgtaagatattgtaggaaa

SEQ ID NO: 204313 - DNA, 25 bp, SARS Virus
aactctgtaagtaattgtaggaaac

SEQ ID NO: 204314 - DNA, 25 bp, SARS Virus
actctgtaagttattgtaggaaaca

SEQ ID NO: 204315 - DNA, 25 bp, SARS Virus
ctctgtaagttaatgtaggaaacac

SEQ ID NO: 204316 - DNA, 25 bp, SARS Virus
tctgtaagttatagtaggaaacaca

SEQ ID NO: 204317 - DNA, 25 bp, SARS Virus
ctgtaagttattataggaaacacag

SEQ ID NO: 204318 - DNA, 25 bp, SARS Virus
tgtaagttattgaaggaaacacagt

SEQ ID NO: 204319 - DNA, 25 bp, SARS Virus
gtaagttattgtaggaaacacagtt

SEQ ID NO: 204320 - DNA, 25 bp, SARS Virus
taagttattgtaagaaacacagttg

SEQ ID NO: 204321 - DNA, 25 bp, SARS Virus
aagttattgtagaaaacacagttgt

SEQ ID NO: 204322 - DNA, 25 bp, SARS Virus
agttattgtaggaaacacagttgta

SEQ ID NO: 204323 - DNA, 25 bp, SARS Virus
gttattgtaggaaacacagttgtag

SEQ ID NO: 204324 - DNA, 25 bp, SARS Virus
ttattgtaggaaacacagttgtagc

SEQ ID NO: 204325 - DNA, 25 bp, SARS Virus
tattgtaggaaaaacagttgtagcc

SEQ ID NO: 204326 - DNA, 25 bp, SARS Virus
attgtaggaaacacagttgtagcca

SEQ ID NO: 204327 - DNA, 25 bp, SARS Virus
ttgtaggaaacaaagttgtagccat

SEQ ID NO: 204328 - DNA, 25 bp, SARS Virus
tgtaggaaacacagttgtagccata

SEQ ID NO: 204329 - DNA, 25 bp, SARS Virus
gtaggaaacacaattgtagccatag

SEQ ID NO: 204330 - DNA, 25 bp, SARS Virus
taggaaacacagatgtagccatagt

SEQ ID NO: 204331 - DNA, 25 bp, SARS Virus
aggaaacacagtagtagccatagtt

SEQ ID NO: 204332 - DNA, 25 bp, SARS Virus
ggaaacacagttatagccatagttg

SEQ ID NO: 204333 - DNA, 25 bp, SARS Virus
gaaacacagttgaagccatagttgt

SEQ ID NO: 204334 - DNA, 25 bp, SARS Virus
aaacacagttgtagccatagttgtt

SEQ ID NO: 204335 - DNA, 25 bp, SARS Virus
aacacagttgtaaccatagttgttg

SEQ ID NO: 204336 - DNA, 25 bp, SARS Virus
acacagttgtagacatagttgttgt

SEQ ID NO: 204337 - DNA, 25 bp, SARS Virus
cacagttgtagcaatagttgttgtg

SEQ ID NO: 204338 - DNA, 25 bp, SARS Virus
acagttgtagccatagttgttgtgg

SEQ ID NO: 204339 - DNA, 25 bp, SARS Virus
cagttgtagccaaagttgttgtgga

SEQ ID NO: 204340 - DNA, 25 bp, SARS Virus
agttgtagccatagttgttgtggaa

SEQ ID NO: 204341 - DNA, 25 bp, SARS Virus
gttgtagccataattgttgtggaac

SEQ ID NO: 204342 - DNA, 25 bp, SARS Virus
ttgtagccatagatgttgtggaaca

SEQ ID NO: 204343 - DNA, 25 bp, SARS Virus
tgtagccatagtagttgtggaacag

SEQ ID NO: 204344 - DNA, 25 bp, SARS Virus
gtagccatagttattgtggaacagc

SEQ ID NO: 204345 - DNA, 25 bp, SARS Virus
tagccatagttgatgtggaacagcc

SEQ ID NO: 204346 - DNA, 25 bp, SARS Virus
agccatagttgtagtggaacagccc

SEQ ID NO: 204347 - DNA, 25 bp, SARS Virus
gccatagttgttatggaacagcccg

SEQ ID NO: 204348 - DNA, 25 bp, SARS Virus
ccatagttgttgaggaacagcccgt

SEQ ID NO: 204349 - DNA, 25 bp, SARS Virus
catagttgttgtagaacagcccgtc

SEQ ID NO: 204350 - DNA, 25 bp, SARS Virus
atagttgttgtgaaacagcccgtcg

SEQ ID NO: 204351 - DNA, 25 bp, SARS Virus
tagttgttgtggaacagcccgtcga

SEQ ID NO: 204352 - DNA, 25 bp, SARS Virus
agttgttgtggaacagcccgtcgac

SEQ ID NO: 204353 - DNA, 25 bp, SARS Virus
gttgttgtggaaaagcccgtcgact

SEQ ID NO: 204354 - DNA, 25 bp, SARS Virus
ttgttgtggaacagcccgtcgactg

SEQ ID NO: 204355 - DNA, 25 bp, SARS Virus
tgttgtggaacaacccgtcgactgt

SEQ ID NO: 204356 - DNA, 25 bp, SARS Virus
gttgtggaacagaccgtcgactgtg

SEQ ID NO: 204357 - DNA, 25 bp, SARS Virus
ttgtggaacagcacgtcgactgtgc

SEQ ID NO: 204358 - DNA, 25 bp, SARS Virus
tgtggaacagccagtcgactgtgct

SEQ ID NO: 204359 - DNA, 25 bp, SARS Virus
gtggaacagcccatcgactgtgctt

SEQ ID NO: 204360 - DNA, 25 bp, SARS Virus
tggaacagcccgacgactgtgctta

SEQ ID NO: 204361 - DNA, 25 bp, SARS Virus
ggaacagcccgtagactgtgcttac

SEQ ID NO: 204362 - DNA, 25 bp, SARS Virus
gaacagcccgtcaactgtgcttaca

SEQ ID NO: 204363 - DNA, 25 bp, SARS Virus
aacagcccgtcgactgtgcttacat

SEQ ID NO: 204364 - DNA, 25 bp, SARS Virus
acagcccgtcgaatgtgcttacatc

SEQ ID NO: 204365 - DNA, 25 bp, SARS Virus
cagcccgtcgacagtgcttacatct

SEQ ID NO: 204366 - DNA, 25 bp, SARS Virus
agcccgtcgactatgcttacatctt

SEQ ID NO: 204367 - DNA, 25 bp, SARS Virus
gcccgtcgactgagcttacatcttt

SEQ ID NO: 204368 - DNA, 25 bp, SARS Virus
cccgtcgactgtacttacatctttc

SEQ ID NO: 204369 - DNA, 25 bp, SARS Virus
ccgtcgactgtgattacatctttcc

SEQ ID NO: 204370 - DNA, 25 bp, SARS Virus
cgtcgactgtgcatacatctttcct

SEQ ID NO: 204371 - DNA, 25 bp, SARS Virus
gtcgactgtgctaacatctttcctg

SEQ ID NO: 204372 - DNA, 25 bp, SARS Virus
tcgactgtgcttacatctttcctgt

SEQ ID NO: 204373 - DNA, 25 bp, SARS Virus
cgactgtgcttaaatctttcctgtg

SEQ ID NO: 204374 - DNA, 25 bp, SARS Virus
gactgtgcttacatctttcctgtgg

SEQ ID NO: 204375 - DNA, 25 bp, SARS Virus
actgtgcttacaactttcctgtggt

SEQ ID NO: 204376 - DNA, 25 bp, SARS Virus
ctgtgcttacatatttcctgtggta

SEQ ID NO: 204377 - DNA, 25 bp, SARS Virus
tgtgcttacatcattcctgtggtag

SEQ ID NO: 204378 - DNA, 25 bp, SARS Virus
gtgcttacatctatcctgtggtaga

SEQ ID NO: 204379 - DNA, 25 bp, SARS Virus
tgcttacatcttacctgtggtagat

SEQ ID NO: 204380 - DNA, 25 bp, SARS Virus
gcttacatctttactgtggtagatt

SEQ ID NO: 204381 - DNA, 25 bp, SARS Virus
cttacatctttcatgtggtagattt

SEQ ID NO: 204382 - DNA, 25 bp, SARS Virus
ttacatctttccagtggtagatttc

SEQ ID NO: 204383 - DNA, 25 bp, SARS Virus
tacatctttcctatggtagatttcg

SEQ ID NO: 204384 - DNA, 25 bp, SARS Virus
acatctttcctgaggtagatttcga

SEQ ID NO: 204385 - DNA, 25 bp, SARS Virus
catctttcctgtagtagatttcgat

SEQ ID NO: 204386 - DNA, 25 bp, SARS Virus
atctttcctgtgatagatttcgatg

SEQ ID NO: 204387 - DNA, 25 bp, SARS Virus
tctttcctgtggaagatttcgatgt

SEQ ID NO: 204388 - DNA, 25 bp, SARS Virus
ctttcctgtggtagatttcgatgtg

SEQ ID NO: 204389 - DNA, 25 bp, SARS Virus
tttcctgtggtaaatttcgatgtgg

SEQ ID NO: 204390 - DNA, 25 bp, SARS Virus
ttcctgtggtagatttcgatgtggg

SEQ ID NO: 204391 - DNA, 25 bp, SARS Virus
tcctgtggtagaattcgatgtggga

SEQ ID NO: 204392 - DNA, 25 bp, SARS Virus
cctgtggtagatatcgatgtgggaa

SEQ ID NO: 204393 - DNA, 25 bp, SARS Virus
ctgtggtagattacgatgtgggaaa

SEQ ID NO: 204394 - DNA, 25 bp, SARS Virus
tgtggtagatttagatgtgggaaac

SEQ ID NO: 204395 - DNA, 25 bp, SARS Virus
gtggtagatttcaatgtgggaaacg

SEQ ID NO: 204396 - DNA, 25 bp, SARS Virus
tggtagatttcgatgtgggaaacga

SEQ ID NO: 204397 - DNA, 25 bp, SARS Virus
ggtagatttcgaagtgggaaacgat

SEQ ID NO: 204398 - DNA, 25 bp, SARS Virus
gtagatttcgatatgggaaacgatt

SEQ ID NO: 204399 - DNA, 25 bp, SARS Virus
tagatttcgatgagggaaacgattg

SEQ ID NO: 204400 - DNA, 25 bp, SARS Virus
agatttcgatgtaggaaacgattga

SEQ ID NO: 204401 - DNA, 25 bp, SARS Virus
gatttcgatgtgagaaacgattgag

SEQ ID NO: 204402 - DNA, 25 bp, SARS Virus
atttcgatgtggaaaacgattgagc

SEQ ID NO: 204403 - DNA, 25 bp, SARS Virus
tttcgatgtgggaaacgattgagcg

SEQ ID NO: 204404 - DNA, 25 bp, SARS Virus
ttcgatgtgggaaacgattgagcga

SEQ ID NO: 204405 - DNA, 25 bp, SARS Virus
tcgatgtgggaaacgattgagcgac

SEQ ID NO: 204406 - DNA, 25 bp, SARS Virus
cgatgtgggaaaagattgagcgaca

SEQ ID NO: 204407 - DNA, 25 bp, SARS Virus
gatgtgggaaacaattgagcgacac

SEQ ID NO: 204408 - DNA, 25 bp, SARS Virus
atgtgggaaacgattgagcgacact

SEQ ID NO: 204409 - DNA, 25 bp, SARS Virus
tgtgggaaacgaatgagcgacactc

SEQ ID NO: 204410 - DNA, 25 bp, SARS Virus
gtgggaaacgatagagcgacactcg

SEQ ID NO: 204411 - DNA, 25 bp, SARS Virus
tgggaaacgattaagcgacactcga

SEQ ID NO: 204412 - DNA, 25 bp, SARS Virus
gggaaacgattgagcgacactcgac

SEQ ID NO: 204413 - DNA, 25 bp, SARS Virus
ggaaacgattgaacgacactcgaca

SEQ ID NO: 204414 - DNA, 25 bp, SARS Virus
gaaacgattgagagacactcgacat

SEQ ID NO: 204415 - DNA, 25 bp, SARS Virus
aaacgattgagcaacactcgacatc

SEQ ID NO: 204416 - DNA, 25 bp, SARS Virus
aacgattgagcgacactcgacatcg

SEQ ID NO: 204417 - DNA, 25 bp, SARS Virus
acgattgagcgaaactcgacatcgt

SEQ ID NO: 204418 - DNA, 25 bp, SARS Virus
cgattgagcgacactcgacatcgtt

SEQ ID NO: 204419 - DNA, 25 bp, SARS Virus
gattgagcgacaatcgacatcgttg

SEQ ID NO: 204420 - DNA, 25 bp, SARS Virus
attgagcgacacacgacatcgttgt

SEQ ID NO: 204421 - DNA, 25 bp, SARS Virus
ttgagcgacactagacatcgttgtt

SEQ ID NO: 204422 - DNA, 25 bp, SARS Virus
tgagcgacactcaacatcgttgttc

SEQ ID NO: 204423 - DNA, 25 bp, SARS Virus
gagcgacactcgacatcgttgttca

SEQ ID NO: 204424 - DNA, 25 bp, SARS Virus
agcgacactcgaaatcgttgttcac

SEQ ID NO: 204425 - DNA, 25 bp, SARS Virus
gcgacactcgacatcgttgttcacg

SEQ ID NO: 204426 - DNA, 25 bp, SARS Virus
cgacactcgacaacgttgttcacgg

SEQ ID NO: 204427 - DNA, 25 bp, SARS Virus
gacactcgacatagttgttcacgga

SEQ ID NO: 204428 - DNA, 25 bp, SARS Virus
acactcgacatcattgttcacggaa

SEQ ID NO: 204429 - DNA, 25 bp, SARS Virus
cactcgacatcgatgttcacggaat

SEQ ID NO: 204430 - DNA, 25 bp, SARS Virus
actcgacatcgtagttcacggaatt

SEQ ID NO: 204431 - DNA, 25 bp, SARS Virus
ctcgacatcgttattcacggaattc

SEQ ID NO: 204432 - DNA, 25 bp, SARS Virus
tcgacatcgttgatcacggaattca

SEQ ID NO: 204433 - DNA, 25 bp, SARS Virus
cgacatcgttgtacacggaattcaa

SEQ ID NO: 204434 - DNA, 25 bp, SARS Virus
gacatcgttgttaacggaattcaaa

SEQ ID NO: 204435 - DNA, 25 bp, SARS Virus
acatcgttgttcacggaattcaaaa

SEQ ID NO: 204436 - DNA, 25 bp, SARS Virus
catcgttgttcaaggaattcaaaaa

SEQ ID NO: 204437 - DNA, 25 bp, SARS Virus
atcgttgttcacagaattcaaaaag

SEQ ID NO: 204438 - DNA, 25 bp, SARS Virus
tcgttgttcacgaaattcaaaaagg

SEQ ID NO: 204439 - DNA, 25 bp, SARS Virus
cgttgttcacggaattcaaaaaggt

SEQ ID NO: 204440 - DNA, 25 bp, SARS Virus
gttgttcacggaattcaaaaaggta

SEQ ID NO: 204441 - DNA, 25 bp, SARS Virus
ttgttcacggaaatcaaaaaggtat

SEQ ID NO: 204442 - DNA, 25 bp, SARS Virus
tgttcacggaatacaaaaaggtatc

SEQ ID NO: 204443 - DNA, 25 bp, SARS Virus
gttcacggaattaaaaaaggtatcc

SEQ ID NO: 204444 - DNA, 25 bp, SARS Virus
ttcacggaattcaaaaaggtatcct

SEQ ID NO: 204445 - DNA, 25 bp, SARS Virus
tcacggaattcaaaaaggtatcctt

SEQ ID NO: 204446 - DNA, 25 bp, SARS Virus
cacggaattcaaaaaggtatccttg

SEQ ID NO: 204447 - DNA, 25 bp, SARS Virus
acggaattcaaaaaggtatccttgt

SEQ ID NO: 204448 - DNA, 25 bp, SARS Virus
cggaattcaaaaaggtatccttgtg

SEQ ID NO: 204449 - DNA, 25 bp, SARS Virus
ggaattcaaaaaagtatccttgtga

SEQ ID NO: 204450 - DNA, 25 bp, SARS Virus
gaattcaaaaagatatccttgtgat

SEQ ID NO: 204451 - DNA, 25 bp, SARS Virus
aattcaaaaaggaatccttgtgatt

SEQ ID NO: 204452 - DNA, 25 bp, SARS Virus
attcaaaaaggtatccttgtgattt

SEQ ID NO: 204453 - DNA, 25 bp, SARS Virus
ttcaaaaaggtaaccttgtgatttt

SEQ ID NO: 204454 - DNA, 25 bp, SARS Virus
tcaaaaaggtatacttgtgattttc

SEQ ID NO: 204455 - DNA, 25 bp, SARS Virus
caaaaaggtatcattgtgattttca

SEQ ID NO: 204456 - DNA, 25 bp, SARS Virus
aaaaaggtatccatgtgattttcaa

SEQ ID NO: 204457 - DNA, 25 bp, SARS Virus
aaaaggtatcctagtgattttcaac

SEQ ID NO: 204458 - DNA, 25 bp, SARS Virus
aaaggtatccttatgattttcaacg

SEQ ID NO: 204459 - DNA, 25 bp, SARS Virus
aaggtatccttgagattttcaacga

SEQ ID NO: 204460 - DNA, 25 bp, SARS Virus
aggtatccttgtaattttcaacgac

SEQ ID NO: 204461 - DNA, 25 bp, SARS Virus
ggtatccttgtgattttcaacgact

SEQ ID NO: 204462 - DNA, 25 bp, SARS Virus
gtatccttgtgaatttcaacgactt

SEQ ID NO: 204463 - DNA, 25 bp, SARS Virus
tatccttgtgatattcaacgacttt

SEQ ID NO: 204464 - DNA, 25 bp, SARS Virus
atccttgtgattatcaacgactttt

SEQ ID NO: 204465 - DNA, 25 bp, SARS Virus
tccttgtgatttacaacgacttttc

SEQ ID NO: 204466 - DNA, 25 bp, SARS Virus
ccttgtgattttaaacgacttttcc

SEQ ID NO: 204467 - DNA, 25 bp, SARS Virus
cttgtgattttcaacgacttttcca

SEQ ID NO: 204468 - DNA, 25 bp, SARS Virus
ttgtgattttcaacgacttttccac

SEQ ID NO: 204469 - DNA, 25 bp, SARS Virus
tgtgattttcaaagacttttccaca

SEQ ID NO: 204470 - DNA, 25 bp, SARS Virus
gtgattttcaacaacttttccacag

SEQ ID NO: 204471 - DNA, 25 bp, SARS Virus
tgattttcaacgacttttccacagc

SEQ ID NO: 204472 - DNA, 25 bp, SARS Virus
gattttcaacgaattttccacagct

SEQ ID NO: 204473 - DNA, 25 bp, SARS Virus
attttcaacgacatttccacagctg

SEQ ID NO: 204474 - DNA, 25 bp, SARS Virus
ttttcaacgactattccacagctgt

SEQ ID NO: 204475 - DNA, 25 bp, SARS Virus
tttcaacgacttatccacagctgta

SEQ ID NO: 204476 - DNA, 25 bp, SARS Virus
ttcaacgactttaccacagctgtat

SEQ ID NO: 204477 - DNA, 25 bp, SARS Virus
tcaacgacttttacacagctgtatt

SEQ ID NO: 204478 - DNA, 25 bp, SARS Virus
caacgacttttcaacagctgtattc

SEQ ID NO: 204479 - DNA, 25 bp, SARS Virus
aacgacttttccacagctgtattcg

SEQ ID NO: 204480 - DNA, 25 bp, SARS Virus
acgacttttccaaagctgtattcgt

SEQ ID NO: 204481 - DNA, 25 bp, SARS Virus
cgacttttccacagctgtattcgta

SEQ ID NO: 204482 - DNA, 25 bp, SARS Virus
gacttttccacaactgtattcgtag

SEQ ID NO: 204483 - DNA, 25 bp, SARS Virus
acttttccacagatgtattcgtagt

SEQ ID NO: 204484 - DNA, 25 bp, SARS Virus
cttttccacagcagtattcgtagtt

SEQ ID NO: 204485 - DNA, 25 bp, SARS Virus
ttttccacagctatattcgtagttt

SEQ ID NO: 204486 - DNA, 25 bp, SARS Virus
tttccacagctgaattcgtagtttg

SEQ ID NO: 204487 - DNA, 25 bp, SARS Virus
ttccacagctgtattcgtagtttgt

SEQ ID NO: 204488 - DNA, 25 bp, SARS Virus
tccacagctgtaatcgtagtttgta

SEQ ID NO: 204489 - DNA, 25 bp, SARS Virus
ccacagctgtatacgtagtttgtag

SEQ ID NO: 204490 - DNA, 25 bp, SARS Virus
cacagctgtattagtagtttgtaga

SEQ ID NO: 204491 - DNA, 25 bp, SARS Virus
acagctgtattcatagtttgtagaa

SEQ ID NO: 204492 - DNA, 25 bp, SARS Virus
cagctgtattcgaagtttgtagaat

SEQ ID NO: 204493 - DNA, 25 bp, SARS Virus
agctgtattcgtagtttgtagaatt

SEQ ID NO: 204494 - DNA, 25 bp, SARS Virus
gctgtattcgtaatttgtagaattg

SEQ ID NO: 204495 - DNA, 25 bp, SARS Virus
ctgtattcgtagattgtagaattgc

SEQ ID NO: 204496 - DNA, 25 bp, SARS Virus
tgtattcgtagtatgtagaattgcc

SEQ ID NO: 204497 - DNA, 25 bp, SARS Virus
gtattcgtagttagtagaattgcct

SEQ ID NO: 204498 - DNA, 25 bp, SARS Virus
tattcgtagtttatagaattgcctt

SEQ ID NO: 204499 - DNA, 25 bp, SARS Virus
attcgtagtttgaagaattgccttt

SEQ ID NO: 204500 - DNA, 25 bp, SARS Virus
ttcgtagtttgtagaattgcctttg

SEQ ID NO: 204501 - DNA, 25 bp, SARS Virus
tcgtagtttgtaaaattgcctttga

SEQ ID NO: 204502 - DNA, 25 bp, SARS Virus
cgtagtttgtagaattgcctttgaa

SEQ ID NO: 204503 - DNA, 25 bp, SARS Virus
gtagtttgtagaattgcctttgaag

SEQ ID NO: 204504 - DNA, 25 bp, SARS Virus
tagtttgtagaaatgcctttgaagt

SEQ ID NO: 204505 - DNA, 25 bp, SARS Virus
aatactgtaactcttggacagatca

SEQ ID NO: 204506 - DNA, 25 bp, SARS Virus
atactgtaactgctggacagatcaa

SEQ ID NO: 204507 - DNA, 25 bp, SARS Virus
tactgtaactgtcggacagatcaac

SEQ ID NO: 204508 - DNA, 25 bp, SARS Virus
actgtaactgttcgacagatcaaca

SEQ ID NO: 204509 - DNA, 25 bp, SARS Virus
ctgtaactgttgcacagatcaacat

SEQ ID NO: 204510 - DNA, 25 bp, SARS Virus
tgtaactgttggccagatcaacatc

SEQ ID NO: 204511 - DNA, 25 bp, SARS Virus
gtaactgttggacagatcaacatcg

SEQ ID NO: 204512 - DNA, 25 bp, SARS Virus
taactgttggaccgatcaacatcgt

SEQ ID NO: 204513 - DNA, 25 bp, SARS Virus
aactgttggacacatcaacatcgtg

SEQ ID NO: 204514 - DNA, 25 bp, SARS Virus
actgttggacagctcaacatcgtgt

SEQ ID NO: 204515 - DNA, 25 bp, SARS Virus
ctgttggacagaccaacatcgtgtt

SEQ ID NO: 204516 - DNA, 25 bp, SARS Virus
tgttggacagatcaacatcgtgttc

SEQ ID NO: 204517 - DNA, 25 bp, SARS Virus
gttggacagatccacatcgtgttca

SEQ ID NO: 204518 - DNA, 25 bp, SARS Virus
ttggacagatcaccatcgtgttcaa

SEQ ID NO: 204519 - DNA, 25 bp, SARS Virus
tggacagatcaacatcgtgttcaat

SEQ ID NO: 204520 - DNA, 25 bp, SARS Virus
ggacagatcaacctcgtgttcaatc

SEQ ID NO: 204521 - DNA, 25 bp, SARS Virus
gacagatcaacaccgtgttcaatca

SEQ ID NO: 204522 - DNA, 25 bp, SARS Virus
acagatcaacatcgtgttcaatcag

SEQ ID NO: 204523 - DNA, 25 bp, SARS Virus
cagatcaacatcctgttcaatcaga

SEQ ID NO: 204524 - DNA, 25 bp, SARS Virus
agatcaacatcgcgttcaatcagat

SEQ ID NO: 204525 - DNA, 25 bp, SARS Virus
gatcaacatcgtcttcaatcagatt

SEQ ID NO: 204526 - DNA, 25 bp, SARS Virus
atcaacatcgtgctcaatcagattt

SEQ ID NO: 204527 - DNA, 25 bp, SARS Virus
tcaacatcgtgtccaatcagatttt

SEQ ID NO: 204528 - DNA, 25 bp, SARS Virus
caacatcgtgttcaatcagattttc

SEQ ID NO: 204529 - DNA, 25 bp, SARS Virus
aacatcgtgttccatcagattttcc

SEQ ID NO: 204530 - DNA, 25 bp, SARS Virus
acatcgtgttcactcagattttcca

SEQ ID NO: 204531 - DNA, 25 bp, SARS Virus
catcgtgttcaaccagattttccat

SEQ ID NO: 204532 - DNA, 25 bp, SARS Virus
atcgtgttcaatcagattttccata

SEQ ID NO: 204533 - DNA, 25 bp, SARS Virus
tcgtgttcaatccgattttccatac

SEQ ID NO: 204534 - DNA, 25 bp, SARS Virus
cgtgttcaatcacattttccataca

SEQ ID NO: 204535 - DNA, 25 bp, SARS Virus
gtgttcaatcagcttttccatacaa

SEQ ID NO: 204536 - DNA, 25 bp, SARS Virus
tgttcaatcagactttccatacaac

SEQ ID NO: 204537 - DNA, 25 bp, SARS Virus
gttcaatcagatcttccatacaaca

SEQ ID NO: 204538 - DNA, 25 bp, SARS Virus
ttcaatcagattctccatacaacaa

SEQ ID NO: 204539 - DNA, 25 bp, SARS Virus
tcaatcagatttcccatacaacaag

SEQ ID NO: 204540 - DNA, 25 bp, SARS Virus
caatcagattttccatacaacaaga

SEQ ID NO: 204541 - DNA, 25 bp, SARS Virus
aatcagattttccatacaacaagaa

SEQ ID NO: 204542 - DNA, 25 bp, SARS Virus
atcagattttccctacaacaagaag

SEQ ID NO: 204543 - DNA, 25 bp, SARS Virus
tcagattttccacacaacaagaaga

SEQ ID NO: 204544 - DNA, 25 bp, SARS Virus
cagattttccatccaacaagaagaa

SEQ ID NO: 204545 - DNA, 25 bp, SARS Virus
agattttccatacaacaagaagaac

SEQ ID NO: 204546 - DNA, 25 bp, SARS Virus
gattttccataccacaagaagaacc

SEQ ID NO: 204547 - DNA, 25 bp, SARS Virus
attttccatacaccaagaagaaccg

SEQ ID NO: 204548 - DNA, 25 bp, SARS Virus
ttttccatacaacaagaagaaccgt

SEQ ID NO: 204549 - DNA, 25 bp, SARS Virus
tttccatacaaccagaagaaccgtc

SEQ ID NO: 204550 - DNA, 25 bp, SARS Virus
ttccatacaacacgaagaaccgtcg

SEQ ID NO: 204551 - DNA, 25 bp, SARS Virus
tccatacaacaacaagaaccgtcgt

SEQ ID NO: 204552 - DNA, 25 bp, SARS Virus
ccatacaacaagcagaaccgtcgtg

SEQ ID NO: 204553 - DNA, 25 bp, SARS Virus
catacaacaagacgaaccgtcgtga

SEQ ID NO: 204554 - DNA, 25 bp, SARS Virus
atacaacaagaacaaccgtcgtgat

SEQ ID NO: 204555 - DNA, 25 bp, SARS Virus
tacaacaagaagcaccgtcgtgatg

SEQ ID NO: 204556 - DNA, 25 bp, SARS Virus
acaacaagaagacccgtcgtgatgc

SEQ ID NO: 204557 - DNA, 25 bp, SARS Virus
caacaagaagaaccgtcgtgatgct

SEQ ID NO: 204558 - DNA, 25 bp, SARS Virus
aacaagaagaaccgtcgtgatgctt

SEQ ID NO: 204559 - DNA, 25 bp, SARS Virus
acaagaagaaccctcgtgatgctta

SEQ ID NO: 204560 - DNA, 25 bp, SARS Virus
caagaagaaccgccgtgatgcttaa

SEQ ID NO: 204561 - DNA, 25 bp, SARS Virus
aagaagaaccgtcgtgatgcttaaa

SEQ ID NO: 204562 - DNA, 25 bp, SARS Virus
agaagaaccgtcctgatgcttaaac

SEQ ID NO: 204563 - DNA, 25 bp, SARS Virus
gaagaaccgtcgcgatgcttaaaca

SEQ ID NO: 204564 - DNA, 25 bp, SARS Virus
aagaaccgtcgtcatgcttaaacaa

SEQ ID NO: 204565 - DNA, 25 bp, SARS Virus
agaaccgtcgtgctgcttaaacaaa

SEQ ID NO: 204566 - DNA, 25 bp, SARS Virus
gaaccgtcgtgacgcttaaacaaat

SEQ ID NO: 204567 - DNA, 25 bp, SARS Virus
aaccgtcgtgatccttaaacaaatg

SEQ ID NO: 204568 - DNA, 25 bp, SARS Virus
accgtcgtgatgcttaaacaaatgc

SEQ ID NO: 204569 - DNA, 25 bp, SARS Virus
ccgtcgtgatgcctaaacaaatgcg

SEQ ID NO: 204570 - DNA, 25 bp, SARS Virus
cgtcgtgatgctcaaacaaatgcgt

SEQ ID NO: 204571 - DNA, 25 bp, SARS Virus
gtcgtgatgcttcaacaaatgcgtc

SEQ ID NO: 204572 - DNA, 25 bp, SARS Virus
tcgtgatgcttacacaaatgcgtcg

SEQ ID NO: 204573 - DNA, 25 bp, SARS Virus
cgtgatgcttaaccaaatgcgtcga

SEQ ID NO: 204574 - DNA, 25 bp, SARS Virus
gtgatgcttaaacaaatgcgtcgac

SEQ ID NO: 204575 - DNA, 25 bp, SARS Virus
tgatgcttaaaccaatgcgtcgaca

SEQ ID NO: 204576 - DNA, 25 bp, SARS Virus
gatgcttaaacacatgcgtcgacaa

SEQ ID NO: 204577 - DNA, 25 bp, SARS Virus
atgcttaaacaactgcgtcgacaag

SEQ ID NO: 204578 - DNA, 25 bp, SARS Virus
tgcttaaacaaacgcgtcgacaagt

SEQ ID NO: 204579 - DNA, 25 bp, SARS Virus
gcttaaacaaatccgtcgacaagtc

SEQ ID NO: 204580 - DNA, 25 bp, SARS Virus
cttaaacaaatgcgtcgacaagtct

SEQ ID NO: 204581 - DNA, 25 bp, SARS Virus
ttaaacaaatgcctcgacaagtcta

SEQ ID NO: 204582 - DNA, 25 bp, SARS Virus
taaacaaatgcgccgacaagtctat

SEQ ID NO: 204583 - DNA, 25 bp, SARS Virus
aaacaaatgcgtcgacaagtctatt

SEQ ID NO: 204584 - DNA, 25 bp, SARS Virus
aacaaatgcgtccacaagtctattt

SEQ ID NO: 204585 - DNA, 25 bp, SARS Virus
acaaatgcgtcgccaagtctatttc

SEQ ID NO: 204586 - DNA, 25 bp, SARS Virus
caaatgcgtcgacaagtctatttct

SEQ ID NO: 204587 - DNA, 25 bp, SARS Virus
aaatgcgtcgaccagtctatttctg

SEQ ID NO: 204588 - DNA, 25 bp, SARS Virus
aatgcgtcgacacgtctatttctgt

SEQ ID NO: 204589 - DNA, 25 bp, SARS Virus
atgcgtcgacaactctatttctgta

SEQ ID NO: 204590 - DNA, 25 bp, SARS Virus
tgcgtcgacaagcctatttctgtac

SEQ ID NO: 204591 - DNA, 25 bp, SARS Virus
gcgtcgacaagtctatttctgtaca

SEQ ID NO: 204592 - DNA, 25 bp, SARS Virus
cgtcgacaagtccatttctgtacat

SEQ ID NO: 204593 - DNA, 25 bp, SARS Virus
gtcgacaagtctctttctgtacatc

SEQ ID NO: 204594 - DNA, 25 bp, SARS Virus
tcgacaagtctacttctgtacatca

SEQ ID NO: 204595 - DNA, 25 bp, SARS Virus
cgacaagtctatctctgtacatcag

SEQ ID NO: 204596 - DNA, 25 bp, SARS Virus
gacaagtctattcctgtacatcaga

SEQ ID NO: 204597 - DNA, 25 bp, SARS Virus
acaagtctatttctgtacatcagaa

SEQ ID NO: 204598 - DNA, 25 bp, SARS Virus
caagtctatttccgtacatcagaaa

SEQ ID NO: 204599 - DNA, 25 bp, SARS Virus
aagtctatttctctacatcagaaaa

SEQ ID NO: 204600 - DNA, 25 bp, SARS Virus
agtctatttctgcacatcagaaaat

SEQ ID NO: 204601 - DNA, 25 bp, SARS Virus
gtctatttctgtccatcagaaaatg

SEQ ID NO: 204602 - DNA, 25 bp, SARS Virus
tctatttctgtacatcagaaaatgt

SEQ ID NO: 204603 - DNA, 25 bp, SARS Virus
ctatttctgtacctcagaaaatgta

SEQ ID NO: 204604 - DNA, 25 bp, SARS Virus
tatttctgtacaccagaaaatgtaa

SEQ ID NO: 204605 - DNA, 25 bp, SARS Virus
atttctgtacatcagaaaatgtaag

SEQ ID NO: 204606 - DNA, 25 bp, SARS Virus
tttctgtacatccgaaaatgtaagg

SEQ ID NO: 204607 - DNA, 25 bp, SARS Virus
ttctgtacatcacaaaatgtaaggt

SEQ ID NO: 204608 - DNA, 25 bp, SARS Virus
tctgtacatcagcaaatgtaaggtc

SEQ ID NO: 204609 - DNA, 25 bp, SARS Virus
ctgtacatcagacaatgtaaggtct

SEQ ID NO: 204610 - DNA, 25 bp, SARS Virus
tgtacatcagaacatgtaaggtcta

SEQ ID NO: 204611 - DNA, 25 bp, SARS Virus
gtacatcagaaactgtaaggtctac

SEQ ID NO: 204612 - DNA, 25 bp, SARS Virus
tacatcagaaaacgtaaggtctact

SEQ ID NO: 204613 - DNA, 25 bp, SARS Virus
acatcagaaaatctaaggtctactc

SEQ ID NO: 204614 - DNA, 25 bp, SARS Virus
catcagaaaatgcaaggtctactca

SEQ ID NO: 204615 - DNA, 25 bp, SARS Virus
atcagaaaatgtcaggtctactcac

SEQ ID NO: 204616 - DNA, 25 bp, SARS Virus
tcagaaaatgtacggtctactcact

SEQ ID NO: 204617 - DNA, 25 bp, SARS Virus
cagaaaatgtaacgtctactcactt

SEQ ID NO: 204618 - DNA, 25 bp, SARS Virus
agaaaatgtaagctctactcacttt

SEQ ID NO: 204619 - DNA, 25 bp, SARS Virus
gaaaatgtaaggcctactcactttg

SEQ ID NO: 204620 - DNA, 25 bp, SARS Virus
aaaatgtaaggtctactcactttgt

SEQ ID NO: 204621 - DNA, 25 bp, SARS Virus
aaatgtaaggtccactcactttgta

SEQ ID NO: 204622 - DNA, 25 bp, SARS Virus
aatgtaaggtctcctcactttgtaa

SEQ ID NO: 204623 - DNA, 25 bp, SARS Virus
atgtaaggtctactcactttgtaac

SEQ ID NO: 204624 - DNA, 25 bp, SARS Virus
tgtaaggtctacccactttgtaaca

SEQ ID NO: 204625 - DNA, 25 bp, SARS Virus
gtaaggtctactcactttgtaacac

SEQ ID NO: 204626 - DNA, 25 bp, SARS Virus
taaggtctactccctttgtaacact

SEQ ID NO: 204627 - DNA, 25 bp, SARS Virus
aaggtctactcactttgtaacactg

SEQ ID NO: 204628 - DNA, 25 bp, SARS Virus
aggtctactcaccttgtaacactga

SEQ ID NO: 204629 - DNA, 25 bp, SARS Virus
ggtctactcactctgtaacactgaa

SEQ ID NO: 204630 - DNA, 25 bp, SARS Virus
gtctactcacttcgtaacactgaaa

SEQ ID NO: 204631 - DNA, 25 bp, SARS Virus
tctactcactttctaacactgaaaa

SEQ ID NO: 204632 - DNA, 25 bp, SARS Virus
ctactcactttgcaacactgaaaaa

SEQ ID NO: 204633 - DNA, 25 bp, SARS Virus
tactcactttgtcacactgaaaaac

SEQ ID NO: 204634 - DNA, 25 bp, SARS Virus
actcactttgtaccactgaaaaacg

SEQ ID NO: 204635 - DNA, 25 bp, SARS Virus
ctcactttgtaacactgaaaaacga

SEQ ID NO: 204636 - DNA, 25 bp, SARS Virus
tcactttgtaaccctgaaaaacgat

SEQ ID NO: 204637 - DNA, 25 bp, SARS Virus
cactttgtaacactgaaaaacgatg

SEQ ID NO: 204638 - DNA, 25 bp, SARS Virus
actttgtaacaccgaaaaacgatga

SEQ ID NO: 204639 - DNA, 25 bp, SARS Virus
ctttgtaacactcaaaaacgatgaa

SEQ ID NO: 204640 - DNA, 25 bp, SARS Virus
tttgtaacactgcaaaacgatgaac

SEQ ID NO: 204641 - DNA, 25 bp, SARS Virus
ttgtaacactgacaaacgatgaacc

SEQ ID NO: 204642 - DNA, 25 bp, SARS Virus
tgtaacactgaacaacgatgaaccc

SEQ ID NO: 204643 - DNA, 25 bp, SARS Virus
gtaacactgaaacacgatgaacccg

SEQ ID NO: 204644 - DNA, 25 bp, SARS Virus
taacactgaaaaccgatgaacccgt

SEQ ID NO: 204645 - DNA, 25 bp, SARS Virus
aacactgaaaaacgatgaacccgta

SEQ ID NO: 204646 - DNA, 25 bp, SARS Virus
acactgaaaaaccatgaacccgtaa

SEQ ID NO: 204647 - DNA, 25 bp, SARS Virus
cactgaaaaacgctgaacccgtaac

SEQ ID NO: 204648 - DNA, 25 bp, SARS Virus
actgaaaaacgacgaacccgtaact

SEQ ID NO: 204649 - DNA, 25 bp, SARS Virus
ctgaaaaacgatcaacccgtaacta

SEQ ID NO: 204650 - DNA, 25 bp, SARS Virus
tgaaaaacgatgcacccgtaactat

SEQ ID NO: 204651 - DNA, 25 bp, SARS Virus
gaaaaacgatgaccccgtaactata

SEQ ID NO: 204652 - DNA, 25 bp, SARS Virus
aaaaacgatgaacccgtaactatac

SEQ ID NO: 204653 - DNA, 25 bp, SARS Virus
aaaacgatgaacccgtaactatacg

SEQ ID NO: 204654 - DNA, 25 bp, SARS Virus
aaacgatgaacccgtaactatacgg

SEQ ID NO: 204655 - DNA, 25 bp, SARS Virus
aacgatgaacccctaactatacgga

SEQ ID NO: 204656 - DNA, 25 bp, SARS Virus
acgatgaacccgcaactatacggaa

SEQ ID NO: 204657 - DNA, 25 bp, SARS Virus
cgatgaacccgtcactatacggaac

SEQ ID NO: 204658 - DNA, 25 bp, SARS Virus
gatgaacccgtacctatacggaacg

SEQ ID NO: 204659 - DNA, 25 bp, SARS Virus
atgaacccgtaactatacggaacgt

SEQ ID NO: 204660 - DNA, 25 bp, SARS Virus
tgaacccgtaaccatacggaacgta

SEQ ID NO: 204661 - DNA, 25 bp, SARS Virus
gaacccgtaactctacggaacgtaa

SEQ ID NO: 204662 - DNA, 25 bp, SARS Virus
aacccgtaactacacggaacgtaat

SEQ ID NO: 204663 - DNA, 25 bp, SARS Virus
acccgtaactatccggaacgtaatg

SEQ ID NO: 204664 - DNA, 25 bp, SARS Virus
cccgtaactatacggaacgtaatgt

SEQ ID NO: 204665 - DNA, 25 bp, SARS Virus
ccgtaactataccgaacgtaatgtc

SEQ ID NO: 204666 - DNA, 25 bp, SARS Virus
cgtaactatacgcaacgtaatgtca

SEQ ID NO: 204667 - DNA, 25 bp, SARS Virus
gtaactatacggcacgtaatgtcag

SEQ ID NO: 204668 - DNA, 25 bp, SARS Virus
taactatacggaccgtaatgtcagt

SEQ ID NO: 204669 - DNA, 25 bp, SARS Virus
aactatacggaacgtaatgtcagtt

SEQ ID NO: 204670 - DNA, 25 bp, SARS Virus
actatacggaacctaatgtcagtta

SEQ ID NO: 204671 - DNA, 25 bp, SARS Virus
ctatacggaacgcaatgtcagttat

SEQ ID NO: 204672 - DNA, 25 bp, SARS Virus
tatacggaacgtcatgtcagttatg

SEQ ID NO: 204673 - DNA, 25 bp, SARS Virus
atacggaacgtactgtcagttatgt

SEQ ID NO: 204674 - DNA, 25 bp, SARS Virus
tacggaacgtaacgtcagttatgta

SEQ ID NO: 204675 - DNA, 25 bp, SARS Virus
acggaacgtaatctcagttatgtac

SEQ ID NO: 204676 - DNA, 25 bp, SARS Virus
cggaacgtaatgccagttatgtacg

SEQ ID NO: 204677 - DNA, 25 bp, SARS Virus
ggaacgtaatgtcagttatgtacgc

SEQ ID NO: 204678 - DNA, 25 bp, SARS Virus
gaacgtaatgtccgttatgtacgcg

SEQ ID NO: 204679 - DNA, 25 bp, SARS Virus
aacgtaatgtcacttatgtacgcgg

SEQ ID NO: 204680 - DNA, 25 bp, SARS Virus
acgtaatgtcagctatgtacgcggt

SEQ ID NO: 204681 - DNA, 25 bp, SARS Virus
cgtaatgtcagtcatgtacgcggtt

SEQ ID NO: 204682 - DNA, 25 bp, SARS Virus
gtaatgtcagttctgtacgcggttc

SEQ ID NO: 204683 - DNA, 25 bp, SARS Virus
taatgtcagttacgtacgcggttct

SEQ ID NO: 204684 - DNA, 25 bp, SARS Virus
aatgtcagttatctacgcggttcta

SEQ ID NO: 204685 - DNA, 25 bp, SARS Virus
atgtcagttatgcacgcggttctag

SEQ ID NO: 204686 - DNA, 25 bp, SARS Virus
tgtcagttatgtccgcggttctaga

SEQ ID NO: 204687 - DNA, 25 bp, SARS Virus
gtcagttatgtacgcggttctagag

SEQ ID NO: 204688 - DNA, 25 bp, SARS Virus
tcagttatgtacccggttctagaga

SEQ ID NO: 204689 - DNA, 25 bp, SARS Virus
cagttatgtacgcggttctagagac

SEQ ID NO: 204690 - DNA, 25 bp, SARS Virus
agttatgtacgccgttctagagacc

SEQ ID NO: 204691 - DNA, 25 bp, SARS Virus
gttatgtacgcgcttctagagaccc

SEQ ID NO: 204692 - DNA, 25 bp, SARS Virus
ttatgtacgcggctctagagacccg

SEQ ID NO: 204693 - DNA, 25 bp, SARS Virus
tatgtacgcggtcctagagacccgc

SEQ ID NO: 204694 - DNA, 25 bp, SARS Virus
atgtacgcggttctagagacccgca

SEQ ID NO: 204695 - DNA, 25 bp, SARS Virus
tgtacgcggttccagagacccgcag

SEQ ID NO: 204696 - DNA, 25 bp, SARS Virus
gtacgcggttctcgagacccgcagt

SEQ ID NO: 204697 - DNA, 25 bp, SARS Virus
tacgcggttctacagacccgcagta

SEQ ID NO: 204698 - DNA, 25 bp, SARS Virus
acgcggttctagcgacccgcagtac

SEQ ID NO: 204699 - DNA, 25 bp, SARS Virus
cgcggttctagacacccgcagtaca

SEQ ID NO: 204700 - DNA, 25 bp, SARS Virus
gcggttctagagccccgcagtacaa

SEQ ID NO: 204701 - DNA, 25 bp, SARS Virus
cggttctagagacccgcagtacaaa

SEQ ID NO: 204702 - DNA, 25 bp, SARS Virus
ggttctagagacccgcagtacaaaa

SEQ ID NO: 204703 - DNA, 25 bp, SARS Virus
gttctagagacccgcagtacaaaag

SEQ ID NO: 204704 - DNA, 25 bp, SARS Virus
ttctagagacccccagtacaaaagt

SEQ ID NO: 204705 - DNA, 25 bp, SARS Virus
tctagagacccgcagtacaaaagtt

SEQ ID NO: 204706 - DNA, 25 bp, SARS Virus
ctagagacccgccgtacaaaagttg

SEQ ID NO: 204707 - DNA, 25 bp, SARS Virus
tagagacccgcactacaaaagttgg

SEQ ID NO: 204708 - DNA, 25 bp, SARS Virus
agagacccgcagcacaaaagttgga

SEQ ID NO: 204709 - DNA, 25 bp, SARS Virus
gagacccgcagtccaaaagttggaa

SEQ ID NO: 204710 - DNA, 25 bp, SARS Virus
agacccgcagtacaaaagttggaat

SEQ ID NO: 204711 - DNA, 25 bp, SARS Virus
gacccgcagtaccaaagttggaata

SEQ ID NO: 204712 - DNA, 25 bp, SARS Virus
acccgcagtacacaagttggaataa

SEQ ID NO: 204713 - DNA, 25 bp, SARS Virus
cccgcagtacaacagttggaataat

SEQ ID NO: 204714 - DNA, 25 bp, SARS Virus
ccgcagtacaaacgttggaataata

SEQ ID NO: 204715 - DNA, 25 bp, SARS Virus
cgcagtacaaaacttggaataatat

SEQ ID NO: 204716 - DNA, 25 bp, SARS Virus
gcagtacaaaagctggaataatatc

SEQ ID NO: 204717 - DNA, 25 bp, SARS Virus
cagtacaaaagtcggaataatatcc

SEQ ID NO: 204718 - DNA, 25 bp, SARS Virus
agtacaaaagttcgaataatatcca

SEQ ID NO: 204719 - DNA, 25 bp, SARS Virus
gtacaaaagttgcaataatatccac

SEQ ID NO: 204720 - DNA, 25 bp, SARS Virus
tacaaaagttggcataatatccact

SEQ ID NO: 204721 - DNA, 25 bp, SARS Virus
acaaaagttggactaatatccactc

SEQ ID NO: 204722 - DNA, 25 bp, SARS Virus
caaaagttggaacaatatccactcg

SEQ ID NO: 204723 - DNA, 25 bp, SARS Virus
aaaagttggaatcatatccactcgt

SEQ ID NO: 204724 - DNA, 25 bp, SARS Virus
aaagttggaatactatccactcgta

SEQ ID NO: 204725 - DNA, 25 bp, SARS Virus
aagttggaataacatccactcgtac

SEQ ID NO: 204726 - DNA, 25 bp, SARS Virus
agttggaataatctccactcgtact

SEQ ID NO: 204727 - DNA, 25 bp, SARS Virus
gttggaataatacccactcgtactt

SEQ ID NO: 204728 - DNA, 25 bp, SARS Virus
ttggaataatatccactcgtacttt

SEQ ID NO: 204729 - DNA, 25 bp, SARS Virus
tggaataatatccactcgtacttta

SEQ ID NO: 204730 - DNA, 25 bp, SARS Virus
ggaataatatcccctcgtactttaa

SEQ ID NO: 204731 - DNA, 25 bp, SARS Virus
gaataatatccactcgtactttaac

SEQ ID NO: 204732 - DNA, 25 bp, SARS Virus
aataatatccacccgtactttaaca

SEQ ID NO: 204733 - DNA, 25 bp, SARS Virus
ataatatccactcgtactttaacaa

SEQ ID NO: 204734 - DNA, 25 bp, SARS Virus
taatatccactcctactttaacaat

SEQ ID NO: 204735 - DNA, 25 bp, SARS Virus
aatatccactcgcactttaacaatg

SEQ ID NO: 204736 - DNA, 25 bp, SARS Virus
atatccactcgtcctttaacaatgt

SEQ ID NO: 204737 - DNA, 25 bp, SARS Virus
tatccactcgtactttaacaatgtt

SEQ ID NO: 204738 - DNA, 25 bp, SARS Virus
atccactcgtaccttaacaatgttg

SEQ ID NO: 204739 - DNA, 25 bp, SARS Virus
tccactcgtactctaacaatgttga

SEQ ID NO: 204740 - DNA, 25 bp, SARS Virus
ccactcgtacttcaacaatgttgac

SEQ ID NO: 204741 - DNA, 25 bp, SARS Virus
cactcgtactttcacaatgttgaca

SEQ ID NO: 204742 - DNA, 25 bp, SARS Virus
actcgtactttaccaatgttgacag

SEQ ID NO: 204743 - DNA, 25 bp, SARS Virus
ctcgtactttaacaatgttgacagt

SEQ ID NO: 204744 - DNA, 25 bp, SARS Virus
tcgtactttaaccatgttgacagtg

SEQ ID NO: 204745 - DNA, 25 bp, SARS Virus
cgtactttaacactgttgacagtgg

SEQ ID NO: 204746 - DNA, 25 bp, SARS Virus
gtactttaacaacgttgacagtgga

SEQ ID NO: 204747 - DNA, 25 bp, SARS Virus
tactttaacaatcttgacagtggac

SEQ ID NO: 204748 - DNA, 25 bp, SARS Virus
actttaacaatgctgacagtggaca

SEQ ID NO: 204749 - DNA, 25 bp, SARS Virus
ctttaacaatgtcgacagtggacag

SEQ ID NO: 204750 - DNA, 25 bp, SARS Virus
tttaacaatgttcacagtggacagt

SEQ ID NO: 204751 - DNA, 25 bp, SARS Virus
ttaacaatgttgccagtggacagtg

SEQ ID NO: 204752 - DNA, 25 bp, SARS Virus
taacaatgttgacagtggacagtga

SEQ ID NO: 204753 - DNA, 25 bp, SARS Virus
aacaatgttgaccgtggacagtgaa

SEQ ID NO: 204754 - DNA, 25 bp, SARS Virus
acaatgttgacactggacagtgaag

SEQ ID NO: 204755 - DNA, 25 bp, SARS Virus
caatgttgacagcggacagtgaaga

SEQ ID NO: 204756 - DNA, 25 bp, SARS Virus
aatgttgacagtcgacagtgaagat

SEQ ID NO: 204757 - DNA, 25 bp, SARS Virus
atgttgacagtgcacagtgaagatt

SEQ ID NO: 204758 - DNA, 25 bp, SARS Virus
tgttgacagtggccagtgaagattc

SEQ ID NO: 204759 - DNA, 25 bp, SARS Virus
gttgacagtggacagtgaagattca

SEQ ID NO: 204760 - DNA, 25 bp, SARS Virus
ttgacagtggaccgtgaagattcag

SEQ ID NO: 204761 - DNA, 25 bp, SARS Virus
tgacagtggacactgaagattcagt

SEQ ID NO: 204762 - DNA, 25 bp, SARS Virus
gacagtggacagcgaagattcagtc

SEQ ID NO: 204763 - DNA, 25 bp, SARS Virus
acagtggacagtcaagattcagtct

SEQ ID NO: 204764 - DNA, 25 bp, SARS Virus
cagtggacagtgcagattcagtctc

SEQ ID NO: 204765 - DNA, 25 bp, SARS Virus
agtggacagtgacgattcagtctca

SEQ ID NO: 204766 - DNA, 25 bp, SARS Virus
gtggacagtgaacattcagtctcac

SEQ ID NO: 204767 - DNA, 25 bp, SARS Virus
tggacagtgaagcttcagtctcact

SEQ ID NO: 204768 - DNA, 25 bp, SARS Virus
ggacagtgaagactcagtctcacta

SEQ ID NO: 204769 - DNA, 25 bp, SARS Virus
gacagtgaagatccagtctcactac

SEQ ID NO: 204770 - DNA, 25 bp, SARS Virus
acagtgaagattcagtctcactaca

SEQ ID NO: 204771 - DNA, 25 bp, SARS Virus
cagtgaagattccgtctcactacac

SEQ ID NO: 204772 - DNA, 25 bp, SARS Virus
agtgaagattcactctcactacact

SEQ ID NO: 204773 - DNA, 25 bp, SARS Virus
gtgaagattcagcctcactacactt

SEQ ID NO: 204774 - DNA, 25 bp, SARS Virus
tgaagattcagtctcactacacttt

SEQ ID NO: 204775 - DNA, 25 bp, SARS Virus
gaagattcagtcccactacactttc

SEQ ID NO: 204776 - DNA, 25 bp, SARS Virus
aagattcagtctcactacactttca

SEQ ID NO: 204777 - DNA, 25 bp, SARS Virus
agattcagtctccctacactttcaa

SEQ ID NO: 204778 - DNA, 25 bp, SARS Virus
gattcagtctcactacactttcaaa

SEQ ID NO: 204779 - DNA, 25 bp, SARS Virus
attcagtctcaccacactttcaaac

SEQ ID NO: 204780 - DNA, 25 bp, SARS Virus
ttcagtctcactccactttcaaact

SEQ ID NO: 204781 - DNA, 25 bp, SARS Virus
tcagtctcactacactttcaaactc

SEQ ID NO: 204782 - DNA, 25 bp, SARS Virus
cagtctcactaccctttcaaactct

SEQ ID NO: 204783 - DNA, 25 bp, SARS Virus
agtctcactacactttcaaactctg

SEQ ID NO: 204784 - DNA, 25 bp, SARS Virus
gtctcactacaccttcaaactctgt

SEQ ID NO: 204785 - DNA, 25 bp, SARS Virus
tctcactacactctcaaactctgta

SEQ ID NO: 204786 - DNA, 25 bp, SARS Virus
ctcactacacttccaaactctgtaa

SEQ ID NO: 204787 - DNA, 25 bp, SARS Virus
tcactacactttcaaactctgtaag

SEQ ID NO: 204788 - DNA, 25 bp, SARS Virus
cactacactttccaactctgtaagt

SEQ ID NO: 204789 - DNA, 25 bp, SARS Virus
actacactttcacactctgtaagtt

SEQ ID NO: 204790 - DNA, 25 bp, SARS Virus
ctacactttcaacctctgtaagtta

SEQ ID NO: 204791 - DNA, 25 bp, SARS Virus
tacactttcaaactctgtaagttat

SEQ ID NO: 204792 - DNA, 25 bp, SARS Virus
acactttcaaaccctgtaagttatt

SEQ ID NO: 204793 - DNA, 25 bp, SARS Virus
cactttcaaactctgtaagttattg

SEQ ID NO: 204794 - DNA, 25 bp, SARS Virus
actttcaaactccgtaagttattgt

SEQ ID NO: 204795 - DNA, 25 bp, SARS Virus
ctttcaaactctctaagttattgta

SEQ ID NO: 204796 - DNA, 25 bp, SARS Virus
tttcaaactctgcaagttattgtag

SEQ ID NO: 204797 - DNA, 25 bp, SARS Virus
ttcaaactctgtcagttattgtagg

SEQ ID NO: 204798 - DNA, 25 bp, SARS Virus
tcaaactctgtacgttattgtagga

SEQ ID NO: 204799 - DNA, 25 bp, SARS Virus
caaactctgtaacttattgtaggaa

SEQ ID NO: 204800 - DNA, 25 bp, SARS Virus
aaactctgtaagctattgtaggaaa

SEQ ID NO: 204801 - DNA, 25 bp, SARS Virus
aactctgtaagtcattgtaggaaac

SEQ ID NO: 204802 - DNA, 25 bp, SARS Virus
actctgtaagttcttgtaggaaaca

SEQ ID NO: 204803 - DNA, 25 bp, SARS Virus
ctctgtaagttactgtaggaaacac

SEQ ID NO: 204804 - DNA, 25 bp, SARS Virus
tctgtaagttatcgtaggaaacaca

SEQ ID NO: 204805 - DNA, 25 bp, SARS Virus
ctgtaagttattctaggaaacacag

SEQ ID NO: 204806 - DNA, 25 bp, SARS Virus
tgtaagttattgcaggaaacacagt

SEQ ID NO: 204807 - DNA, 25 bp, SARS Virus
gtaagttattgtcggaaacacagtt

SEQ ID NO: 204808 - DNA, 25 bp, SARS Virus
taagttattgtacgaaacacagttg

SEQ ID NO: 204809 - DNA, 25 bp, SARS Virus
aagttattgtagcaaacacagttgt

SEQ ID NO: 204810 - DNA, 25 bp, SARS Virus
agttattgtaggcaacacagttgta

SEQ ID NO: 204811 - DNA, 25 bp, SARS Virus
gttattgtaggacacacagttgtag

SEQ ID NO: 204812 - DNA, 25 bp, SARS Virus
ttattgtaggaaccacagttgtagc

SEQ ID NO: 204813 - DNA, 25 bp, SARS Virus
tattgtaggaaacacagttgtagcc

SEQ ID NO: 204814 - DNA, 25 bp, SARS Virus
attgtaggaaacccagttgtagcca

SEQ ID NO: 204815 - DNA, 25 bp, SARS Virus
ttgtaggaaacacagttgtagccat

SEQ ID NO: 204816 - DNA, 25 bp, SARS Virus
tgtaggaaacaccgttgtagccata

SEQ ID NO: 204817 - DNA, 25 bp, SARS Virus
gtaggaaacacacttgtagccatag

SEQ ID NO: 204818 - DNA, 25 bp, SARS Virus
taggaaacacagctgtagccatagt

SEQ ID NO: 204819 - DNA, 25 bp, SARS Virus
aggaaacacagtcgtagccatagtt

SEQ ID NO: 204820 - DNA, 25 bp, SARS Virus
ggaaacacagttctagccatagttg

SEQ ID NO: 204821 - DNA, 25 bp, SARS Virus
gaaacacagttgcagccatagttgt

SEQ ID NO: 204822 - DNA, 25 bp, SARS Virus
aaacacagttgtcgccatagttgtt

SEQ ID NO: 204823 - DNA, 25 bp, SARS Virus
aacacagttgtacccatagttgttg

SEQ ID NO: 204824 - DNA, 25 bp, SARS Virus
acacagttgtagccatagttgttgt

SEQ ID NO: 204825 - DNA, 25 bp, SARS Virus
cacagttgtagccatagttgttgtg

SEQ ID NO: 204826 - DNA, 25 bp, SARS Virus
acagttgtagccctagttgttgtgg

SEQ ID NO: 204827 - DNA, 25 bp, SARS Virus
cagttgtagccacagttgttgtgga

SEQ ID NO: 204828 - DNA, 25 bp, SARS Virus
agttgtagccatcgttgttgtggaa

SEQ ID NO: 204829 - DNA, 25 bp, SARS Virus
gttgtagccatacttgttgtggaac

SEQ ID NO: 204830 - DNA, 25 bp, SARS Virus
ttgtagccatagctgttgtggaaca

SEQ ID NO: 204831 - DNA, 25 bp, SARS Virus
tgtagccatagtcgttgtggaacag

SEQ ID NO: 204832 - DNA, 25 bp, SARS Virus
gtagccatagttcttgtggaacagc

SEQ ID NO: 204833 - DNA, 25 bp, SARS Virus
tagccatagttgctgtggaacagcc

SEQ ID NO: 204834 - DNA, 25 bp, SARS Virus
agccatagttgtcgtggaacagccc

SEQ ID NO: 204835 - DNA, 25 bp, SARS Virus
gccatagttgttctggaacagcccg

SEQ ID NO: 204836 - DNA, 25 bp, SARS Virus
ccatagttgttgcggaacagcccgt

SEQ ID NO: 204837 - DNA, 25 bp, SARS Virus
catagttgttgtcgaacagcccgtc

SEQ ID NO: 204838 - DNA, 25 bp, SARS Virus
atagttgttgtgcaacagcccgtcg

SEQ ID NO: 204839 - DNA, 25 bp, SARS Virus
tagttgttgtggcacagcccgtcga

SEQ ID NO: 204840 - DNA, 25 bp, SARS Virus
agttgttgtggaccagcccgtcgac

SEQ ID NO: 204841 - DNA, 25 bp, SARS Virus
gttgttgtggaacagcccgtcgact

SEQ ID NO: 204842 - DNA, 25 bp, SARS Virus
ttgttgtggaaccgcccgtcgactg

SEQ ID NO: 204843 - DNA, 25 bp, SARS Virus
tgttgtggaacaccccgtcgactgt

SEQ ID NO: 204844 - DNA, 25 bp, SARS Virus
gttgtggaacagcccgtcgactgtg

SEQ ID NO: 204845 - DNA, 25 bp, SARS Virus
ttgtggaacagcccgtcgactgtgc

SEQ ID NO: 204846 - DNA, 25 bp, SARS Virus
tgtggaacagcccgtcgactgtgct

SEQ ID NO: 204847 - DNA, 25 bp, SARS Virus
gtggaacagcccctcgactgtgctt

SEQ ID NO: 204848 - DNA, 25 bp, SARS Virus
tggaacagcccgccgactgtgctta

SEQ ID NO: 204849 - DNA, 25 bp, SARS Virus
ggaacagcccgtcgactgtgcttac

SEQ ID NO: 204850 - DNA, 25 bp, SARS Virus
gaacagcccgtccactgtgcttaca

SEQ ID NO: 204851 - DNA, 25 bp, SARS Virus
aacagcccgtcgcctgtgcttacat

SEQ ID NO: 204852 - DNA, 25 bp, SARS Virus
acagcccgtcgactgtgcttacatc

SEQ ID NO: 204853 - DNA, 25 bp, SARS Virus
cagcccgtcgaccgtgcttacatct

SEQ ID NO: 204854 - DNA, 25 bp, SARS Virus
agcccgtcgactctgcttacatctt

SEQ ID NO: 204855 - DNA, 25 bp, SARS Virus
gcccgtcgactgcgcttacatcttt

SEQ ID NO: 204856 - DNA, 25 bp, SARS Virus
cccgtcgactgtccttacatctttc

SEQ ID NO: 204857 - DNA, 25 bp, SARS Virus
ccgtcgactgtgcttacatctttcc

SEQ ID NO: 204858 - DNA, 25 bp, SARS Virus
cgtcgactgtgcctacatctttcct

SEQ ID NO: 204859 - DNA, 25 bp, SARS Virus
gtcgactgtgctcacatctttcctg

SEQ ID NO: 204860 - DNA, 25 bp, SARS Virus
tcgactgtgcttccatctttcctgt

SEQ ID NO: 204861 - DNA, 25 bp, SARS Virus
cgactgtgcttacatctttcctgtg

SEQ ID NO: 204862 - DNA, 25 bp, SARS Virus
gactgtgcttacctctttcctgtgg

SEQ ID NO: 204863 - DNA, 25 bp, SARS Virus
actgtgcttacacctttcctgtggt

SEQ ID NO: 204864 - DNA, 25 bp, SARS Virus
ctgtgcttacatctttcctgtggta

SEQ ID NO: 204865 - DNA, 25 bp, SARS Virus
tgtgcttacatccttcctgtggtag

SEQ ID NO: 204866 - DNA, 25 bp, SARS Virus
gtgcttacatctctcctgtggtaga

SEQ ID NO: 204867 - DNA, 25 bp, SARS Virus
tgcttacatcttccctgtggtagat

SEQ ID NO: 204868 - DNA, 25 bp, SARS Virus
gcttacatctttcctgtggtagatt

SEQ ID NO: 204869 - DNA, 25 bp, SARS Virus
cttacatctttcctgtggtagattt

SEQ ID NO: 204870 - DNA, 25 bp, SARS Virus
ttacatctttcccgtggtagatttc

SEQ ID NO: 204871 - DNA, 25 bp, SARS Virus
tacatctttcctctggtagatttcg

SEQ ID NO: 204872 - DNA, 25 bp, SARS Virus
acatctttcctgcggtagatttcga

SEQ ID NO: 204873 - DNA, 25 bp, SARS Virus
catctttcctgtcgtagatttcgat

SEQ ID NO: 204874 - DNA, 25 bp, SARS Virus
atctttcctgtgctagatttcgatg

SEQ ID NO: 204875 - DNA, 25 bp, SARS Virus
tctttcctgtggcagatttcgatgt

SEQ ID NO: 204876 - DNA, 25 bp, SARS Virus
ctttcctgtggtcgatttcgatgtg

SEQ ID NO: 204877 - DNA, 25 bp, SARS Virus
tttcctgtggtacatttcgatgtgg

SEQ ID NO: 204878 - DNA, 25 bp, SARS Virus
ttcctgtggtagctttcgatgtggg

SEQ ID NO: 204879 - DNA, 25 bp, SARS Virus
tcctgtggtagacttcgatgtggga

SEQ ID NO: 204880 - DNA, 25 bp, SARS Virus
cctgtggtagatctcgatgtgggaa

SEQ ID NO: 204881 - DNA, 25 bp, SARS Virus
ctgtggtagattccgatgtgggaaa

SEQ ID NO: 204882 - DNA, 25 bp, SARS Virus
tgtggtagatttcgatgtgggaaac

SEQ ID NO: 204883 - DNA, 25 bp, SARS Virus
gtggtagatttccatgtgggaaacg

SEQ ID NO: 204884 - DNA, 25 bp, SARS Virus
tggtagatttcgctgtgggaaacga

SEQ ID NO: 204885 - DNA, 25 bp, SARS Virus
ggtagatttcgacgtgggaaacgat

SEQ ID NO: 204886 - DNA, 25 bp, SARS Virus
gtagatttcgatctgggaaacgatt

SEQ ID NO: 204887 - DNA, 25 bp, SARS Virus
tagatttcgatgcgggaaacgattg

SEQ ID NO: 204888 - DNA, 25 bp, SARS Virus
agatttcgatgtcggaaacgattga

SEQ ID NO: 204889 - DNA, 25 bp, SARS Virus
gatttcgatgtgcgaaacgattgag

SEQ ID NO: 204890 - DNA, 25 bp, SARS Virus
atttcgatgtggcaaacgattgagc

SEQ ID NO: 204891 - DNA, 25 bp, SARS Virus
tttcgatgtgggcaacgattgagcg

SEQ ID NO: 204892 - DNA, 25 bp, SARS Virus
ttcgatgtgggacacgattgagcga

SEQ ID NO: 204893 - DNA, 25 bp, SARS Virus
tcgatgtgggaaccgattgagcgac

SEQ ID NO: 204894 - DNA, 25 bp, SARS Virus
cgatgtgggaaacgattgagcgaca

SEQ ID NO: 204895 - DNA, 25 bp, SARS Virus
gatgtgggaaaccattgagcgacac

SEQ ID NO: 204896 - DNA, 25 bp, SARS Virus
atgtgggaaacgcttgagcgacact

SEQ ID NO: 204897 - DNA, 25 bp, SARS Virus
tgtgggaaacgactgagcgacactc

SEQ ID NO: 204898 - DNA, 25 bp, SARS Virus
gtgggaaacgatcgagcgacactcg

SEQ ID NO: 204899 - DNA, 25 bp, SARS Virus
tgggaaacgattcagcgacactcga

SEQ ID NO: 204900 - DNA, 25 bp, SARS Virus
gggaaacgattgcgcgacactcgac

SEQ ID NO: 204901 - DNA, 25 bp, SARS Virus
ggaaacgattgaccgacactcgaca

SEQ ID NO: 204902 - DNA, 25 bp, SARS Virus
gaaacgattgagcgacactcgacat

SEQ ID NO: 204903 - DNA, 25 bp, SARS Virus
aaacgattgagccacactcgacatc

SEQ ID NO: 204904 - DNA, 25 bp, SARS Virus
aacgattgagcgccactcgacatcg

SEQ ID NO: 204905 - DNA, 25 bp, SARS Virus
acgattgagcgacactcgacatcgt

SEQ ID NO: 204906 - DNA, 25 bp, SARS Virus
cgattgagcgaccctcgacatcgtt

SEQ ID NO: 204907 - DNA, 25 bp, SARS Virus
gattgagcgacactcgacatcgttg

SEQ ID NO: 204908 - DNA, 25 bp, SARS Virus
attgagcgacacccgacatcgttgt

SEQ ID NO: 204909 - DNA, 25 bp, SARS Virus
ttgagcgacactcgacatcgttgtt

SEQ ID NO: 204910 - DNA, 25 bp, SARS Virus
tgagcgacactccacatcgttgttc

SEQ ID NO: 204911 - DNA, 25 bp, SARS Virus
gagcgacactcgccatcgttgttca

SEQ ID NO: 204912 - DNA, 25 bp, SARS Virus
agcgacactcgacatcgttgttcac

SEQ ID NO: 204913 - DNA, 25 bp, SARS Virus
gcgacactcgacctcgttgttcacg

SEQ ID NO: 204914 - DNA, 25 bp, SARS Virus
cgacactcgacaccgttgttcacgg

SEQ ID NO: 204915 - DNA, 25 bp, SARS Virus
gacactcgacatcgttgttcacgga

SEQ ID NO: 204916 - DNA, 25 bp, SARS Virus
acactcgacatccttgttcacggaa

SEQ ID NO: 204917 - DNA, 25 bp, SARS Virus
cactcgacatcgctgttcacggaat

SEQ ID NO: 204918 - DNA, 25 bp, SARS Virus
actcgacatcgtcgttcacggaatt

SEQ ID NO: 204919 - DNA, 25 bp, SARS Virus
ctcgacatcgttcttcacggaattc

SEQ ID NO: 204920 - DNA, 25 bp, SARS Virus
tcgacatcgttgctcacggaattca

SEQ ID NO: 204921 - DNA, 25 bp, SARS Virus
cgacatcgttgtccacggaattcaa

SEQ ID NO: 204922 - DNA, 25 bp, SARS Virus
gacatcgttgttcacggaattcaaa

SEQ ID NO: 204923 - DNA, 25 bp, SARS Virus
acatcgttgttcccggaattcaaaa

SEQ ID NO: 204924 - DNA, 25 bp, SARS Virus
catcgttgttcacggaattcaaaaa

SEQ ID NO: 204925 - DNA, 25 bp, SARS Virus
atcgttgttcaccgaattcaaaaag

SEQ ID NO: 204926 - DNA, 25 bp, SARS Virus
tcgttgttcacgcaattcaaaaagg

SEQ ID NO: 204927 - DNA, 25 bp, SARS Virus
cgttgttcacggcattcaaaaaggt

SEQ ID NO: 204928 - DNA, 25 bp, SARS Virus
gttgttcacggacttcaaaaaggta

SEQ ID NO: 204929 - DNA, 25 bp, SARS Virus
ttgttcacggaactcaaaaaggtat

SEQ ID NO: 204930 - DNA, 25 bp, SARS Virus
tgttcacggaatccaaaaaggtatc

SEQ ID NO: 204931 - DNA, 25 bp, SARS Virus
gttcacggaattcaaaaaggtatcc

SEQ ID NO: 204932 - DNA, 25 bp, SARS Virus
ttcacggaattccaaaaggtatcct

SEQ ID NO: 204933 - DNA, 25 bp, SARS Virus
tcacggaattcacaaaggtatcctt

SEQ ID NO: 204934 - DNA, 25 bp, SARS Virus
cacggaattcaacaaggtatccttg

SEQ ID NO: 204935 - DNA, 25 bp, SARS Virus
acggaattcaaacaggtatccttgt

SEQ ID NO: 204936 - DNA, 25 bp, SARS Virus
cggaattcaaaacggtatccttgtg

SEQ ID NO: 204937 - DNA, 25 bp, SARS Virus
ggaattcaaaaacgtatccttgtga

SEQ ID NO: 204938 - DNA, 25 bp, SARS Virus
gaattcaaaaagctatccttgtgat

SEQ ID NO: 204939 - DNA, 25 bp, SARS Virus
aattcaaaaaggcatccttgtgatt

SEQ ID NO: 204940 - DNA, 25 bp, SARS Virus
attcaaaaaggtctccttgtgattt

SEQ ID NO: 204941 - DNA, 25 bp, SARS Virus
ttcaaaaaggtacccttgtgatttt

SEQ ID NO: 204942 - DNA, 25 bp, SARS Virus
tcaaaaaggtatccttgtgattttc

SEQ ID NO: 204943 - DNA, 25 bp, SARS Virus
caaaaaggtatccttgtgattttca

SEQ ID NO: 204944 - DNA, 25 bp, SARS Virus
aaaaaggtatccctgtgattttcaa

SEQ ID NO: 204945 - DNA, 25 bp, SARS Virus
aaaaggtatcctcgtgattttcaac

SEQ ID NO: 204946 - DNA, 25 bp, SARS Virus
aaaggtatccttctgattttcaacg

SEQ ID NO: 204947 - DNA, 25 bp, SARS Virus
aaggtatccttgcgattttcaacga

SEQ ID NO: 204948 - DNA, 25 bp, SARS Virus
aggtatccttgtcattttcaacgac

SEQ ID NO: 204949 - DNA, 25 bp, SARS Virus
ggtatccttgtgcttttcaacgact

SEQ ID NO: 204950 - DNA, 25 bp, SARS Virus
gtatccttgtgactttcaacgactt

SEQ ID NO: 204951 - DNA, 25 bp, SARS Virus
tatccttgtgatcttcaacgacttt

SEQ ID NO: 204952 - DNA, 25 bp, SARS Virus
atccttgtgattctcaacgactttt

SEQ ID NO: 204953 - DNA, 25 bp, SARS Virus
tccttgtgatttccaacgacttttc

SEQ ID NO: 204954 - DNA, 25 bp, SARS Virus
ccttgtgattttcaacgacttttcc

SEQ ID NO: 204955 - DNA, 25 bp, SARS Virus
cttgtgattttccacgacttttcca

SEQ ID NO: 204956 - DNA, 25 bp, SARS Virus
ttgtgattttcaccgacttttccac

SEQ ID NO: 204957 - DNA, 25 bp, SARS Virus
tgtgattttcaacgacttttccaca

SEQ ID NO: 204958 - DNA, 25 bp, SARS Virus
gtgattttcaaccacttttccacag

SEQ ID NO: 204959 - DNA, 25 bp, SARS Virus
tgattttcaacgccttttccacagc

SEQ ID NO: 204960 - DNA, 25 bp, SARS Virus
gattttcaacgacttttccacagct

SEQ ID NO: 204961 - DNA, 25 bp, SARS Virus
attttcaacgacctttccacagctg

SEQ ID NO: 204962 - DNA, 25 bp, SARS Virus
ttttcaacgactcttccacagctgt

SEQ ID NO: 204963 - DNA, 25 bp, SARS Virus
tttcaacgacttctccacagctgta

SEQ ID NO: 204964 - DNA, 25 bp, SARS Virus
ttcaacgactttcccacagctgtat

SEQ ID NO: 204965 - DNA, 25 bp, SARS Virus
tcaacgacttttccacagctgtatt

SEQ ID NO: 204966 - DNA, 25 bp, SARS Virus
caacgacttttccacagctgtattc

SEQ ID NO: 204967 - DNA, 25 bp, SARS Virus
aacgacttttccccagctgtattcg

SEQ ID NO: 204968 - DNA, 25 bp, SARS Virus
acgacttttccacagctgtattcgt

SEQ ID NO: 204969 - DNA, 25 bp, SARS Virus
cgacttttccaccgctgtattcgta

SEQ ID NO: 204970 - DNA, 25 bp, SARS Virus
gacttttccacacctgtattcgtag

SEQ ID NO: 204971 - DNA, 25 bp, SARS Virus
acttttccacagctgtattcgtagt

SEQ ID NO: 204972 - DNA, 25 bp, SARS Virus
cttttccacagccgtattcgtagtt

SEQ ID NO: 204973 - DNA, 25 bp, SARS Virus
ttttccacagctctattcgtagttt

SEQ ID NO: 204974 - DNA, 25 bp, SARS Virus
tttccacagctgcattcgtagtttg

SEQ ID NO: 204975 - DNA, 25 bp, SARS Virus
ttccacagctgtcttcgtagtttgt

SEQ ID NO: 204976 - DNA, 25 bp, SARS Virus
tccacagctgtactcgtagtttgta

SEQ ID NO: 204977 - DNA, 25 bp, SARS Virus
ccacagctgtatccgtagtttgtag

SEQ ID NO: 204978 - DNA, 25 bp, SARS Virus
cacagctgtattcgtagtttgtaga

SEQ ID NO: 204979 - DNA, 25 bp, SARS Virus
acagctgtattcctagtttgtagaa

SEQ ID NO: 204980 - DNA, 25 bp, SARS Virus
cagctgtattcgcagtttgtagaat

SEQ ID NO: 204981 - DNA, 25 bp, SARS Virus
agctgtattcgtcgtttgtagaatt

SEQ ID NO: 204982 - DNA, 25 bp, SARS Virus
gctgtattcgtactttgtagaattg

SEQ ID NO: 204983 - DNA, 25 bp, SARS Virus
ctgtattcgtagcttgtagaattgc

SEQ ID NO: 204984 - DNA, 25 bp, SARS Virus
tgtattcgtagtctgtagaattgcc

SEQ ID NO: 204985 - DNA, 25 bp, SARS Virus
gtattcgtagttcgtagaattgcct

SEQ ID NO: 204986 - DNA, 25 bp, SARS Virus
tattcgtagtttctagaattgcctt

SEQ ID NO: 204987 - DNA, 25 bp, SARS Virus
attcgtagtttgcagaattgccttt

SEQ ID NO: 204988 - DNA, 25 bp, SARS Virus
ttcgtagtttgtcgaattgcctttg

SEQ ID NO: 204989 - DNA, 25 bp, SARS Virus
tcgtagtttgtacaattgcctttga

SEQ ID NO: 204990 - DNA, 25 bp, SARS Virus
cgtagtttgtagcattgcctttgaa

SEQ ID NO: 204991 - DNA, 25 bp, SARS Virus
gtagtttgtagacttgcctttgaag

SEQ ID NO: 204992 - DNA, 25 bp, SARS Virus
tagtttgtagaactgcctttgaagt

SEQ ID NO: 204993 - DNA, 25 bp, SARS Virus
aatactgtaactgttggacagatca

SEQ ID NO: 204994 - DNA, 25 bp, SARS Virus
atactgtaactggtggacagatcaa

SEQ ID NO: 204995 - DNA, 25 bp, SARS Virus
tactgtaactgtgggacagatcaac

SEQ ID NO: 204996 - DNA, 25 bp, SARS Virus
actgtaactgttggacagatcaaca

SEQ ID NO: 204997 - DNA, 25 bp, SARS Virus
ctgtaactgttggacagatcaacat

SEQ ID NO: 204998 - DNA, 25 bp, SARS Virus
tgtaactgttgggcagatcaacatc

SEQ ID NO: 204999 - DNA, 25 bp, SARS Virus
gtaactgttggagagatcaacatcg

SEQ ID NO: 205000 - DNA, 25 bp, SARS Virus
taactgttggacggatcaacatcgt

SEQ ID NO: 205001 - DNA, 25 bp, SARS Virus
aactgttggacagatcaacatcgtg

SEQ ID NO: 205002 - DNA, 25 bp, SARS Virus
actgttggacaggtcaacatcgtgt

SEQ ID NO: 205003 - DNA, 25 bp, SARS Virus
ctgttggacagagcaacatcgtgtt

SEQ ID NO: 205004 - DNA, 25 bp, SARS Virus
tgttggacagatgaacatcgtgttc

SEQ ID NO: 205005 - DNA, 25 bp, SARS Virus
gttggacagatcgacatcgtgttca

SEQ ID NO: 205006 - DNA, 25 bp, SARS Virus
ttggacagatcagcatcgtgttcaa

SEQ ID NO: 205007 - DNA, 25 bp, SARS Virus
tggacagatcaagatcgtgttcaat

SEQ ID NO: 205008 - DNA, 25 bp, SARS Virus
ggacagatcaacgtcgtgttcaatc

SEQ ID NO: 205009 - DNA, 25 bp, SARS Virus
gacagatcaacagcgtgttcaatca

SEQ ID NO: 205010 - DNA, 25 bp, SARS Virus
acagatcaacatggtgttcaatcag

SEQ ID NO: 205011 - DNA, 25 bp, SARS Virus
cagatcaacatcgtgttcaatcaga

SEQ ID NO: 205012 - DNA, 25 bp, SARS Virus
agatcaacatcgggttcaatcagat

SEQ ID NO: 205013 - DNA, 25 bp, SARS Virus
gatcaacatcgtgttcaatcagatt

SEQ ID NO: 205014 - DNA, 25 bp, SARS Virus
atcaacatcgtggtcaatcagattt

SEQ ID NO: 205015 - DNA, 25 bp, SARS Virus
tcaacatcgtgtgcaatcagatttt

SEQ ID NO: 205016 - DNA, 25 bp, SARS Virus
caacatcgtgttgaatcagattttc

SEQ ID NO: 205017 - DNA, 25 bp, SARS Virus
aacatcgtgttcgatcagattttcc

SEQ ID NO: 205018 - DNA, 25 bp, SARS Virus
acatcgtgttcagtcagattttcca

SEQ ID NO: 205019 - DNA, 25 bp, SARS Virus
catcgtgttcaagcagattttccat

SEQ ID NO: 205020 - DNA, 25 bp, SARS Virus
atcgtgttcaatgagattttccata

SEQ ID NO: 205021 - DNA, 25 bp, SARS Virus
tcgtgttcaatcggattttccatac

SEQ ID NO: 205022 - DNA, 25 bp, SARS Virus
cgtgttcaatcagattttccataca

SEQ ID NO: 205023 - DNA, 25 bp, SARS Virus
gtgttcaatcaggttttccatacaa

SEQ ID NO: 205024 - DNA, 25 bp, SARS Virus
tgttcaatcagagtttccatacaac

SEQ ID NO: 205025 - DNA, 25 bp, SARS Virus
gttcaatcagatgttccatacaaca

SEQ ID NO: 205026 - DNA, 25 bp, SARS Virus
ttcaatcagattgtccatacaacaa

SEQ ID NO: 205027 - DNA, 25 bp, SARS Virus
tcaatcagatttgccatacaacaag

SEQ ID NO: 205028 - DNA, 25 bp, SARS Virus
caatcagattttgcatacaacaaga

SEQ ID NO: 205029 - DNA, 25 bp, SARS Virus
aatcagattttcgatacaacaagaa

SEQ ID NO: 205030 - DNA, 25 bp, SARS Virus
atcagattttccgtacaacaagaag

SEQ ID NO: 205031 - DNA, 25 bp, SARS Virus
tcagattttccagacaacaagaaga

SEQ ID NO: 205032 - DNA, 25 bp, SARS Virus
cagattttccatgcaacaagaagaa

SEQ ID NO: 205033 - DNA, 25 bp, SARS Virus
agattttccatagaacaagaagaac

SEQ ID NO: 205034 - DNA, 25 bp, SARS Virus
gattttccatacgacaagaagaacc

SEQ ID NO: 205035 - DNA, 25 bp, SARS Virus
attttccatacagcaagaagaaccg

SEQ ID NO: 205036 - DNA, 25 bp, SARS Virus
ttttccatacaagaagaagaaccgt

SEQ ID NO: 205037 - DNA, 25 bp, SARS Virus
tttccatacaacgagaagaaccgtc

SEQ ID NO: 205038 - DNA, 25 bp, SARS Virus
ttccatacaacaggaagaaccgtcg

SEQ ID NO: 205039 - DNA, 25 bp, SARS Virus
tccatacaacaagaagaaccgtcgt

SEQ ID NO: 205040 - DNA, 25 bp, SARS Virus
ccatacaacaaggagaaccgtcgtg

SEQ ID NO: 205041 - DNA, 25 bp, SARS Virus
catacaacaagaggaaccgtcgtga

SEQ ID NO: 205042 - DNA, 25 bp, SARS Virus
atacaacaagaagaaccgtcgtgat

SEQ ID NO: 205043 - DNA, 25 bp, SARS Virus
tacaacaagaaggaccgtcgtgatg

SEQ ID NO: 205044 - DNA, 25 bp, SARS Virus
acaacaagaagagccgtcgtgatgc

SEQ ID NO: 205045 - DNA, 25 bp, SARS Virus
caacaagaagaagcgtcgtgatgct

SEQ ID NO: 205046 - DNA, 25 bp, SARS Virus
aacaagaagaacggtcgtgatgctt

SEQ ID NO: 205047 - DNA, 25 bp, SARS Virus
acaagaagaaccgtcgtgatgctta

SEQ ID NO: 205048 - DNA, 25 bp, SARS Virus
caagaagaaccggcgtgatgcttaa

SEQ ID NO: 205049 - DNA, 25 bp, SARS Virus
aagaagaaccgtggtgatgcttaaa

SEQ ID NO: 205050 - DNA, 25 bp, SARS Virus
agaagaaccgtcgtgatgcttaaac

SEQ ID NO: 205051 - DNA, 25 bp, SARS Virus
gaagaaccgtcgggatgcttaaaca

SEQ ID NO: 205052 - DNA, 25 bp, SARS Virus
aagaaccgtcgtgatgcttaaacaa

SEQ ID NO: 205053 - DNA, 25 bp, SARS Virus
agaaccgtcgtggtgcttaaacaaa

SEQ ID NO: 205054 - DNA, 25 bp, SARS Virus
gaaccgtcgtgaggcttaaacaaat

SEQ ID NO: 205055 - DNA, 25 bp, SARS Virus
aaccgtcgtgatgcttaaacaaatg

SEQ ID NO: 205056 - DNA, 25 bp, SARS Virus
accgtcgtgatggttaaacaaatgc

SEQ ID NO: 205057 - DNA, 25 bp, SARS Virus
ccgtcgtgatgcgtaaacaaatgcg

SEQ ID NO: 205058 - DNA, 25 bp, SARS Virus
cgtcgtgatgctgaaacaaatgcgt

SEQ ID NO: 205059 - DNA, 25 bp, SARS Virus
gtcgtgatgcttgaacaaatgcgtc

SEQ ID NO: 205060 - DNA, 25 bp, SARS Virus
tcgtgatgcttagacaaatgcgtcg

SEQ ID NO: 205061 - DNA, 25 bp, SARS Virus
cgtgatgcttaagcaaatgcgtcga

SEQ ID NO: 205062 - DNA, 25 bp, SARS Virus
gtgatgcttaaagaaatgcgtcgac

SEQ ID NO: 205063 - DNA, 25 bp, SARS Virus
tgatgcttaaacgaatgcgtcgaca

SEQ ID NO: 205064 - DNA, 25 bp, SARS Virus
gatgcttaaacagatgcgtcgacaa

SEQ ID NO: 205065 - DNA, 25 bp, SARS Virus
atgcttaaacaagtgcgtcgacaag

SEQ ID NO: 205066 - DNA, 25 bp, SARS Virus
tgcttaaacaaaggcgtcgacaagt

SEQ ID NO: 205067 - DNA, 25 bp, SARS Virus
gcttaaacaaatgcgtcgacaagtc

SEQ ID NO: 205068 - DNA, 25 bp, SARS Virus
cttaaacaaatgggtcgacaagtct

SEQ ID NO: 205069 - DNA, 25 bp, SARS Virus
ttaaacaaatgcgtcgacaagtcta

SEQ ID NO: 205070 - DNA, 25 bp, SARS Virus
taaacaaatgcggcgacaagtctat

SEQ ID NO: 205071 - DNA, 25 bp, SARS Virus
aaacaaatgcgtggacaagtctatt

SEQ ID NO: 205072 - DNA, 25 bp, SARS Virus
aacaaatgcgtcgacaagtctattt

SEQ ID NO: 205073 - DNA, 25 bp, SARS Virus
acaaatgcgtcggcaagtctatttc

SEQ ID NO: 205074 - DNA, 25 bp, SARS Virus
caaatgcgtcgagaagtctatttct

SEQ ID NO: 205075 - DNA, 25 bp, SARS Virus
aaatgcgtcgacgagtctatttctg

SEQ ID NO: 205076 - DNA, 25 bp, SARS Virus
aatgcgtcgacaggtctatttctgt

SEQ ID NO: 205077 - DNA, 25 bp, SARS Virus
atgcgtcgacaagtctatttctgta

SEQ ID NO: 205078 - DNA, 25 bp, SARS Virus
tgcgtcgacaaggctatttctgtac

SEQ ID NO: 205079 - DNA, 25 bp, SARS Virus
gcgtcgacaagtgtatttctgtaca

SEQ ID NO: 205080 - DNA, 25 bp, SARS Virus
cgtcgacaagtcgatttctgtacat

SEQ ID NO: 205081 - DNA, 25 bp, SARS Virus
gtcgacaagtctgtttctgtacatc

SEQ ID NO: 205082 - DNA, 25 bp, SARS Virus
tcgacaagtctagttctgtacatca

SEQ ID NO: 205083 - DNA, 25 bp, SARS Virus
cgacaagtctatgtctgtacatcag

SEQ ID NO: 205084 - DNA, 25 bp, SARS Virus
gacaagtctattgctgtacatcaga

SEQ ID NO: 205085 - DNA, 25 bp, SARS Virus
acaagtctatttgtgtacatcagaa

SEQ ID NO: 205086 - DNA, 25 bp, SARS Virus
caagtctatttcggtacatcagaaa

SEQ ID NO: 205087 - DNA, 25 bp, SARS Virus
aagtctatttctgtacatcagaaaa

SEQ ID NO: 205088 - DNA, 25 bp, SARS Virus
agtctatttctggacatcagaaaat

SEQ ID NO: 205089 - DNA, 25 bp, SARS Virus
gtctatttctgtgcatcagaaaatg

SEQ ID NO: 205090 - DNA, 25 bp, SARS Virus
tctatttctgtagatcagaaaatgt

SEQ ID NO: 205091 - DNA, 25 bp, SARS Virus
ctatttctgtacgtcagaaaatgta

SEQ ID NO: 205092 - DNA, 25 bp, SARS Virus
tatttctgtacagcagaaaatgtaa

SEQ ID NO: 205093 - DNA, 25 bp, SARS Virus
atttctgtacatgagaaaatgtaag

SEQ ID NO: 205094 - DNA, 25 bp, SARS Virus
tttctgtacatcggaaaatgtaagg

SEQ ID NO: 205095 - DNA, 25 bp, SARS Virus
ttctgtacatcagaaaatgtaaggt

SEQ ID NO: 205096 - DNA, 25 bp, SARS Virus
tctgtacatcaggaaatgtaaggtc

SEQ ID NO: 205097 - DNA, 25 bp, SARS Virus
ctgtacatcagagaatgtaaggtct

SEQ ID NO: 205098 - DNA, 25 bp, SARS Virus
tgtacatcagaagatgtaaggtcta

SEQ ID NO: 205099 - DNA, 25 bp, SARS Virus
gtacatcagaaagtgtaaggtctac

SEQ ID NO: 205100 - DNA, 25 bp, SARS Virus
tacatcagaaaaggtaaggtctact

SEQ ID NO: 205101 - DNA, 25 bp, SARS Virus
acatcagaaaatgtaaggtctactc

SEQ ID NO: 205102 - DNA, 25 bp, SARS Virus
catcagaaaatggaaggtctactca

SEQ ID NO: 205103 - DNA, 25 bp, SARS Virus
atcagaaaatgtgaggtctactcac

SEQ ID NO: 205104 - DNA, 25 bp, SARS Virus
tcagaaaatgtagggtctactcact

SEQ ID NO: 205105 - DNA, 25 bp, SARS Virus
cagaaaatgtaaggtctactcactt

SEQ ID NO: 205106 - DNA, 25 bp, SARS Virus
agaaaatgtaaggtctactcacttt

SEQ ID NO: 205107 - DNA, 25 bp, SARS Virus
gaaaatgtaagggctactcactttg

SEQ ID NO: 205108 - DNA, 25 bp, SARS Virus
aaaatgtaaggtgtactcactttgt

SEQ ID NO: 205109 - DNA, 25 bp, SARS Virus
aaatgtaaggtcgactcactttgta

SEQ ID NO: 205110 - DNA, 25 bp, SARS Virus
aatgtaaggtctgctcactttgtaa

SEQ ID NO: 205111 - DNA, 25 bp, SARS Virus
atgtaaggtctagtcactttgtaac

SEQ ID NO: 205112 - DNA, 25 bp, SARS Virus
tgtaaggtctacgcactttgtaaca

SEQ ID NO: 205113 - DNA, 25 bp, SARS Virus
gtaaggtctactgactttgtaacac

SEQ ID NO: 205114 - DNA, 25 bp, SARS Virus
taaggtctactcgctttgtaacact

SEQ ID NO: 205115 - DNA, 25 bp, SARS Virus
aaggtctactcagtttgtaacactg

SEQ ID NO: 205116 - DNA, 25 bp, SARS Virus
aggtctactcacgttgtaacactga

SEQ ID NO: 205117 - DNA, 25 bp, SARS Virus
ggtctactcactgtgtaacactgaa

SEQ ID NO: 205118 - DNA, 25 bp, SARS Virus
gtctactcacttggtaacactgaaa

SEQ ID NO: 205119 - DNA, 25 bp, SARS Virus
tctactcactttgtaacactgaaaa

SEQ ID NO: 205120 - DNA, 25 bp, SARS Virus
ctactcactttggaacactgaaaaa

SEQ ID NO: 205121 - DNA, 25 bp, SARS Virus
tactcactttgtgacactgaaaaac

SEQ ID NO: 205122 - DNA, 25 bp, SARS Virus
actcactttgtagcactgaaaaacg

SEQ ID NO: 205123 - DNA, 25 bp, SARS Virus
ctcactttgtaagactgaaaaacga

SEQ ID NO: 205124 - DNA, 25 bp, SARS Virus
tcactttgtaacgctgaaaaacgat

SEQ ID NO: 205125 - DNA, 25 bp, SARS Virus
cactttgtaacagtgaaaaacgatg

SEQ ID NO: 205126 - DNA, 25 bp, SARS Virus
actttgtaacacggaaaaacgatga

SEQ ID NO: 205127 - DNA, 25 bp, SARS Virus
ctttgtaacactgaaaaacgatgaa

SEQ ID NO: 205128 - DNA, 25 bp, SARS Virus
tttgtaacactggaaaacgatgaac

SEQ ID NO: 205129 - DNA, 25 bp, SARS Virus
ttgtaacactgagaaacgatgaacc

SEQ ID NO: 205130 - DNA, 25 bp, SARS Virus
tgtaacactgaagaacgatgaaccc

SEQ ID NO: 205131 - DNA, 25 bp, SARS Virus
gtaacactgaaagacgatgaacccg

SEQ ID NO: 205132 - DNA, 25 bp, SARS Virus
taacactgaaaagcgatgaacccgt

SEQ ID NO: 205133 - DNA, 25 bp, SARS Virus
aacactgaaaaaggatgaacccgta

SEQ ID NO: 205134 - DNA, 25 bp, SARS Virus
acactgaaaaacgatgaacccgtaa

SEQ ID NO: 205135 - DNA, 25 bp, SARS Virus
cactgaaaaacggtgaacccgtaac

SEQ ID NO: 205136 - DNA, 25 bp, SARS Virus
actgaaaaacgaggaacccgtaact

SEQ ID NO: 205137 - DNA, 25 bp, SARS Virus
ctgaaaaacgatgaacccgtaacta

SEQ ID NO: 205138 - DNA, 25 bp, SARS Virus
tgaaaaacgatggacccgtaactat

SEQ ID NO: 205139 - DNA, 25 bp, SARS Virus
gaaaaacgatgagcccgtaactata

SEQ ID NO: 205140 - DNA, 25 bp, SARS Virus
aaaaacgatgaagccgtaactatac

SEQ ID NO: 205141 - DNA, 25 bp, SARS Virus
aaaacgatgaacgcgtaactatacg

SEQ ID NO: 205142 - DNA, 25 bp, SARS Virus
aaacgatgaaccggtaactatacgg

SEQ ID NO: 205143 - DNA, 25 bp, SARS Virus
aacgatgaacccgtaactatacgga

SEQ ID NO: 205144 - DNA, 25 bp, SARS Virus
acgatgaacccggaactatacggaa

SEQ ID NO: 205145 - DNA, 25 bp, SARS Virus
cgatgaacccgtgactatacggaac

SEQ ID NO: 205146 - DNA, 25 bp, SARS Virus
gatgaacccgtagctatacggaacg

SEQ ID NO: 205147 - DNA, 25 bp, SARS Virus
atgaacccgtaagtatacggaacgt

SEQ ID NO: 205148 - DNA, 25 bp, SARS Virus
tgaacccgtaacgatacggaacgta

SEQ ID NO: 205149 - DNA, 25 bp, SARS Virus
gaacccgtaactgtacggaacgtaa

SEQ ID NO: 205150 - DNA, 25 bp, SARS Virus
aacccgtaactagacggaacgtaat

SEQ ID NO: 205151 - DNA, 25 bp, SARS Virus
acccgtaactatgcggaacgtaatg

SEQ ID NO: 205152 - DNA, 25 bp, SARS Virus
cccgtaactatagggaacgtaatgt

SEQ ID NO: 205153 - DNA, 25 bp, SARS Virus
ccgtaactatacggaacgtaatgtc

SEQ ID NO: 205154 - DNA, 25 bp, SARS Virus
cgtaactatacggaacgtaatgtca

SEQ ID NO: 205155 - DNA, 25 bp, SARS Virus
gtaactatacgggacgtaatgtcag

SEQ ID NO: 205156 - DNA, 25 bp, SARS Virus
taactatacggagcgtaatgtcagt

SEQ ID NO: 205157 - DNA, 25 bp, SARS Virus
aactatacggaaggtaatgtcagtt

SEQ ID NO: 205158 - DNA, 25 bp, SARS Virus
actatacggaacgtaatgtcagtta

SEQ ID NO: 205159 - DNA, 25 bp, SARS Virus
ctatacggaacggaatgtcagttat

SEQ ID NO: 205160 - DNA, 25 bp, SARS Virus
tatacggaacgtgatgtcagttatg

SEQ ID NO: 205161 - DNA, 25 bp, SARS Virus
atacggaacgtagtgtcagttatgt

SEQ ID NO: 205162 - DNA, 25 bp, SARS Virus
tacggaacgtaaggtcagttatgta

SEQ ID NO: 205163 - DNA, 25 bp, SARS Virus
acggaacgtaatgtcagttatgtac

SEQ ID NO: 205164 - DNA, 25 bp, SARS Virus
cggaacgtaatggcagttatgtacg

SEQ ID NO: 205165 - DNA, 25 bp, SARS Virus
ggaacgtaatgtgagttatgtacgc

SEQ ID NO: 205166 - DNA, 25 bp, SARS Virus
gaacgtaatgtcggttatgtacgcg

SEQ ID NO: 205167 - DNA, 25 bp, SARS Virus
aacgtaatgtcagttatgtacgcgg

SEQ ID NO: 205168 - DNA, 25 bp, SARS Virus
acgtaatgtcaggtatgtacgcggt

SEQ ID NO: 205169 - DNA, 25 bp, SARS Virus
cgtaatgtcagtgatgtacgcggtt

SEQ ID NO: 205170 - DNA, 25 bp, SARS Virus
gtaatgtcagttgtgtacgcggttc

SEQ ID NO: 205171 - DNA, 25 bp, SARS Virus
taatgtcagttaggtacgcggttct

SEQ ID NO: 205172 - DNA, 25 bp, SARS Virus
aatgtcagttatgtacgcggttcta

SEQ ID NO: 205173 - DNA, 25 bp, SARS Virus
atgtcagttatggacgcggttctag

SEQ ID NO: 205174 - DNA, 25 bp, SARS Virus
tgtcagttatgtgcgcggttctaga

SEQ ID NO: 205175 - DNA, 25 bp, SARS Virus
gtcagttatgtaggcggttctagag

SEQ ID NO: 205176 - DNA, 25 bp, SARS Virus
tcagttatgtacgcggttctagaga

SEQ ID NO: 205177 - DNA, 25 bp, SARS Virus
cagttatgtacggggttctagagac

SEQ ID NO: 205178 - DNA, 25 bp, SARS Virus
agttatgtacgcggttctagagacc

SEQ ID NO: 205179 - DNA, 25 bp, SARS Virus
gttatgtacgcggttctagagaccc

SEQ ID NO: 205180 - DNA, 25 bp, SARS Virus
ttatgtacgcgggtctagagacccg

SEQ ID NO: 205181 - DNA, 25 bp, SARS Virus
tatgtacgcggtgctagagacccgc

SEQ ID NO: 205182 - DNA, 25 bp, SARS Virus
atgtacgcggttgtagagacccgca

SEQ ID NO: 205183 - DNA, 25 bp, SARS Virus
tgtacgcggttcgagagacccgcag

SEQ ID NO: 205184 - DNA, 25 bp, SARS Virus
gtacgcggttctggagacccgcagt

SEQ ID NO: 205185 - DNA, 25 bp, SARS Virus
tacgcggttctagagacccgcagta

SEQ ID NO: 205186 - DNA, 25 bp, SARS Virus
acgcggttctagggacccgcagtac

SEQ ID NO: 205187 - DNA, 25 bp, SARS Virus
cgcggttctagagacccgcagtaca

SEQ ID NO: 205188 - DNA, 25 bp, SARS Virus
gcggttctagaggcccgcagtacaa

SEQ ID NO: 205189 - DNA, 25 bp, SARS Virus
cggttctagagagccgcagtacaaa

SEQ ID NO: 205190 - DNA, 25 bp, SARS Virus
ggttctagagacgcgcagtacaaaa

SEQ ID NO: 205191 - DNA, 25 bp, SARS Virus
gttctagagaccggcagtacaaaag

SEQ ID NO: 205192 - DNA, 25 bp, SARS Virus
ttctagagacccgcagtacaaaagt

SEQ ID NO: 205193 - DNA, 25 bp, SARS Virus
tctagagacccggagtacaaaagtt

SEQ ID NO: 205194 - DNA, 25 bp, SARS Virus
ctagagacccgcggtacaaaagttg

SEQ ID NO: 205195 - DNA, 25 bp, SARS Virus
tagagacccgcagtacaaaagttgg

SEQ ID NO: 205196 - DNA, 25 bp, SARS Virus
agagacccgcaggacaaaagttgga

SEQ ID NO: 205197 - DNA, 25 bp, SARS Virus
gagacccgcagtgcaaaagttggaa

SEQ ID NO: 205198 - DNA, 25 bp, SARS Virus
agacccgcagtagaaaagttggaat

SEQ ID NO: 205199 - DNA, 25 bp, SARS Virus
gacccgcagtacgaaagttggaata

SEQ ID NO: 205200 - DNA, 25 bp, SARS Virus
acccgcagtacagaagttggaataa

SEQ ID NO: 205201 - DNA, 25 bp, SARS Virus
cccgcagtacaagagttggaataat

SEQ ID NO: 205202 - DNA, 25 bp, SARS Virus
ccgcagtacaaaggttggaataata

SEQ ID NO: 205203 - DNA, 25 bp, SARS Virus
cgcagtacaaaagttggaataatat

SEQ ID NO: 205204 - DNA, 25 bp, SARS Virus
gcagtacaaaaggtggaataatatc

SEQ ID NO: 205205 - DNA, 25 bp, SARS Virus
cagtacaaaagtgggaataatatcc

SEQ ID NO: 205206 - DNA, 25 bp, SARS Virus
agtacaaaagttggaataatatcca

SEQ ID NO: 205207 - DNA, 25 bp, SARS Virus
gtacaaaagttggaataatatccac

SEQ ID NO: 205208 - DNA, 25 bp, SARS Virus
tacaaaagttgggataatatccact

SEQ ID NO: 205209 - DNA, 25 bp, SARS Virus
acaaaagttggagtaatatccactc

SEQ ID NO: 205210 - DNA, 25 bp, SARS Virus
caaaagttggaagaatatccactcg

SEQ ID NO: 205211 - DNA, 25 bp, SARS Virus
aaaagttggaatgatatccactcgt

SEQ ID NO: 205212 - DNA, 25 bp, SARS Virus
aaagttggaatagtatccactcgta

SEQ ID NO: 205213 - DNA, 25 bp, SARS Virus
aagttggaataagatccactcgtac

SEQ ID NO: 205214 - DNA, 25 bp, SARS Virus
agttggaataatgtccactcgtact

SEQ ID NO: 205215 - DNA, 25 bp, SARS Virus
gttggaataatagccactcgtactt

SEQ ID NO: 205216 - DNA, 25 bp, SARS Virus
ttggaataatatgcactcgtacttt

SEQ ID NO: 205217 - DNA, 25 bp, SARS Virus
tggaataatatcgactcgtacttta

SEQ ID NO: 205218 - DNA, 25 bp, SARS Virus
ggaataatatccgctcgtactttaa

SEQ ID NO: 205219 - DNA, 25 bp, SARS Virus
gaataatatccagtcgtactttaac

SEQ ID NO: 205220 - DNA, 25 bp, SARS Virus
aataatatccacgcgtactttaaca

SEQ ID NO: 205221 - DNA, 25 bp, SARS Virus
ataatatccactggtactttaacaa

SEQ ID NO: 205222 - DNA, 25 bp, SARS Virus
taatatccactcgtactttaacaat

SEQ ID NO: 205223 - DNA, 25 bp, SARS Virus
aatatccactcggactttaacaatg

SEQ ID NO: 205224 - DNA, 25 bp, SARS Virus
atatccactcgtgctttaacaatgt

SEQ ID NO: 205225 - DNA, 25 bp, SARS Virus
tatccactcgtagtttaacaatgtt

SEQ ID NO: 205226 - DNA, 25 bp, SARS Virus
atccactcgtacgttaacaatgttg

SEQ ID NO: 205227 - DNA, 25 bp, SARS Virus
tccactcgtactgtaacaatgttga

SEQ ID NO: 205228 - DNA, 25 bp, SARS Virus
ccactcgtacttgaacaatgttgac

SEQ ID NO: 205229 - DNA, 25 bp, SARS Virus
cactcgtactttgacaatgttgaca

SEQ ID NO: 205230 - DNA, 25 bp, SARS Virus
actcgtactttagcaatgttgacag

SEQ ID NO: 205231 - DNA, 25 bp, SARS Virus
ctcgtactttaagaatgttgacagt

SEQ ID NO: 205232 - DNA, 25 bp, SARS Virus
tcgtactttaacgatgttgacagtg

SEQ ID NO: 205233 - DNA, 25 bp, SARS Virus
cgtactttaacagtgttgacagtgg

SEQ ID NO: 205234 - DNA, 25 bp, SARS Virus
gtactttaacaaggttgacagtgga

SEQ ID NO: 205235 - DNA, 25 bp, SARS Virus
tactttaacaatgttgacagtggac

SEQ ID NO: 205236 - DNA, 25 bp, SARS Virus
actttaacaatggtgacagtggaca

SEQ ID NO: 205237 - DNA, 25 bp, SARS Virus
ctttaacaatgtggacagtggacag

SEQ ID NO: 205238 - DNA, 25 bp, SARS Virus
tttaacaatgttgacagtggacagt

SEQ ID NO: 205239 - DNA, 25 bp, SARS Virus
ttaacaatgttggcagtggacagtg

SEQ ID NO: 205240 - DNA, 25 bp, SARS Virus
taacaatgttgagagtggacagtga

SEQ ID NO: 205241 - DNA, 25 bp, SARS Virus
aacaatgttgacggtggacagtgaa

SEQ ID NO: 205242 - DNA, 25 bp, SARS Virus
acaatgttgacagtggacagtgaag

SEQ ID NO: 205243 - DNA, 25 bp, SARS Virus
caatgttgacaggggacagtgaaga

SEQ ID NO: 205244 - DNA, 25 bp, SARS Virus
aatgttgacagtggacagtgaagat

SEQ ID NO: 205245 - DNA, 25 bp, SARS Virus
atgttgacagtggacagtgaagatt

SEQ ID NO: 205246 - DNA, 25 bp, SARS Virus
tgttgacagtgggcagtgaagattc

SEQ ID NO: 205247 - DNA, 25 bp, SARS Virus
gttgacagtggagagtgaagattca

SEQ ID NO: 205248 - DNA, 25 bp, SARS Virus
ttgacagtggacggtgaagattcag

SEQ ID NO: 205249 - DNA, 25 bp, SARS Virus
tgacagtggacagtgaagattcagt

SEQ ID NO: 205250 - DNA, 25 bp, SARS Virus
gacagtggacagggaagattcagtc

SEQ ID NO: 205251 - DNA, 25 bp, SARS Virus
acagtggacagtgaagattcagtct

SEQ ID NO: 205252 - DNA, 25 bp, SARS Virus
cagtggacagtggagattcagtctc

SEQ ID NO: 205253 - DNA, 25 bp, SARS Virus
agtggacagtgaggattcagtctca

SEQ ID NO: 205254 - DNA, 25 bp, SARS Virus
gtggacagtgaagattcagtctcac

SEQ ID NO: 205255 - DNA, 25 bp, SARS Virus
tggacagtgaaggttcagtctcact

SEQ ID NO: 205256 - DNA, 25 bp, SARS Virus
ggacagtgaagagtcagtctcacta

SEQ ID NO: 205257 - DNA, 25 bp, SARS Virus
gacagtgaagatgcagtctcactac

SEQ ID NO: 205258 - DNA, 25 bp, SARS Virus
acagtgaagattgagtctcactaca

SEQ ID NO: 205259 - DNA, 25 bp, SARS Virus
cagtgaagattcggtctcactacac

SEQ ID NO: 205260 - DNA, 25 bp, SARS Virus
agtgaagattcagtctcactacact

SEQ ID NO: 205261 - DNA, 25 bp, SARS Virus
gtgaagattcaggctcactacactt

SEQ ID NO: 205262 - DNA, 25 bp, SARS Virus
tgaagattcagtgtcactacacttt

SEQ ID NO: 205263 - DNA, 25 bp, SARS Virus
gaagattcagtcgcactacactttc

SEQ ID NO: 205264 - DNA, 25 bp, SARS Virus
aagattcagtctgactacactttca

SEQ ID NO: 205265 - DNA, 25 bp, SARS Virus
agattcagtctcgctacactttcaa

SEQ ID NO: 205266 - DNA, 25 bp, SARS Virus
gattcagtctcagtacactttcaaa

SEQ ID NO: 205267 - DNA, 25 bp, SARS Virus
attcagtctcacgacactttcaaac

SEQ ID NO: 205268 - DNA, 25 bp, SARS Virus
ttcagtctcactgcactttcaaact

SEQ ID NO: 205269 - DNA, 25 bp, SARS Virus
tcagtctcactagactttcaaactc

SEQ ID NO: 205270 - DNA, 25 bp, SARS Virus
cagtctcactacgctttcaaactct

SEQ ID NO: 205271 - DNA, 25 bp, SARS Virus
agtctcactacagtttcaaactctg

SEQ ID NO: 205272 - DNA, 25 bp, SARS Virus
gtctcactacacgttcaaactctgt

SEQ ID NO: 205273 - DNA, 25 bp, SARS Virus
tctcactacactgtcaaactctgta

SEQ ID NO: 205274 - DNA, 25 bp, SARS Virus
ctcactacacttgcaaactctgtaa

SEQ ID NO: 205275 - DNA, 25 bp, SARS Virus
tcactacactttgaaactctgtaag

SEQ ID NO: 205276 - DNA, 25 bp, SARS Virus
cactacactttcgaactctgtaagt

SEQ ID NO: 205277 - DNA, 25 bp, SARS Virus
actacactttcagactctgtaagtt

SEQ ID NO: 205278 - DNA, 25 bp, SARS Virus
ctacactttcaagctctgtaagtta

SEQ ID NO: 205279 - DNA, 25 bp, SARS Virus
tacactttcaaagtctgtaagttat

SEQ ID NO: 205280 - DNA, 25 bp, SARS Virus
acactttcaaacgctgtaagttatt

SEQ ID NO: 205281 - DNA, 25 bp, SARS Virus
cactttcaaactgtgtaagttattg

SEQ ID NO: 205282 - DNA, 25 bp, SARS Virus
actttcaaactcggtaagttattgt

SEQ ID NO: 205283 - DNA, 25 bp, SARS Virus
ctttcaaactctgtaagttattgta

SEQ ID NO: 205284 - DNA, 25 bp, SARS Virus
tttcaaactctggaagttattgtag

SEQ ID NO: 205285 - DNA, 25 bp, SARS Virus
ttcaaactctgtgagttattgtagg

SEQ ID NO: 205286 - DNA, 25 bp, SARS Virus
tcaaactctgtaggttattgtagga

SEQ ID NO: 205287 - DNA, 25 bp, SARS Virus
caaactctgtaagttattgtaggaa

SEQ ID NO: 205288 - DNA, 25 bp, SARS Virus
aaactctgtaaggtattgtaggaaa

SEQ ID NO: 205289 - DNA, 25 bp, SARS Virus
aactctgtaagtgattgtaggaaac

SEQ ID NO: 205290 - DNA, 25 bp, SARS Virus
actctgtaagttgttgtaggaaaca

SEQ ID NO: 205291 - DNA, 25 bp, SARS Virus
ctctgtaagttagtgtaggaaacac

SEQ ID NO: 205292 - DNA, 25 bp, SARS Virus
tctgtaagttatggtaggaaacaca

SEQ ID NO: 205293 - DNA, 25 bp, SARS Virus
ctgtaagttattgtaggaaacacag

SEQ ID NO: 205294 - DNA, 25 bp, SARS Virus
tgtaagttattggaggaaacacagt

SEQ ID NO: 205295 - DNA, 25 bp, SARS Virus
gtaagttattgtgggaaacacagtt

SEQ ID NO: 205296 - DNA, 25 bp, SARS Virus
taagttattgtaggaaacacagttg

SEQ ID NO: 205297 - DNA, 25 bp, SARS Virus
aagttattgtaggaaacacagttgt

SEQ ID NO: 205298 - DNA, 25 bp, SARS Virus
agttattgtagggaacacagttgta

SEQ ID NO: 205299 - DNA, 25 bp, SARS Virus
gttattgtaggagacacagttgtag

SEQ ID NO: 205300 - DNA, 25 bp, SARS Virus
ttattgtaggaagcacagttgtagc

SEQ ID NO: 205301 - DNA, 25 bp, SARS Virus
tattgtaggaaagacagttgtagcc

SEQ ID NO: 205302 - DNA, 25 bp, SARS Virus
attgtaggaaacgcagttgtagcca

SEQ ID NO: 205303 - DNA, 25 bp, SARS Virus
ttgtaggaaacagagttgtagccat

SEQ ID NO: 205304 - DNA, 25 bp, SARS Virus
tgtaggaaacacggttgtagccata

SEQ ID NO: 205305 - DNA, 25 bp, SARS Virus
gtaggaaacacagttgtagccatag

SEQ ID NO: 205306 - DNA, 25 bp, SARS Virus
taggaaacacaggtgtagccatagt

SEQ ID NO: 205307 - DNA, 25 bp, SARS Virus
aggaaacacagtggtagccatagtt

SEQ ID NO: 205308 - DNA, 25 bp, SARS Virus
ggaaacacagttgtagccatagttg

SEQ ID NO: 205309 - DNA, 25 bp, SARS Virus
gaaacacagttggagccatagttgt

SEQ ID NO: 205310 - DNA, 25 bp, SARS Virus
aaacacagttgtggccatagttgtt

SEQ ID NO: 205311 - DNA, 25 bp, SARS Virus
aacacagttgtagccatagttgttg

SEQ ID NO: 205312 - DNA, 25 bp, SARS Virus
acacagttgtaggcatagttgttgt

SEQ ID NO: 205313 - DNA, 25 bp, SARS Virus
cacagttgtagcgatagttgttgtg

SEQ ID NO: 205314 - DNA, 25 bp, SARS Virus
acagttgtagccgtagttgttgtgg

SEQ ID NO: 205315 - DNA, 25 bp, SARS Virus
cagttgtagccagagttgttgtgga

SEQ ID NO: 205316 - DNA, 25 bp, SARS Virus
agttgtagccatggttgttgtggaa

SEQ ID NO: 205317 - DNA, 25 bp, SARS Virus
gttgtagccatagttgttgtggaac

SEQ ID NO: 205318 - DNA, 25 bp, SARS Virus
ttgtagccataggtgttgtggaaca

SEQ ID NO: 205319 - DNA, 25 bp, SARS Virus
tgtagccatagtggttgtggaacag

SEQ ID NO: 205320 - DNA, 25 bp, SARS Virus
gtagccatagttgttgtggaacagc

SEQ ID NO: 205321 - DNA, 25 bp, SARS Virus
tagccatagttggtgtggaacagcc

SEQ ID NO: 205322 - DNA, 25 bp, SARS Virus
agccatagttgtggtggaacagccc

SEQ ID NO: 205323 - DNA, 25 bp, SARS Virus
gccatagttgttgtggaacagcccg

SEQ ID NO: 205324 - DNA, 25 bp, SARS Virus
ccatagttgttggggaacagcccgt

SEQ ID NO: 205325 - DNA, 25 bp, SARS Virus
catagttgttgtggaacagcccgtc

SEQ ID NO: 205326 - DNA, 25 bp, SARS Virus
atagttgttgtggaacagcccgtcg

SEQ ID NO: 205327 - DNA, 25 bp, SARS Virus
tagttgttgtgggacagcccgtcga

SEQ ID NO: 205328 - DNA, 25 bp, SARS Virus
agttgttgtggagcagcccgtcgac

SEQ ID NO: 205329 - DNA, 25 bp, SARS Virus
gttgttgtggaagagcccgtcgact

SEQ ID NO: 205330 - DNA, 25 bp, SARS Virus
ttgttgtggaacggcccgtcgactg

SEQ ID NO: 205331 - DNA, 25 bp, SARS Virus
tgttgtggaacagcccgtcgactgt

SEQ ID NO: 205332 - DNA, 25 bp, SARS Virus
gttgtggaacaggccgtcgactgtg

SEQ ID NO: 205333 - DNA, 25 bp, SARS Virus
ttgtggaacagcgcgtcgactgtgc

SEQ ID NO: 205334 - DNA, 25 bp, SARS Virus
tgtggaacagccggtcgactgtgct

SEQ ID NO: 205335 - DNA, 25 bp, SARS Virus
gtggaacagcccgtcgactgtgctt

SEQ ID NO: 205336 - DNA, 25 bp, SARS Virus
tggaacagcccggcgactgtgctta

SEQ ID NO: 205337 - DNA, 25 bp, SARS Virus
ggaacagcccgtggactgtgcttac

SEQ ID NO: 205338 - DNA, 25 bp, SARS Virus
gaacagcccgtcgactgtgcttaca

SEQ ID NO: 205339 - DNA, 25 bp, SARS Virus
aacagcccgtcggctgtgcttacat

SEQ ID NO: 205340 - DNA, 25 bp, SARS Virus
acagcccgtcgagtgtgcttacatc

SEQ ID NO: 205341 - DNA, 25 bp, SARS Virus
cagcccgtcgacggtgcttacatct

SEQ ID NO: 205342 - DNA, 25 bp, SARS Virus
agcccgtcgactgtgcttacatctt

SEQ ID NO: 205343 - DNA, 25 bp, SARS Virus
gcccgtcgactgggcttacatcttt

SEQ ID NO: 205344 - DNA, 25 bp, SARS Virus
cccgtcgactgtgcttacatctttc

SEQ ID NO: 205345 - DNA, 25 bp, SARS Virus
ccgtcgactgtggttacatctttcc

SEQ ID NO: 205346 - DNA, 25 bp, SARS Virus
cgtcgactgtgcgtacatctttcct

SEQ ID NO: 205347 - DNA, 25 bp, SARS Virus
gtcgactgtgctgacatctttcctg

SEQ ID NO: 205348 - DNA, 25 bp, SARS Virus
tcgactgtgcttgcatctttcctgt

SEQ ID NO: 205349 - DNA, 25 bp, SARS Virus
cgactgtgcttagatctttcctgtg

SEQ ID NO: 205350 - DNA, 25 bp, SARS Virus
gactgtgcttacgtctttcctgtgg

SEQ ID NO: 205351 - DNA, 25 bp, SARS Virus
actgtgcttacagctttcctgtggt

SEQ ID NO: 205352 - DNA, 25 bp, SARS Virus
ctgtgcttacatgtttcctgtggta

SEQ ID NO: 205353 - DNA, 25 bp, SARS Virus
tgtgcttacatcgttcctgtggtag

SEQ ID NO: 205354 - DNA, 25 bp, SARS Virus
gtgcttacatctgtcctgtggtaga

SEQ ID NO: 205355 - DNA, 25 bp, SARS Virus
tgcttacatcttgcctgtggtagat

SEQ ID NO: 205356 - DNA, 25 bp, SARS Virus
gcttacatctttgctgtggtagatt

SEQ ID NO: 205357 - DNA, 25 bp, SARS Virus
cttacatctttcgtgtggtagattt

SEQ ID NO: 205358 - DNA, 25 bp, SARS Virus
ttacatctttccggtggtagatttc

SEQ ID NO: 205359 - DNA, 25 bp, SARS Virus
tacatctttcctgtggtagatttcg

SEQ ID NO: 205360 - DNA, 25 bp, SARS Virus
acatctttcctggggtagatttcga

SEQ ID NO: 205361 - DNA, 25 bp, SARS Virus
catctttcctgtggtagatttcgat

SEQ ID NO: 205362 - DNA, 25 bp, SARS Virus
atctttcctgtggtagatttcgatg

SEQ ID NO: 205363 - DNA, 25 bp, SARS Virus
tctttcctgtgggagatttcgatgt

SEQ ID NO: 205364 - DNA, 25 bp, SARS Virus
ctttcctgtggtggatttcgatgtg

SEQ ID NO: 205365 - DNA, 25 bp, SARS Virus
tttcctgtggtagatttcgatgtgg

SEQ ID NO: 205366 - DNA, 25 bp, SARS Virus
ttcctgtggtaggtttcgatgtggg

SEQ ID NO: 205367 - DNA, 25 bp, SARS Virus
tcctgtggtagagttcgatgtggga

SEQ ID NO: 205368 - DNA, 25 bp, SARS Virus
cctgtggtagatgtcgatgtgggaa

SEQ ID NO: 205369 - DNA, 25 bp, SARS Virus
ctgtggtagattgcgatgtgggaaa

SEQ ID NO: 205370 - DNA, 25 bp, SARS Virus
tgtggtagatttggatgtgggaaac

SEQ ID NO: 205371 - DNA, 25 bp, SARS Virus
gtggtagatttcgatgtgggaaacg

SEQ ID NO: 205372 - DNA, 25 bp, SARS Virus
tggtagatttcggtgtgggaaacga

SEQ ID NO: 205373 - DNA, 25 bp, SARS Virus
ggtagatttcgaggtgggaaacgat

SEQ ID NO: 205374 - DNA, 25 bp, SARS Virus
gtagatttcgatgtgggaaacgatt

SEQ ID NO: 205375 - DNA, 25 bp, SARS Virus
tagatttcgatgggggaaacgattg

SEQ ID NO: 205376 - DNA, 25 bp, SARS Virus
agatttcgatgtgggaaacgattga

SEQ ID NO: 205377 - DNA, 25 bp, SARS Virus
gatttcgatgtgggaaacgattgag

SEQ ID NO: 205378 - DNA, 25 bp, SARS Virus
atttcgatgtgggaaacgattgagc

SEQ ID NO: 205379 - DNA, 25 bp, SARS Virus
tttcgatgtggggaacgattgagcg

SEQ ID NO: 205380 - DNA, 25 bp, SARS Virus
ttcgatgtgggagacgattgagcga

SEQ ID NO: 205381 - DNA, 25 bp, SARS Virus
tcgatgtgggaagcgattgagcgac

SEQ ID NO: 205382 - DNA, 25 bp, SARS Virus
cgatgtgggaaaggattgagcgaca

SEQ ID NO: 205383 - DNA, 25 bp, SARS Virus
gatgtgggaaacgattgagcgacac

SEQ ID NO: 205384 - DNA, 25 bp, SARS Virus
atgtgggaaacggttgagcgacact

SEQ ID NO: 205385 - DNA, 25 bp, SARS Virus
tgtgggaaacgagtgagcgacactc

SEQ ID NO: 205386 - DNA, 25 bp, SARS Virus
gtgggaaacgatggagcgacactcg

SEQ ID NO: 205387 - DNA, 25 bp, SARS Virus
tgggaaacgattgagcgacactcga

SEQ ID NO: 205388 - DNA, 25 bp, SARS Virus
gggaaacgattgggcgacactcgac

SEQ ID NO: 205389 - DNA, 25 bp, SARS Virus
ggaaacgattgagcgacactcgaca

SEQ ID NO: 205390 - DNA, 25 bp, SARS Virus
gaaacgattgagggacactcgacat

SEQ ID NO: 205391 - DNA, 25 bp, SARS Virus
aaacgattgagcgacactcgacatc

SEQ ID NO: 205392 - DNA, 25 bp, SARS Virus
aacgattgagcggcactcgacatcg

SEQ ID NO: 205393 - DNA, 25 bp, SARS Virus
acgattgagcgagactcgacatcgt

SEQ ID NO: 205394 - DNA, 25 bp, SARS Virus
cgattgagcgacgctcgacatcgtt

SEQ ID NO: 205395 - DNA, 25 bp, SARS Virus
gattgagcgacagtcgacatcgttg

SEQ ID NO: 205396 - DNA, 25 bp, SARS Virus
attgagcgacacgcgacatcgttgt

SEQ ID NO: 205397 - DNA, 25 bp, SARS Virus
ttgagcgacactggacatcgttgtt

SEQ ID NO: 205398 - DNA, 25 bp, SARS Virus
tgagcgacactcgacatcgttgttc

SEQ ID NO: 205399 - DNA, 25 bp, SARS Virus
gagcgacactcggcatcgttgttca

SEQ ID NO: 205400 - DNA, 25 bp, SARS Virus
agcgacactcgagatcgttgttcac

SEQ ID NO: 205401 - DNA, 25 bp, SARS Virus
gcgacactcgacgtcgttgttcacg

SEQ ID NO: 205402 - DNA, 25 bp, SARS Virus
cgacactcgacagcgttgttcacgg

SEQ ID NO: 205403 - DNA, 25 bp, SARS Virus
gacactcgacatggttgttcacgga

SEQ ID NO: 205404 - DNA, 25 bp, SARS Virus
acactcgacatcgttgttcacggaa

SEQ ID NO: 205405 - DNA, 25 bp, SARS Virus
cactcgacatcggtgttcacggaat

SEQ ID NO: 205406 - DNA, 25 bp, SARS Virus
actcgacatcgtggttcacggaatt

SEQ ID NO: 205407 - DNA, 25 bp, SARS Virus
ctcgacatcgttgttcacggaattc

SEQ ID NO: 205408 - DNA, 25 bp, SARS Virus
tcgacatcgttggtcacggaattca

SEQ ID NO: 205409 - DNA, 25 bp, SARS Virus
cgacatcgttgtgcacggaattcaa

SEQ ID NO: 205410 - DNA, 25 bp, SARS Virus
gacatcgttgttgacggaattcaaa

SEQ ID NO: 205411 - DNA, 25 bp, SARS Virus
acatcgttgttcgcggaattcaaaa

SEQ ID NO: 205412 - DNA, 25 bp, SARS Virus
catcgttgttcagggaattcaaaaa

SEQ ID NO: 205413 - DNA, 25 bp, SARS Virus
atcgttgttcacggaattcaaaaag

SEQ ID NO: 205414 - DNA, 25 bp, SARS Virus
tcgttgttcacggaattcaaaaagg

SEQ ID NO: 205415 - DNA, 25 bp, SARS Virus
cgttgttcacgggattcaaaaaggt

SEQ ID NO: 205416 - DNA, 25 bp, SARS Virus
gttgttcacggagttcaaaaaggta

SEQ ID NO: 205417 - DNA, 25 bp, SARS Virus
ttgttcacggaagtcaaaaaggtat

SEQ ID NO: 205418 - DNA, 25 bp, SARS Virus
tgttcacggaatgcaaaaaggtatc

SEQ ID NO: 205419 - DNA, 25 bp, SARS Virus
gttcacggaattgaaaaaggtatcc

SEQ ID NO: 205420 - DNA, 25 bp, SARS Virus
ttcacggaattcgaaaaggtatcct

SEQ ID NO: 205421 - DNA, 25 bp, SARS Virus
tcacggaattcagaaaggtatcctt

SEQ ID NO: 205422 - DNA, 25 bp, SARS Virus
cacggaattcaagaaggtatccttg

SEQ ID NO: 205423 - DNA, 25 bp, SARS Virus
acggaattcaaagaggtatccttgt

SEQ ID NO: 205424 - DNA, 25 bp, SARS Virus
cggaattcaaaagggtatccttgtg

SEQ ID NO: 205425 - DNA, 25 bp, SARS Virus
ggaattcaaaaaggtatccttgtga

SEQ ID NO: 205426 - DNA, 25 bp, SARS Virus
gaattcaaaaaggtatccttgtgat

SEQ ID NO: 205427 - DNA, 25 bp, SARS Virus
aattcaaaaagggatccttgtgatt

SEQ ID NO: 205428 - DNA, 25 bp, SARS Virus
attcaaaaaggtgtccttgtgattt

SEQ ID NO: 205429 - DNA, 25 bp, SARS Virus
ttcaaaaaggtagccttgtgatttt

SEQ ID NO: 205430 - DNA, 25 bp, SARS Virus
tcaaaaaggtatgcttgtgattttc

SEQ ID NO: 205431 - DNA, 25 bp, SARS Virus
caaaaaggtatcgttgtgattttca

SEQ ID NO: 205432 - DNA, 25 bp, SARS Virus
aaaaaggtatccgtgtgattttcaa

SEQ ID NO: 205433 - DNA, 25 bp, SARS Virus
aaaaggtatcctggtgattttcaac

SEQ ID NO: 205434 - DNA, 25 bp, SARS Virus
aaaggtatccttgtgattttcaacg

SEQ ID NO: 205435 - DNA, 25 bp, SARS Virus
aaggtatccttgggattttcaacga

SEQ ID NO: 205436 - DNA, 25 bp, SARS Virus
aggtatccttgtgattttcaacgac

SEQ ID NO: 205437 - DNA, 25 bp, SARS Virus
ggtatccttgtggttttcaacgact

SEQ ID NO: 205438 - DNA, 25 bp, SARS Virus
gtatccttgtgagtttcaacgactt

SEQ ID NO: 205439 - DNA, 25 bp, SARS Virus
tatccttgtgatgttcaacgacttt

SEQ ID NO: 205440 - DNA, 25 bp, SARS Virus
atccttgtgattgtcaacgactttt

SEQ ID NO: 205441 - DNA, 25 bp, SARS Virus
tccttgtgatttgcaacgacttttc

SEQ ID NO: 205442 - DNA, 25 bp, SARS Virus
ccttgtgattttgaacgacttttcc

SEQ ID NO: 205443 - DNA, 25 bp, SARS Virus
cttgtgattttcgacgacttttcca

SEQ ID NO: 205444 - DNA, 25 bp, SARS Virus
ttgtgattttcagcgacttttccac

SEQ ID NO: 205445 - DNA, 25 bp, SARS Virus
tgtgattttcaaggacttttccaca

SEQ ID NO: 205446 - DNA, 25 bp, SARS Virus
gtgattttcaacgacttttccacag

SEQ ID NO: 205447 - DNA, 25 bp, SARS Virus
tgattttcaacggcttttccacagc

SEQ ID NO: 205448 - DNA, 25 bp, SARS Virus
gattttcaacgagttttccacagct

SEQ ID NO: 205449 - DNA, 25 bp, SARS Virus
attttcaacgacgtttccacagctg

SEQ ID NO: 205450 - DNA, 25 bp, SARS Virus
ttttcaacgactgttccacagctgt

SEQ ID NO: 205451 - DNA, 25 bp, SARS Virus
tttcaacgacttgtccacagctgta

SEQ ID NO: 205452 - DNA, 25 bp, SARS Virus
ttcaacgactttgccacagctgtat

SEQ ID NO: 205453 - DNA, 25 bp, SARS Virus
tcaacgacttttgcacagctgtatt

SEQ ID NO: 205454 - DNA, 25 bp, SARS Virus
caacgacttttcgacagctgtattc

SEQ ID NO: 205455 - DNA, 25 bp, SARS Virus
aacgacttttccgcagctgtattcg

SEQ ID NO: 205456 - DNA, 25 bp, SARS Virus
acgacttttccagagctgtattcgt

SEQ ID NO: 205457 - DNA, 25 bp, SARS Virus
cgacttttccacggctgtattcgta

SEQ ID NO: 205458 - DNA, 25 bp, SARS Virus
gacttttccacagctgtattcgtag

SEQ ID NO: 205459 - DNA, 25 bp, SARS Virus
acttttccacaggtgtattcgtagt

SEQ ID NO: 205460 - DNA, 25 bp, SARS Virus
cttttccacagcggtattcgtagtt

SEQ ID NO: 205461 - DNA, 25 bp, SARS Virus
ttttccacagctgtattcgtagttt

SEQ ID NO: 205462 - DNA, 25 bp, SARS Virus
tttccacagctggattcgtagtttg

SEQ ID NO: 205463 - DNA, 25 bp, SARS Virus
ttccacagctgtgttcgtagtttgt

SEQ ID NO: 205464 - DNA, 25 bp, SARS Virus
tccacagctgtagtcgtagtttgta

SEQ ID NO: 205465 - DNA, 25 bp, SARS Virus
ccacagctgtatgcgtagtttgtag

SEQ ID NO: 205466 - DNA, 25 bp, SARS Virus
cacagctgtattggtagtttgtaga

SEQ ID NO: 205467 - DNA, 25 bp, SARS Virus
acagctgtattcgtagtttgtagaa

SEQ ID NO: 205468 - DNA, 25 bp, SARS Virus
cagctgtattcggagtttgtagaat

SEQ ID NO: 205469 - DNA, 25 bp, SARS Virus
agctgtattcgtggtttgtagaatt

SEQ ID NO: 205470 - DNA, 25 bp, SARS Virus
gctgtattcgtagtttgtagaattg

SEQ ID NO: 205471 - DNA, 25 bp, SARS Virus
ctgtattcgtaggttgtagaattgc

SEQ ID NO: 205472 - DNA, 25 bp, SARS Virus
tgtattcgtagtgtgtagaattgcc

SEQ ID NO: 205473 - DNA, 25 bp, SARS Virus
gtattcgtagttggtagaattgcct

SEQ ID NO: 205474 - DNA, 25 bp, SARS Virus
tattcgtagtttgtagaattgcctt

SEQ ID NO: 205475 - DNA, 25 bp, SARS Virus
attcgtagtttggagaattgccttt

SEQ ID NO: 205476 - DNA, 25 bp, SARS Virus
ttcgtagtttgtggaattgcctttg

SEQ ID NO: 205477 - DNA, 25 bp, SARS Virus
tcgtagtttgtagaattgcctttga

SEQ ID NO: 205478 - DNA, 25 bp, SARS Virus
cgtagtttgtaggattgcctttgaa

SEQ ID NO: 205479 - DNA, 25 bp, SARS Virus
gtagtttgtagagttgcctttgaag

SEQ ID NO: 205480 - DNA, 25 bp, SARS Virus
tagtttgtagaagtgcctttgaagt

SEQ ID NO: 205481 - DNA, 25 bp, SARS Virus
aatactgtaacttttggacagatca

SEQ ID NO: 205482 - DNA, 25 bp, SARS Virus
atactgtaactgttggacagatcaa

SEQ ID NO: 205483 - DNA, 25 bp, SARS Virus
tactgtaactgttggacagatcaac

SEQ ID NO: 205484 - DNA, 25 bp, SARS Virus
actgtaactgtttgacagatcaaca

SEQ ID NO: 205485 - DNA, 25 bp, SARS Virus
ctgtaactgttgtacagatcaacat

SEQ ID NO: 205486 - DNA, 25 bp, SARS Virus
tgtaactgttggtcagatcaacatc

SEQ ID NO: 205487 - DNA, 25 bp, SARS Virus
gtaactgttggatagatcaacatcg

SEQ ID NO: 205488 - DNA, 25 bp, SARS Virus
taactgttggactgatcaacatcgt

SEQ ID NO: 205489 - DNA, 25 bp, SARS Virus
aactgttggacatatcaacatcgtg

SEQ ID NO: 205490 - DNA, 25 bp, SARS Virus
actgttggacagttcaacatcgtgt

SEQ ID NO: 205491 - DNA, 25 bp, SARS Virus
ctgttggacagatcaacatcgtgtt

SEQ ID NO: 205492 - DNA, 25 bp, SARS Virus
tgttggacagattaacatcgtgttc

SEQ ID NO: 205493 - DNA, 25 bp, SARS Virus
gttggacagatctacatcgtgttca

SEQ ID NO: 205494 - DNA, 25 bp, SARS Virus
ttggacagatcatcatcgtgttcaa

SEQ ID NO: 205495 - DNA, 25 bp, SARS Virus
tggacagatcaatatcgtgttcaat

SEQ ID NO: 205496 - DNA, 25 bp, SARS Virus
ggacagatcaacttcgtgttcaatc

SEQ ID NO: 205497 - DNA, 25 bp, SARS Virus
gacagatcaacatcgtgttcaatca

SEQ ID NO: 205498 - DNA, 25 bp, SARS Virus
acagatcaacattgtgttcaatcag

SEQ ID NO: 205499 - DNA, 25 bp, SARS Virus
cagatcaacatcttgttcaatcaga

SEQ ID NO: 205500 - DNA, 25 bp, SARS Virus
agatcaacatcgtgttcaatcagat

SEQ ID NO: 205501 - DNA, 25 bp, SARS Virus
gatcaacatcgttttcaatcagatt

SEQ ID NO: 205502 - DNA, 25 bp, SARS Virus
atcaacatcgtgttcaatcagattt

SEQ ID NO: 205503 - DNA, 25 bp, SARS Virus
tcaacatcgtgttcaatcagatttt

SEQ ID NO: 205504 - DNA, 25 bp, SARS Virus
caacatcgtgtttaatcagattttc

SEQ ID NO: 205505 - DNA, 25 bp, SARS Virus
aacatcgtgttctatcagattttcc

SEQ ID NO: 205506 - DNA, 25 bp, SARS Virus
acatcgtgttcattcagattttcca

SEQ ID NO: 205507 - DNA, 25 bp, SARS Virus
catcgtgttcaatcagattttccat

SEQ ID NO: 205508 - DNA, 25 bp, SARS Virus
atcgtgttcaattagattttccata

SEQ ID NO: 205509 - DNA, 25 bp, SARS Virus
tcgtgttcaatctgattttccatac

SEQ ID NO: 205510 - DNA, 25 bp, SARS Virus
cgtgttcaatcatattttccataca

SEQ ID NO: 205511 - DNA, 25 bp, SARS Virus
gtgttcaatcagtttttccatacaa

SEQ ID NO: 205512 - DNA, 25 bp, SARS Virus
tgttcaatcagattttccatacaac

SEQ ID NO: 205513 - DNA, 25 bp, SARS Virus
gttcaatcagattttccatacaaca

SEQ ID NO: 205514 - DNA, 25 bp, SARS Virus
ttcaatcagattttccatacaacaa

SEQ ID NO: 205515 - DNA, 25 bp, SARS Virus
tcaatcagattttccatacaacaag

SEQ ID NO: 205516 - DNA, 25 bp, SARS Virus
caatcagatttttcatacaacaaga

SEQ ID NO: 205517 - DNA, 25 bp, SARS Virus
aatcagattttctatacaacaagaa

SEQ ID NO: 205518 - DNA, 25 bp, SARS Virus
atcagattttccttacaacaagaag

SEQ ID NO: 205519 - DNA, 25 bp, SARS Virus
tcagattttccatacaacaagaaga

SEQ ID NO: 205520 - DNA, 25 bp, SARS Virus
cagattttccattcaacaagaagaa

SEQ ID NO: 205521 - DNA, 25 bp, SARS Virus
agattttccatataacaagaagaac

SEQ ID NO: 205522 - DNA, 25 bp, SARS Virus
gattttccatactacaagaagaacc

SEQ ID NO: 205523 - DNA, 25 bp, SARS Virus
attttccatacatcaagaagaaccg

SEQ ID NO: 205524 - DNA, 25 bp, SARS Virus
ttttccatacaataagaagaaccgt

SEQ ID NO: 205525 - DNA, 25 bp, SARS Virus
tttccatacaactagaagaaccgtc

SEQ ID NO: 205526 - DNA, 25 bp, SARS Virus
ttccatacaacatgaagaaccgtcg

SEQ ID NO: 205527 - DNA, 25 bp, SARS Virus
tccatacaacaataagaaccgtcgt

SEQ ID NO: 205528 - DNA, 25 bp, SARS Virus
ccatacaacaagtagaaccgtcgtg

SEQ ID NO: 205529 - DNA, 25 bp, SARS Virus
catacaacaagatgaaccgtcgtga

SEQ ID NO: 205530 - DNA, 25 bp, SARS Virus
atacaacaagaataaccgtcgtgat

SEQ ID NO: 205531 - DNA, 25 bp, SARS Virus
tacaacaagaagtaccgtcgtgatg

SEQ ID NO: 205532 - DNA, 25 bp, SARS Virus
acaacaagaagatccgtcgtgatgc

SEQ ID NO: 205533 - DNA, 25 bp, SARS Virus
caacaagaagaatcgtcgtgatgct

SEQ ID NO: 205534 - DNA, 25 bp, SARS Virus
aacaagaagaactgtcgtgatgctt

SEQ ID NO: 205535 - DNA, 25 bp, SARS Virus
acaagaagaaccttcgtgatgctta

SEQ ID NO: 205536 - DNA, 25 bp, SARS Virus
caagaagaaccgtcgtgatgcttaa

SEQ ID NO: 205537 - DNA, 25 bp, SARS Virus
aagaagaaccgttgtgatgcttaaa

SEQ ID NO: 205538 - DNA, 25 bp, SARS Virus
agaagaaccgtcttgatgcttaaac

SEQ ID NO: 205539 - DNA, 25 bp, SARS Virus
gaagaaccgtcgtgatgcttaaaca

SEQ ID NO: 205540 - DNA, 25 bp, SARS Virus
aagaaccgtcgttatgcttaaacaa

SEQ ID NO: 205541 - DNA, 25 bp, SARS Virus
agaaccgtcgtgttgcttaaacaaa

SEQ ID NO: 205542 - DNA, 25 bp, SARS Virus
gaaccgtcgtgatgcttaaacaaat

SEQ ID NO: 205543 - DNA, 25 bp, SARS Virus
aaccgtcgtgattcttaaacaaatg

SEQ ID NO: 205544 - DNA, 25 bp, SARS Virus
accgtcgtgatgtttaaacaaatgc

SEQ ID NO: 205545 - DNA, 25 bp, SARS Virus
ccgtcgtgatgcttaaacaaatgcg

SEQ ID NO: 205546 - DNA, 25 bp, SARS Virus
cgtcgtgatgcttaaacaaatgcgt

SEQ ID NO: 205547 - DNA, 25 bp, SARS Virus
gtcgtgatgctttaacaaatgcgtc

SEQ ID NO: 205548 - DNA, 25 bp, SARS Virus
tcgtgatgcttatacaaatgcgtcg

SEQ ID NO: 205549 - DNA, 25 bp, SARS Virus
cgtgatgcttaatcaaatgcgtcga

SEQ ID NO: 205550 - DNA, 25 bp, SARS Virus
gtgatgcttaaataaatgcgtcgac

SEQ ID NO: 205551 - DNA, 25 bp, SARS Virus
tgatgcttaaactaatgcgtcgaca

SEQ ID NO: 205552 - DNA, 25 bp, SARS Virus
gatgcttaaacatatgcgtcgacaa

SEQ ID NO: 205553 - DNA, 25 bp, SARS Virus
atgcttaaacaattgcgtcgacaag

SEQ ID NO: 205554 - DNA, 25 bp, SARS Virus
tgcttaaacaaatgcgtcgacaagt

SEQ ID NO: 205555 - DNA, 25 bp, SARS Virus
gcttaaacaaattcgtcgacaagtc

SEQ ID NO: 205556 - DNA, 25 bp, SARS Virus
cttaaacaaatgtgtcgacaagtct

SEQ ID NO: 205557 - DNA, 25 bp, SARS Virus
ttaaacaaatgcttcgacaagtcta

SEQ ID NO: 205558 - DNA, 25 bp, SARS Virus
taaacaaatgcgtcgacaagtctat

SEQ ID NO: 205559 - DNA, 25 bp, SARS Virus
aaacaaatgcgttgacaagtctatt

SEQ ID NO: 205560 - DNA, 25 bp, SARS Virus
aacaaatgcgtctacaagtctattt

SEQ ID NO: 205561 - DNA, 25 bp, SARS Virus
acaaatgcgtcgtcaagtctatttc

SEQ ID NO: 205562 - DNA, 25 bp, SARS Virus
caaatgcgtcgataagtctatttct

SEQ ID NO: 205563 - DNA, 25 bp, SARS Virus
aaatgcgtcgactagtctatttctg

SEQ ID NO: 205564 - DNA, 25 bp, SARS Virus
aatgcgtcgacatgtctatttctgt

SEQ ID NO: 205565 - DNA, 25 bp, SARS Virus
atgcgtcgacaattctatttctgta

SEQ ID NO: 205566 - DNA, 25 bp, SARS Virus
tgcgtcgacaagtctatttctgtac

SEQ ID NO: 205567 - DNA, 25 bp, SARS Virus
gcgtcgacaagtttatttctgtaca

SEQ ID NO: 205568 - DNA, 25 bp, SARS Virus
cgtcgacaagtctatttctgtacat

SEQ ID NO: 205569 - DNA, 25 bp, SARS Virus
gtcgacaagtctttttctgtacatc

SEQ ID NO: 205570 - DNA, 25 bp, SARS Virus
tcgacaagtctatttctgtacatca

SEQ ID NO: 205571 - DNA, 25 bp, SARS Virus
cgacaagtctatttctgtacatcag

SEQ ID NO: 205572 - DNA, 25 bp, SARS Virus
gacaagtctatttctgtacatcaga

SEQ ID NO: 205573 - DNA, 25 bp, SARS Virus
acaagtctatttttgtacatcagaa

SEQ ID NO: 205574 - DNA, 25 bp, SARS Virus
caagtctatttctgtacatcagaaa

SEQ ID NO: 205575 - DNA, 25 bp, SARS Virus
aagtctatttctttacatcagaaaa

SEQ ID NO: 205576 - DNA, 25 bp, SARS Virus
agtctatttctgtacatcagaaaat

SEQ ID NO: 205577 - DNA, 25 bp, SARS Virus
gtctatttctgttcatcagaaaatg

SEQ ID NO: 205578 - DNA, 25 bp, SARS Virus
tctatttctgtatatcagaaaatgt

SEQ ID NO: 205579 - DNA, 25 bp, SARS Virus
ctatttctgtacttcagaaaatgta

SEQ ID NO: 205580 - DNA, 25 bp, SARS Virus
tatttctgtacatcagaaaatgtaa

SEQ ID NO: 205581 - DNA, 25 bp, SARS Virus
atttctgtacattagaaaatgtaag

SEQ ID NO: 205582 - DNA, 25 bp, SARS Virus
tttctgtacatctgaaaatgtaagg

SEQ ID NO: 205583 - DNA, 25 bp, SARS Virus
ttctgtacatcataaaatgtaaggt

SEQ ID NO: 205584 - DNA, 25 bp, SARS Virus
tctgtacatcagtaaatgtaaggtc

SEQ ID NO: 205585 - DNA, 25 bp, SARS Virus
ctgtacatcagataatgtaaggtct

SEQ ID NO: 205586 - DNA, 25 bp, SARS Virus
tgtacatcagaatatgtaaggtcta

SEQ ID NO: 205587 - DNA, 25 bp, SARS Virus
gtacatcagaaattgtaaggtctac

SEQ ID NO: 205588 - DNA, 25 bp, SARS Virus
tacatcagaaaatgtaaggtctact

SEQ ID NO: 205589 - DNA, 25 bp, SARS Virus
acatcagaaaatttaaggtctactc

SEQ ID NO: 205590 - DNA, 25 bp, SARS Virus
catcagaaaatgtaaggtctactca

SEQ ID NO: 205591 - DNA, 25 bp, SARS Virus
atcagaaaatgttaggtctactcac

SEQ ID NO: 205592 - DNA, 25 bp, SARS Virus
tcagaaaatgtatggtctactcact

SEQ ID NO: 205593 - DNA, 25 bp, SARS Virus
cagaaaatgtaatgtctactcactt

SEQ ID NO: 205594 - DNA, 25 bp, SARS Virus
agaaaatgtaagttctactcacttt

SEQ ID NO: 205595 - DNA, 25 bp, SARS Virus
gaaaatgtaaggtctactcactttg

SEQ ID NO: 205596 - DNA, 25 bp, SARS Virus
aaaatgtaaggtttactcactttgt

SEQ ID NO: 205597 - DNA, 25 bp, SARS Virus
aaatgtaaggtctactcactttgta

SEQ ID NO: 205598 - DNA, 25 bp, SARS Virus
aatgtaaggtcttctcactttgtaa

SEQ ID NO: 205599 - DNA, 25 bp, SARS Virus
atgtaaggtctattcactttgtaac

SEQ ID NO: 205600 - DNA, 25 bp, SARS Virus
tgtaaggtctactcactttgtaaca

SEQ ID NO: 205601 - DNA, 25 bp, SARS Virus
gtaaggtctacttactttgtaacac

SEQ ID NO: 205602 - DNA, 25 bp, SARS Virus
taaggtctactctctttgtaacact

SEQ ID NO: 205603 - DNA, 25 bp, SARS Virus
aaggtctactcattttgtaacactg

SEQ ID NO: 205604 - DNA, 25 bp, SARS Virus
aggtctactcactttgtaacactga

SEQ ID NO: 205605 - DNA, 25 bp, SARS Virus
ggtctactcactttgtaacactgaa

SEQ ID NO: 205606 - DNA, 25 bp, SARS Virus
gtctactcactttgtaacactgaaa

SEQ ID NO: 205607 - DNA, 25 bp, SARS Virus
tctactcactttttaacactgaaaa

SEQ ID NO: 205608 - DNA, 25 bp, SARS Virus
ctactcactttgtaacactgaaaaa

SEQ ID NO: 205609 - DNA, 25 bp, SARS Virus
tactcactttgttacactgaaaaac

SEQ ID NO: 205610 - DNA, 25 bp, SARS Virus
actcactttgtatcactgaaaaacg

SEQ ID NO: 205611 - DNA, 25 bp, SARS Virus
ctcactttgtaatactgaaaaacga

SEQ ID NO: 205612 - DNA, 25 bp, SARS Virus
tcactttgtaactctgaaaaacgat

SEQ ID NO: 205613 - DNA, 25 bp, SARS Virus
cactttgtaacattgaaaaacgatg

SEQ ID NO: 205614 - DNA, 25 bp, SARS Virus
actttgtaacactgaaaaacgatga

SEQ ID NO: 205615 - DNA, 25 bp, SARS Virus
ctttgtaacacttaaaaacgatgaa

SEQ ID NO: 205616 - DNA, 25 bp, SARS Virus
tttgtaacactgtaaaacgatgaac

SEQ ID NO: 205617 - DNA, 25 bp, SARS Virus
ttgtaacactgataaacgatgaacc

SEQ ID NO: 205618 - DNA, 25 bp, SARS Virus
tgtaacactgaataacgatgaaccc

SEQ ID NO: 205619 - DNA, 25 bp, SARS Virus
gtaacactgaaatacgatgaacccg

SEQ ID NO: 205620 - DNA, 25 bp, SARS Virus
taacactgaaaatcgatgaacccgt

SEQ ID NO: 205621 - DNA, 25 bp, SARS Virus
aacactgaaaaatgatgaacccgta

SEQ ID NO: 205622 - DNA, 25 bp, SARS Virus
acactgaaaaactatgaacccgtaa

SEQ ID NO: 205623 - DNA, 25 bp, SARS Virus
cactgaaaaacgttgaacccgtaac

SEQ ID NO: 205624 - DNA, 25 bp, SARS Virus
actgaaaaacgatgaacccgtaact

SEQ ID NO: 205625 - DNA, 25 bp, SARS Virus
ctgaaaaacgattaacccgtaacta

SEQ ID NO: 205626 - DNA, 25 bp, SARS Virus
tgaaaaacgatgtacccgtaactat

SEQ ID NO: 205627 - DNA, 25 bp, SARS Virus
gaaaaacgatgatcccgtaactata

SEQ ID NO: 205628 - DNA, 25 bp, SARS Virus
aaaaacgatgaatccgtaactatac

SEQ ID NO: 205629 - DNA, 25 bp, SARS Virus
aaaacgatgaactcgtaactatacg

SEQ ID NO: 205630 - DNA, 25 bp, SARS Virus
aaacgatgaacctgtaactatacgg

SEQ ID NO: 205631 - DNA, 25 bp, SARS Virus
aacgatgaacccttaactatacgga

SEQ ID NO: 205632 - DNA, 25 bp, SARS Virus
acgatgaacccgtaactatacggaa

SEQ ID NO: 205633 - DNA, 25 bp, SARS Virus
cgatgaacccgttactatacggaac

SEQ ID NO: 205634 - DNA, 25 bp, SARS Virus
gatgaacccgtatctatacggaacg

SEQ ID NO: 205635 - DNA, 25 bp, SARS Virus
atgaacccgtaattatacggaacgt

SEQ ID NO: 205636 - DNA, 25 bp, SARS Virus
tgaacccgtaactatacggaacgta

SEQ ID NO: 205637 - DNA, 25 bp, SARS Virus
gaacccgtaactttacggaacgtaa

SEQ ID NO: 205638 - DNA, 25 bp, SARS Virus
aacccgtaactatacggaacgtaat

SEQ ID NO: 205639 - DNA, 25 bp, SARS Virus
acccgtaactattcggaacgtaatg

SEQ ID NO: 205640 - DNA, 25 bp, SARS Virus
cccgtaactatatggaacgtaatgt

SEQ ID NO: 205641 - DNA, 25 bp, SARS Virus
ccgtaactatactgaacgtaatgtc

SEQ ID NO: 205642 - DNA, 25 bp, SARS Virus
cgtaactatacgtaacgtaatgtca

SEQ ID NO: 205643 - DNA, 25 bp, SARS Virus
gtaactatacggtacgtaatgtcag

SEQ ID NO: 205644 - DNA, 25 bp, SARS Virus
taactatacggatcgtaatgtcagt

SEQ ID NO: 205645 - DNA, 25 bp, SARS Virus
aactatacggaatgtaatgtcagtt

SEQ ID NO: 205646 - DNA, 25 bp, SARS Virus
actatacggaacttaatgtcagtta

SEQ ID NO: 205647 - DNA, 25 bp, SARS Virus
ctatacggaacgtaatgtcagttat

SEQ ID NO: 205648 - DNA, 25 bp, SARS Virus
tatacggaacgttatgtcagttatg

SEQ ID NO: 205649 - DNA, 25 bp, SARS Virus
atacggaacgtattgtcagttatgt

SEQ ID NO: 205650 - DNA, 25 bp, SARS Virus
tacggaacgtaatgtcagttatgta

SEQ ID NO: 205651 - DNA, 25 bp, SARS Virus
acggaacgtaatttcagttatgtac

SEQ ID NO: 205652 - DNA, 25 bp, SARS Virus
cggaacgtaatgtcagttatgtacg

SEQ ID NO: 205653 - DNA, 25 bp, SARS Virus
ggaacgtaatgttagttatgtacgc

SEQ ID NO: 205654 - DNA, 25 bp, SARS Virus
gaacgtaatgtctgttatgtacgcg

SEQ ID NO: 205655 - DNA, 25 bp, SARS Virus
aacgtaatgtcatttatgtacgcgg

SEQ ID NO: 205656 - DNA, 25 bp, SARS Virus
acgtaatgtcagttatgtacgcggt

SEQ ID NO: 205657 - DNA, 25 bp, SARS Virus
cgtaatgtcagttatgtacgcggtt

SEQ ID NO: 205658 - DNA, 25 bp, SARS Virus
gtaatgtcagttttgtacgcggttc

SEQ ID NO: 205659 - DNA, 25 bp, SARS Virus
taatgtcagttatgtacgcggttct

SEQ ID NO: 205660 - DNA, 25 bp, SARS Virus
aatgtcagttatttacgcggttcta

SEQ ID NO: 205661 - DNA, 25 bp, SARS Virus
atgtcagttatgtacgcggttctag

SEQ ID NO: 205662 - DNA, 25 bp, SARS Virus
tgtcagttatgttcgcggttctaga

SEQ ID NO: 205663 - DNA, 25 bp, SARS Virus
gtcagttatgtatgcggttctagag

SEQ ID NO: 205664 - DNA, 25 bp, SARS Virus
tcagttatgtactcggttctagaga

SEQ ID NO: 205665 - DNA, 25 bp, SARS Virus
cagttatgtacgtggttctagagac

SEQ ID NO: 205666 - DNA, 25 bp, SARS Virus
agttatgtacgctgttctagagacc

SEQ ID NO: 205667 - DNA, 25 bp, SARS Virus
gttatgtacgcgtttctagagaccc

SEQ ID NO: 205668 - DNA, 25 bp, SARS Virus
ttatgtacgcggttctagagacccg

SEQ ID NO: 205669 - DNA, 25 bp, SARS Virus
tatgtacgcggttctagagacccgc

SEQ ID NO: 205670 - DNA, 25 bp, SARS Virus
atgtacgcggttttagagacccgca

SEQ ID NO: 205671 - DNA, 25 bp, SARS Virus
tgtacgcggttctagagacccgcag

SEQ ID NO: 205672 - DNA, 25 bp, SARS Virus
gtacgcggttcttgagacccgcagt

SEQ ID NO: 205673 - DNA, 25 bp, SARS Virus
tacgcggttctatagacccgcagta

SEQ ID NO: 205674 - DNA, 25 bp, SARS Virus
acgcggttctagtgacccgcagtac

SEQ ID NO: 205675 - DNA, 25 bp, SARS Virus
cgcggttctagatacccgcagtaca

SEQ ID NO: 205676 - DNA, 25 bp, SARS Virus
gcggttctagagtcccgcagtacaa

SEQ ID NO: 205677 - DNA, 25 bp, SARS Virus
cggttctagagatccgcagtacaaa

SEQ ID NO: 205678 - DNA, 25 bp, SARS Virus
ggttctagagactcgcagtacaaaa

SEQ ID NO: 205679 - DNA, 25 bp, SARS Virus
gttctagagacctgcagtacaaaag

SEQ ID NO: 205680 - DNA, 25 bp, SARS Virus
ttctagagaccctcagtacaaaagt

SEQ ID NO: 205681 - DNA, 25 bp, SARS Virus
tctagagacccgtagtacaaaagtt

SEQ ID NO: 205682 - DNA, 25 bp, SARS Virus
ctagagacccgctgtacaaaagttg

SEQ ID NO: 205683 - DNA, 25 bp, SARS Virus
tagagacccgcattacaaaagttgg

SEQ ID NO: 205684 - DNA, 25 bp, SARS Virus
agagacccgcagtacaaaagttgga

SEQ ID NO: 205685 - DNA, 25 bp, SARS Virus
gagacccgcagttcaaaagttggaa

SEQ ID NO: 205686 - DNA, 25 bp, SARS Virus
agacccgcagtataaaagttggaat

SEQ ID NO: 205687 - DNA, 25 bp, SARS Virus
gacccgcagtactaaagttggaata

SEQ ID NO: 205688 - DNA, 25 bp, SARS Virus
acccgcagtacataagttggaataa

SEQ ID NO: 205689 - DNA, 25 bp, SARS Virus
cccgcagtacaatagttggaataat

SEQ ID NO: 205690 - DNA, 25 bp, SARS Virus
ccgcagtacaaatgttggaataata

SEQ ID NO: 205691 - DNA, 25 bp, SARS Virus
cgcagtacaaaatttggaataatat

SEQ ID NO: 205692 - DNA, 25 bp, SARS Virus
gcagtacaaaagttggaataatatc

SEQ ID NO: 205693 - DNA, 25 bp, SARS Virus
cagtacaaaagttggaataatatcc

SEQ ID NO: 205694 - DNA, 25 bp, SARS Virus
agtacaaaagtttgaataatatcca

SEQ ID NO: 205695 - DNA, 25 bp, SARS Virus
gtacaaaagttgtaataatatccac

SEQ ID NO: 205696 - DNA, 25 bp, SARS Virus
tacaaaagttggtataatatccact

SEQ ID NO: 205697 - DNA, 25 bp, SARS Virus
acaaaagttggattaatatccactc

SEQ ID NO: 205698 - DNA, 25 bp, SARS Virus
caaaagttggaataatatccactcg

SEQ ID NO: 205699 - DNA, 25 bp, SARS Virus
aaaagttggaattatatccactcgt

SEQ ID NO: 205700 - DNA, 25 bp, SARS Virus
aaagttggaatattatccactcgta

SEQ ID NO: 205701 - DNA, 25 bp, SARS Virus
aagttggaataatatccactcgtac

SEQ ID NO: 205702 - DNA, 25 bp, SARS Virus
agttggaataatttccactcgtact

SEQ ID NO: 205703 - DNA, 25 bp, SARS Virus
gttggaataatatccactcgtactt

SEQ ID NO: 205704 - DNA, 25 bp, SARS Virus
ttggaataatattcactcgtacttt

SEQ ID NO: 205705 - DNA, 25 bp, SARS Virus
tggaataatatctactcgtacttta

SEQ ID NO: 205706 - DNA, 25 bp, SARS Virus
ggaataatatcctctcgtactttaa

SEQ ID NO: 205707 - DNA, 25 bp, SARS Virus
gaataatatccattcgtactttaac

SEQ ID NO: 205708 - DNA, 25 bp, SARS Virus
aataatatccactcgtactttaaca

SEQ ID NO: 205709 - DNA, 25 bp, SARS Virus
ataatatccacttgtactttaacaa

SEQ ID NO: 205710 - DNA, 25 bp, SARS Virus
taatatccactcttactttaacaat

SEQ ID NO: 205711 - DNA, 25 bp, SARS Virus
aatatccactcgtactttaacaatg

SEQ ID NO: 205712 - DNA, 25 bp, SARS Virus
atatccactcgttctttaacaatgt

SEQ ID NO: 205713 - DNA, 25 bp, SARS Virus
tatccactcgtattttaacaatgtt

SEQ ID NO: 205714 - DNA, 25 bp, SARS Virus
atccactcgtactttaacaatgttg

SEQ ID NO: 205715 - DNA, 25 bp, SARS Virus
tccactcgtactttaacaatgttga

SEQ ID NO: 205716 - DNA, 25 bp, SARS Virus
ccactcgtactttaacaatgttgac

SEQ ID NO: 205717 - DNA, 25 bp, SARS Virus
cactcgtacttttacaatgttgaca

SEQ ID NO: 205718 - DNA, 25 bp, SARS Virus
actcgtactttatcaatgttgacag

SEQ ID NO: 205719 - DNA, 25 bp, SARS Virus
ctcgtactttaataatgttgacagt

SEQ ID NO: 205720 - DNA, 25 bp, SARS Virus
tcgtactttaactatgttgacagtg

SEQ ID NO: 205721 - DNA, 25 bp, SARS Virus
cgtactttaacattgttgacagtgg

SEQ ID NO: 205722 - DNA, 25 bp, SARS Virus
gtactttaacaatgttgacagtgga

SEQ ID NO: 205723 - DNA, 25 bp, SARS Virus
tactttaacaattttgacagtggac

SEQ ID NO: 205724 - DNA, 25 bp, SARS Virus
actttaacaatgttgacagtggaca

SEQ ID NO: 205725 - DNA, 25 bp, SARS Virus
ctttaacaatgttgacagtggacag

SEQ ID NO: 205726 - DNA, 25 bp, SARS Virus
tttaacaatgtttacagtggacagt

SEQ ID NO: 205727 - DNA, 25 bp, SARS Virus
ttaacaatgttgtcagtggacagtg

SEQ ID NO: 205728 - DNA, 25 bp, SARS Virus
taacaatgttgatagtggacagtga

SEQ ID NO: 205729 - DNA, 25 bp, SARS Virus
aacaatgttgactgtggacagtgaa

SEQ ID NO: 205730 - DNA, 25 bp, SARS Virus
acaatgttgacattggacagtgaag

SEQ ID NO: 205731 - DNA, 25 bp, SARS Virus
caatgttgacagtggacagtgaaga

SEQ ID NO: 205732 - DNA, 25 bp, SARS Virus
aatgttgacagttgacagtgaagat

SEQ ID NO: 205733 - DNA, 25 bp, SARS Virus
atgttgacagtgtacagtgaagatt

SEQ ID NO: 205734 - DNA, 25 bp, SARS Virus
tgttgacagtggtcagtgaagattc

SEQ ID NO: 205735 - DNA, 25 bp, SARS Virus
gttgacagtggatagtgaagattca

SEQ ID NO: 205736 - DNA, 25 bp, SARS Virus
ttgacagtggactgtgaagattcag

SEQ ID NO: 205737 - DNA, 25 bp, SARS Virus
tgacagtggacattgaagattcagt

SEQ ID NO: 205738 - DNA, 25 bp, SARS Virus
gacagtggacagtgaagattcagtc

SEQ ID NO: 205739 - DNA, 25 bp, SARS Virus
acagtggacagttaagattcagtct

SEQ ID NO: 205740 - DNA, 25 bp, SARS Virus
cagtggacagtgtagattcagtctc

SEQ ID NO: 205741 - DNA, 25 bp, SARS Virus
agtggacagtgatgattcagtctca

SEQ ID NO: 205742 - DNA, 25 bp, SARS Virus
gtggacagtgaatattcagtctcac

SEQ ID NO: 205743 - DNA, 25 bp, SARS Virus
tggacagtgaagtttcagtctcact

SEQ ID NO: 205744 - DNA, 25 bp, SARS Virus
ggacagtgaagattcagtctcacta

SEQ ID NO: 205745 - DNA, 25 bp, SARS Virus
gacagtgaagattcagtctcactac

SEQ ID NO: 205746 - DNA, 25 bp, SARS Virus
acagtgaagatttagtctcactaca

SEQ ID NO: 205747 - DNA, 25 bp, SARS Virus
cagtgaagattctgtctcactacac

SEQ ID NO: 205748 - DNA, 25 bp, SARS Virus
agtgaagattcattctcactacact

SEQ ID NO: 205749 - DNA, 25 bp, SARS Virus
gtgaagattcagtctcactacactt

SEQ ID NO: 205750 - DNA, 25 bp, SARS Virus
tgaagattcagtttcactacacttt

SEQ ID NO: 205751 - DNA, 25 bp, SARS Virus
gaagattcagtctcactacactttc

SEQ ID NO: 205752 - DNA, 25 bp, SARS Virus
aagattcagtcttactacactttca

SEQ ID NO: 205753 - DNA, 25 bp, SARS Virus
agattcagtctctctacactttcaa

SEQ ID NO: 205754 - DNA, 25 bp, SARS Virus
gattcagtctcattacactttcaaa

SEQ ID NO: 205755 - DNA, 25 bp, SARS Virus
attcagtctcactacactttcaaac

SEQ ID NO: 205756 - DNA, 25 bp, SARS Virus
ttcagtctcacttcactttcaaact

SEQ ID NO: 205757 - DNA, 25 bp, SARS Virus
tcagtctcactatactttcaaactc

SEQ ID NO: 205758 - DNA, 25 bp, SARS Virus
cagtctcactactctttcaaactct

SEQ ID NO: 205759 - DNA, 25 bp, SARS Virus
agtctcactacattttcaaactctg

SEQ ID NO: 205760 - DNA, 25 bp, SARS Virus
gtctcactacactttcaaactctgt

SEQ ID NO: 205761 - DNA, 25 bp, SARS Virus
tctcactacactttcaaactctgta

SEQ ID NO: 205762 - DNA, 25 bp, SARS Virus
ctcactacactttcaaactctgtaa

SEQ ID NO: 205763 - DNA, 25 bp, SARS Virus
tcactacacttttaaactctgtaag

SEQ ID NO: 205764 - DNA, 25 bp, SARS Virus
cactacactttctaactctgtaagt

SEQ ID NO: 205765 - DNA, 25 bp, SARS Virus
actacactttcatactctgtaagtt

SEQ ID NO: 205766 - DNA, 25 bp, SARS Virus
ctacactttcaatctctgtaagtta

SEQ ID NO: 205767 - DNA, 25 bp, SARS Virus
tacactttcaaattctgtaagttat

SEQ ID NO: 205768 - DNA, 25 bp, SARS Virus
acactttcaaactctgtaagttatt

SEQ ID NO: 205769 - DNA, 25 bp, SARS Virus
cactttcaaactttgtaagttattg

SEQ ID NO: 205770 - DNA, 25 bp, SARS Virus
actttcaaactctgtaagttattgt

SEQ ID NO: 205771 - DNA, 25 bp, SARS Virus
ctttcaaactctttaagttattgta

SEQ ID NO: 205772 - DNA, 25 bp, SARS Virus
tttcaaactctgtaagttattgtag

SEQ ID NO: 205773 - DNA, 25 bp, SARS Virus
ttcaaactctgttagttattgtagg

SEQ ID NO: 205774 - DNA, 25 bp, SARS Virus
tcaaactctgtatgttattgtagga

SEQ ID NO: 205775 - DNA, 25 bp, SARS Virus
caaactctgtaatttattgtaggaa

SEQ ID NO: 205776 - DNA, 25 bp, SARS Virus
aaactctgtaagttattgtaggaaa

SEQ ID NO: 205777 - DNA, 25 bp, SARS Virus
aactctgtaagttattgtaggaaac

SEQ ID NO: 205778 - DNA, 25 bp, SARS Virus
actctgtaagtttttgtaggaaaca

SEQ ID NO: 205779 - DNA, 25 bp, SARS Virus
ctctgtaagttattgtaggaaacac

SEQ ID NO: 205780 - DNA, 25 bp, SARS Virus
tctgtaagttattgtaggaaacaca

SEQ ID NO: 205781 - DNA, 25 bp, SARS Virus
ctgtaagttattttaggaaacacag

SEQ ID NO: 205782 - DNA, 25 bp, SARS Virus
tgtaagttattgtaggaaacacagt

SEQ ID NO: 205783 - DNA, 25 bp, SARS Virus
gtaagttattgttggaaacacagtt

SEQ ID NO: 205784 - DNA, 25 bp, SARS Virus
taagttattgtatgaaacacagttg

SEQ ID NO: 205785 - DNA, 25 bp, SARS Virus
aagttattgtagtaaacacagttgt

SEQ ID NO: 205786 - DNA, 25 bp, SARS Virus
agttattgtaggtaacacagttgta

SEQ ID NO: 205787 - DNA, 25 bp, SARS Virus
gttattgtaggatacacagttgtag

SEQ ID NO: 205788 - DNA, 25 bp, SARS Virus
ttattgtaggaatcacagttgtagc

SEQ ID NO: 205789 - DNA, 25 bp, SARS Virus
tattgtaggaaatacagttgtagcc

SEQ ID NO: 205790 - DNA, 25 bp, SARS Virus
attgtaggaaactcagttgtagcca

SEQ ID NO: 205791 - DNA, 25 bp, SARS Virus
ttgtaggaaacatagttgtagccat

SEQ ID NO: 205792 - DNA, 25 bp, SARS Virus
tgtaggaaacactgttgtagccata

SEQ ID NO: 205793 - DNA, 25 bp, SARS Virus
gtaggaaacacatttgtagccatag

SEQ ID NO: 205794 - DNA, 25 bp, SARS Virus
taggaaacacagttgtagccatagt

SEQ ID NO: 205795 - DNA, 25 bp, SARS Virus
aggaaacacagttgtagccatagtt

SEQ ID NO: 205796 - DNA, 25 bp, SARS Virus
ggaaacacagttttagccatagttg

SEQ ID NO: 205797 - DNA, 25 bp, SARS Virus
gaaacacagttgtagccatagttgt

SEQ ID NO: 205798 - DNA, 25 bp, SARS Virus
aaacacagttgttgccatagttgtt

SEQ ID NO: 205799 - DNA, 25 bp, SARS Virus
aacacagttgtatccatagttgttg

SEQ ID NO: 205800 - DNA, 25 bp, SARS Virus
acacagttgtagtcatagttgttgt

SEQ ID NO: 205801 - DNA, 25 bp, SARS Virus
cacagttgtagctatagttgttgtg

SEQ ID NO: 205802 - DNA, 25 bp, SARS Virus
acagttgtagccttagttgttgtgg

SEQ ID NO: 205803 - DNA, 25 bp, SARS Virus
cagttgtagccatagttgttgtgga

SEQ ID NO: 205804 - DNA, 25 bp, SARS Virus
agttgtagccattgttgttgtggaa

SEQ ID NO: 205805 - DNA, 25 bp, SARS Virus
gttgtagccatatttgttgtggaac

SEQ ID NO: 205806 - DNA, 25 bp, SARS Virus
ttgtagccatagttgttgtggaaca

SEQ ID NO: 205807 - DNA, 25 bp, SARS Virus
tgtagccatagttgttgtggaacag

SEQ ID NO: 205808 - DNA, 25 bp, SARS Virus
gtagccatagtttttgtggaacagc

SEQ ID NO: 205809 - DNA, 25 bp, SARS Virus
tagccatagttgttgtggaacagcc

SEQ ID NO: 205810 - DNA, 25 bp, SARS Virus
agccatagttgttgtggaacagccc

SEQ ID NO: 205811 - DNA, 25 bp, SARS Virus
gccatagttgttttggaacagcccg

SEQ ID NO: 205812 - DNA, 25 bp, SARS Virus
ccatagttgttgtggaacagcccgt

SEQ ID NO: 205813 - DNA, 25 bp, SARS Virus
catagttgttgttgaacagcccgtc

SEQ ID NO: 205814 - DNA, 25 bp, SARS Virus
atagttgttgtgtaacagcccgtcg

SEQ ID NO: 205815 - DNA, 25 bp, SARS Virus
tagttgttgtggtacagcccgtcga

SEQ ID NO: 205816 - DNA, 25 bp, SARS Virus
agttgttgtggatcagcccgtcgac

SEQ ID NO: 205817 - DNA, 25 bp, SARS Virus
gttgttgtggaatagcccgtcgact

SEQ ID NO: 205818 - DNA, 25 bp, SARS Virus
ttgttgtggaactgcccgtcgactg

SEQ ID NO: 205819 - DNA, 25 bp, SARS Virus
tgttgtggaacatcccgtcgactgt

SEQ ID NO: 205820 - DNA, 25 bp, SARS Virus
gttgtggaacagtccgtcgactgtg

SEQ ID NO: 205821 - DNA, 25 bp, SARS Virus
ttgtggaacagctcgtcgactgtgc

SEQ ID NO: 205822 - DNA, 25 bp, SARS Virus
tgtggaacagcctgtcgactgtgct

SEQ ID NO: 205823 - DNA, 25 bp, SARS Virus
gtggaacagcccttcgactgtgctt

SEQ ID NO: 205824 - DNA, 25 bp, SARS Virus
tggaacagcccgtcgactgtgctta

SEQ ID NO: 205825 - DNA, 25 bp, SARS Virus
ggaacagcccgttgactgtgcttac

SEQ ID NO: 205826 - DNA, 25 bp, SARS Virus
gaacagcccgtctactgtgcttaca

SEQ ID NO: 205827 - DNA, 25 bp, SARS Virus
aacagcccgtcgtctgtgcttacat

SEQ ID NO: 205828 - DNA, 25 bp, SARS Virus
acagcccgtcgattgtgcttacatc

SEQ ID NO: 205829 - DNA, 25 bp, SARS Virus
cagcccgtcgactgtgcttacatct

SEQ ID NO: 205830 - DNA, 25 bp, SARS Virus
agcccgtcgactttgcttacatctt

SEQ ID NO: 205831 - DNA, 25 bp, SARS Virus
gcccgtcgactgtgcttacatcttt

SEQ ID NO: 205832 - DNA, 25 bp, SARS Virus
cccgtcgactgttcttacatctttc

SEQ ID NO: 205833 - DNA, 25 bp, SARS Virus
ccgtcgactgtgtttacatctttcc

SEQ ID NO: 205834 - DNA, 25 bp, SARS Virus
cgtcgactgtgcttacatctttcct

SEQ ID NO: 205835 - DNA, 25 bp, SARS Virus
gtcgactgtgcttacatctttcctg

SEQ ID NO: 205836 - DNA, 25 bp, SARS Virus
tcgactgtgctttcatctttcctgt

SEQ ID NO: 205837 - DNA, 25 bp, SARS Virus
cgactgtgcttatatctttcctgtg

SEQ ID NO: 205838 - DNA, 25 bp, SARS Virus
gactgtgcttacttctttcctgtgg

SEQ ID NO: 205839 - DNA, 25 bp, SARS Virus
actgtgcttacatctttcctgtggt

SEQ ID NO: 205840 - DNA, 25 bp, SARS Virus
ctgtgcttacatttttcctgtggta

SEQ ID NO: 205841 - DNA, 25 bp, SARS Virus
tgtgcttacatctttcctgtggtag

SEQ ID NO: 205842 - DNA, 25 bp, SARS Virus
gtgcttacatctttcctgtggtaga

SEQ ID NO: 205843 - DNA, 25 bp, SARS Virus
tgcttacatctttcctgtggtagat

SEQ ID NO: 205844 - DNA, 25 bp, SARS Virus
gcttacatcttttctgtggtagatt

SEQ ID NO: 205845 - DNA, 25 bp, SARS Virus
cttacatctttcttgtggtagattt

SEQ ID NO: 205846 - DNA, 25 bp, SARS Virus
ttacatctttcctgtggtagatttc

SEQ ID NO: 205847 - DNA, 25 bp, SARS Virus
tacatctttcctttggtagatttcg

SEQ ID NO: 205848 - DNA, 25 bp, SARS Virus
acatctttcctgtggtagatttcga

SEQ ID NO: 205849 - DNA, 25 bp, SARS Virus
catctttcctgttgtagatttcgat

SEQ ID NO: 205850 - DNA, 25 bp, SARS Virus
atctttcctgtgttagatttcgatg

SEQ ID NO: 205851 - DNA, 25 bp, SARS Virus
tctttcctgtggtagatttcgatgt

SEQ ID NO: 205852 - DNA, 25 bp, SARS Virus
ctttcctgtggttgatttcgatgtg

SEQ ID NO: 205853 - DNA, 25 bp, SARS Virus
tttcctgtggtatatttcgatgtgg

SEQ ID NO: 205854 - DNA, 25 bp, SARS Virus
ttcctgtggtagttttcgatgtggg

SEQ ID NO: 205855 - DNA, 25 bp, SARS Virus
tcctgtggtagatttcgatgtggga

SEQ ID NO: 205856 - DNA, 25 bp, SARS Virus
cctgtggtagatttcgatgtgggaa

SEQ ID NO: 205857 - DNA, 25 bp, SARS Virus
ctgtggtagatttcgatgtgggaaa

SEQ ID NO: 205858 - DNA, 25 bp, SARS Virus
tgtggtagattttgatgtgggaaac

SEQ ID NO: 205859 - DNA, 25 bp, SARS Virus
gtggtagatttctatgtgggaaacg

SEQ ID NO: 205860 - DNA, 25 bp, SARS Virus
tggtagatttcgttgtgggaaacga

SEQ ID NO: 205861 - DNA, 25 bp, SARS Virus
ggtagatttcgatgtgggaaacgat

SEQ ID NO: 205862 - DNA, 25 bp, SARS Virus
gtagatttcgatttgggaaacgatt

SEQ ID NO: 205863 - DNA, 25 bp, SARS Virus
tagatttcgatgtgggaaacgattg

SEQ ID NO: 205864 - DNA, 25 bp, SARS Virus
agatttcgatgttggaaacgattga

SEQ ID NO: 205865 - DNA, 25 bp, SARS Virus
gatttcgatgtgtgaaacgattgag

SEQ ID NO: 205866 - DNA, 25 bp, SARS Virus
atttcgatgtggtaaacgattgagc

SEQ ID NO: 205867 - DNA, 25 bp, SARS Virus
tttcgatgtgggtaacgattgagcg

SEQ ID NO: 205868 - DNA, 25 bp, SARS Virus
ttcgatgtgggatacgattgagcga

SEQ ID NO: 205869 - DNA, 25 bp, SARS Virus
tcgatgtgggaatcgattgagcgac

SEQ ID NO: 205870 - DNA, 25 bp, SARS Virus
cgatgtgggaaatgattgagcgaca

SEQ ID NO: 205871 - DNA, 25 bp, SARS Virus
gatgtgggaaactattgagcgacac

SEQ ID NO: 205872 - DNA, 25 bp, SARS Virus
atgtgggaaacgtttgagcgacact

SEQ ID NO: 205873 - DNA, 25 bp, SARS Virus
tgtgggaaacgattgagcgacactc

SEQ ID NO: 205874 - DNA, 25 bp, SARS Virus
gtgggaaacgattgagcgacactcg

SEQ ID NO: 205875 - DNA, 25 bp, SARS Virus
tgggaaacgatttagcgacactcga

SEQ ID NO: 205876 - DNA, 25 bp, SARS Virus
gggaaacgattgtgcgacactcgac

SEQ ID NO: 205877 - DNA, 25 bp, SARS Virus
ggaaacgattgatcgacactcgaca

SEQ ID NO: 205878 - DNA, 25 bp, SARS Virus
gaaacgattgagtgacactcgacat

SEQ ID NO: 205879 - DNA, 25 bp, SARS Virus
aaacgattgagctacactcgacatc

SEQ ID NO: 205880 - DNA, 25 bp, SARS Virus
aacgattgagcgtcactcgacatcg

SEQ ID NO: 205881 - DNA, 25 bp, SARS Virus
acgattgagcgatactcgacatcgt

SEQ ID NO: 205882 - DNA, 25 bp, SARS Virus
cgattgagcgactctcgacatcgtt

SEQ ID NO: 205883 - DNA, 25 bp, SARS Virus
gattgagcgacattcgacatcgttg

SEQ ID NO: 205884 - DNA, 25 bp, SARS Virus
attgagcgacactcgacatcgttgt

SEQ ID NO: 205885 - DNA, 25 bp, SARS Virus
ttgagcgacacttgacatcgttgtt

SEQ ID NO: 205886 - DNA, 25 bp, SARS Virus
tgagcgacactctacatcgttgttc

SEQ ID NO: 205887 - DNA, 25 bp, SARS Virus
gagcgacactcgtcatcgttgttca

SEQ ID NO: 205888 - DNA, 25 bp, SARS Virus
agcgacactcgatatcgttgttcac

SEQ ID NO: 205889 - DNA, 25 bp, SARS Virus
gcgacactcgacttcgttgttcacg

SEQ ID NO: 205890 - DNA, 25 bp, SARS Virus
cgacactcgacatcgttgttcacgg

SEQ ID NO: 205891 - DNA, 25 bp, SARS Virus
gacactcgacattgttgttcacgga

SEQ ID NO: 205892 - DNA, 25 bp, SARS Virus
acactcgacatctttgttcacggaa

SEQ ID NO: 205893 - DNA, 25 bp, SARS Virus
cactcgacatcgttgttcacggaat

SEQ ID NO: 205894 - DNA, 25 bp, SARS Virus
actcgacatcgttgttcacggaatt

SEQ ID NO: 205895 - DNA, 25 bp, SARS Virus
ctcgacatcgtttttcacggaattc

SEQ ID NO: 205896 - DNA, 25 bp, SARS Virus
tcgacatcgttgttcacggaattca

SEQ ID NO: 205897 - DNA, 25 bp, SARS Virus
cgacatcgttgttcacggaattcaa

SEQ ID NO: 205898 - DNA, 25 bp, SARS Virus
gacatcgttgtttacggaattcaaa

SEQ ID NO: 205899 - DNA, 25 bp, SARS Virus
acatcgttgttctcggaattcaaaa

SEQ ID NO: 205900 - DNA, 25 bp, SARS Virus
catcgttgttcatggaattcaaaaa

SEQ ID NO: 205901 - DNA, 25 bp, SARS Virus
atcgttgttcactgaattcaaaaag

SEQ ID NO: 205902 - DNA, 25 bp, SARS Virus
tcgttgttcacgtaattcaaaaagg

SEQ ID NO: 205903 - DNA, 25 bp, SARS Virus
cgttgttcacggtattcaaaaaggt

SEQ ID NO: 205904 - DNA, 25 bp, SARS Virus
gttgttcacggatttcaaaaaggta

SEQ ID NO: 205905 - DNA, 25 bp, SARS Virus
ttgttcacggaattcaaaaaggtat

SEQ ID NO: 205906 - DNA, 25 bp, SARS Virus
tgttcacggaattcaaaaaggtatc

SEQ ID NO: 205907 - DNA, 25 bp, SARS Virus
gttcacggaatttaaaaaggtatcc

SEQ ID NO: 205908 - DNA, 25 bp, SARS Virus
ttcacggaattctaaaaggtatcct

SEQ ID NO: 205909 - DNA, 25 bp, SARS Virus
tcacggaattcataaaggtatcctt

SEQ ID NO: 205910 - DNA, 25 bp, SARS Virus
cacggaattcaataaggtatccttg

SEQ ID NO: 205911 - DNA, 25 bp, SARS Virus
acggaattcaaataggtatccttgt

SEQ ID NO: 205912 - DNA, 25 bp, SARS Virus
cggaattcaaaatggtatccttgtg

SEQ ID NO: 205913 - DNA, 25 bp, SARS Virus
ggaattcaaaaatgtatccttgtga

SEQ ID NO: 205914 - DNA, 25 bp, SARS Virus
gaattcaaaaagttatccttgtgat

SEQ ID NO: 205915 - DNA, 25 bp, SARS Virus
aattcaaaaaggtatccttgtgatt

SEQ ID NO: 205916 - DNA, 25 bp, SARS Virus
attcaaaaaggtttccttgtgattt

SEQ ID NO: 205917 - DNA, 25 bp, SARS Virus
ttcaaaaaggtatccttgtgatttt

SEQ ID NO: 205918 - DNA, 25 bp, SARS Virus
tcaaaaaggtattcttgtgattttc

SEQ ID NO: 205919 - DNA, 25 bp, SARS Virus
caaaaaggtatctttgtgattttca

SEQ ID NO: 205920 - DNA, 25 bp, SARS Virus
aaaaaggtatccttgtgattttcaa

SEQ ID NO: 205921 - DNA, 25 bp, SARS Virus
aaaaggtatccttgtgattttcaac

SEQ ID NO: 205922 - DNA, 25 bp, SARS Virus
aaaggtatccttttgattttcaacg

SEQ ID NO: 205923 - DNA, 25 bp, SARS Virus
aaggtatccttgtgattttcaacga

SEQ ID NO: 205924 - DNA, 25 bp, SARS Virus
aggtatccttgttattttcaacgac

SEQ ID NO: 205925 - DNA, 25 bp, SARS Virus
ggtatccttgtgtttttcaacgact

SEQ ID NO: 205926 - DNA, 25 bp, SARS Virus
gtatccttgtgattttcaacgactt

SEQ ID NO: 205927 - DNA, 25 bp, SARS Virus
tatccttgtgattttcaacgacttt

SEQ ID NO: 205928 - DNA, 25 bp, SARS Virus
atccttgtgattttcaacgactttt

SEQ ID NO: 205929 - DNA, 25 bp, SARS Virus
tccttgtgattttcaacgacttttc

SEQ ID NO: 205930 - DNA, 25 bp, SARS Virus
ccttgtgatttttaacgacttttcc

SEQ ID NO: 205931 - DNA, 25 bp, SARS Virus
cttgtgattttctacgacttttcca

SEQ ID NO: 205932 - DNA, 25 bp, SARS Virus
ttgtgattttcatcgacttttccac

SEQ ID NO: 205933 - DNA, 25 bp, SARS Virus
tgtgattttcaatgacttttccaca

SEQ ID NO: 205934 - DNA, 25 bp, SARS Virus
gtgattttcaactacttttccacag

SEQ ID NO: 205935 - DNA, 25 bp, SARS Virus
tgattttcaacgtcttttccacagc

SEQ ID NO: 205936 - DNA, 25 bp, SARS Virus
gattttcaacgatttttccacagct

SEQ ID NO: 205937 - DNA, 25 bp, SARS Virus
attttcaacgacttttccacagctg

SEQ ID NO: 205938 - DNA, 25 bp, SARS Virus
ttttcaacgacttttccacagctgt

SEQ ID NO: 205939 - DNA, 25 bp, SARS Virus
tttcaacgacttttccacagctgta

SEQ ID NO: 205940 - DNA, 25 bp, SARS Virus
ttcaacgacttttccacagctgtat

SEQ ID NO: 205941 - DNA, 25 bp, SARS Virus
tcaacgactttttcacagctgtatt

SEQ ID NO: 205942 - DNA, 25 bp, SARS Virus
caacgacttttctacagctgtattc

SEQ ID NO: 205943 - DNA, 25 bp, SARS Virus
aacgacttttcctcagctgtattcg

SEQ ID NO: 205944 - DNA, 25 bp, SARS Virus
acgacttttccatagctgtattcgt

SEQ ID NO: 205945 - DNA, 25 bp, SARS Virus
cgacttttccactgctgtattcgta

SEQ ID NO: 205946 - DNA, 25 bp, SARS Virus
gacttttccacatctgtattcgtag

SEQ ID NO: 205947 - DNA, 25 bp, SARS Virus
acttttccacagttgtattcgtagt

SEQ ID NO: 205948 - DNA, 25 bp, SARS Virus
cttttccacagctgtattcgtagtt

SEQ ID NO: 205949 - DNA, 25 bp, SARS Virus
ttttccacagctttattcgtagttt

SEQ ID NO: 205950 - DNA, 25 bp, SARS Virus
tttccacagctgtattcgtagtttg

SEQ ID NO: 205951 - DNA, 25 bp, SARS Virus
ttccacagctgttttcgtagtttgt

SEQ ID NO: 205952 - DNA, 25 bp, SARS Virus
tccacagctgtattcgtagtttgta

SEQ ID NO: 205953 - DNA, 25 bp, SARS Virus
ccacagctgtattcgtagtttgtag

SEQ ID NO: 205954 - DNA, 25 bp, SARS Virus
cacagctgtatttgtagtttgtaga

SEQ ID NO: 205955 - DNA, 25 bp, SARS Virus
acagctgtattcttagtttgtagaa

SEQ ID NO: 205956 - DNA, 25 bp, SARS Virus
cagctgtattcgtagtttgtagaat

SEQ ID NO: 205957 - DNA, 25 bp, SARS Virus
agctgtattcgttgtttgtagaatt

SEQ ID NO: 205958 - DNA, 25 bp, SARS Virus
gctgtattcgtattttgtagaattg

SEQ ID NO: 205959 - DNA, 25 bp, SARS Virus
ctgtattcgtagtttgtagaattgc

SEQ ID NO: 205960 - DNA, 25 bp, SARS Virus
tgtattcgtagtttgtagaattgcc

SEQ ID NO: 205961 - DNA, 25 bp, SARS Virus
gtattcgtagtttgtagaattgcct

SEQ ID NO: 205962 - DNA, 25 bp, SARS Virus
tattcgtagtttttagaattgcctt

SEQ ID NO: 205963 - DNA, 25 bp, SARS Virus
attcgtagtttgtagaattgccttt

SEQ ID NO: 205964 - DNA, 25 bp, SARS Virus
ttcgtagtttgttgaattgcctttg

SEQ ID NO: 205965 - DNA, 25 bp, SARS Virus
tcgtagtttgtataattgcctttga

SEQ ID NO: 205966 - DNA, 25 bp, SARS Virus
cgtagtttgtagtattgcctttgaa

SEQ ID NO: 205967 - DNA, 25 bp, SARS Virus
gtagtttgtagatttgcctttgaag

SEQ ID NO: 205968 - DNA, 25 bp, SARS Virus
tagtttgtagaattgcctttgaagt

SEQ ID NO: 205969 - DNA, 25 bp, SARS Virus
agtttgtagaatagcctttgaagtc

SEQ ID NO: 205970 - DNA, 25 bp, SARS Virus
gtttgtagaattacctttgaagtca

SEQ ID NO: 205971 - DNA, 25 bp, SARS Virus
tttgtagaattgactttgaagtcat

SEQ ID NO: 205972 - DNA, 25 bp, SARS Virus
ttgtagaattgcatttgaagtcatg

SEQ ID NO: 205973 - DNA, 25 bp, SARS Virus
tgtagaattgccattgaagtcatga

SEQ ID NO: 205974 - DNA, 25 bp, SARS Virus
gtagaattgcctatgaagtcatgat

SEQ ID NO: 205975 - DNA, 25 bp, SARS Virus
tagaattgccttagaagtcatgata

SEQ ID NO: 205976 - DNA, 25 bp, SARS Virus
agaattgcctttaaagtcatgatag

SEQ ID NO: 205977 - DNA, 25 bp, SARS Virus
gaattgcctttgaagtcatgataga

SEQ ID NO: 205978 - DNA, 25 bp, SARS Virus
aattgcctttgaagtcatgatagag

SEQ ID NO: 205979 - DNA, 25 bp, SARS Virus
attgcctttgaaatcatgatagagg

SEQ ID NO: 205980 - DNA, 25 bp, SARS Virus
ttgcctttgaagacatgatagaggt

SEQ ID NO: 205981 - DNA, 25 bp, SARS Virus
tgcctttgaagtaatgatagaggtt

SEQ ID NO: 205982 - DNA, 25 bp, SARS Virus
gcctttgaagtcatgatagaggttg

SEQ ID NO: 205983 - DNA, 25 bp, SARS Virus
cctttgaagtcaagatagaggttgc

SEQ ID NO: 205984 - DNA, 25 bp, SARS Virus
ctttgaagtcataatagaggttgca

SEQ ID NO: 205985 - DNA, 25 bp, SARS Virus
tttgaagtcatgatagaggttgcag

SEQ ID NO: 205986 - DNA, 25 bp, SARS Virus
ttgaagtcatgaaagaggttgcaga

SEQ ID NO: 205987 - DNA, 25 bp, SARS Virus
tgaagtcatgatagaggttgcagac

SEQ ID NO: 205988 - DNA, 25 bp, SARS Virus
gaagtcatgataaaggttgcagact

SEQ ID NO: 205989 - DNA, 25 bp, SARS Virus
aagtcatgatagaggttgcagacta

SEQ ID NO: 205990 - DNA, 25 bp, SARS Virus
agtcatgatagaagttgcagactat

SEQ ID NO: 205991 - DNA, 25 bp, SARS Virus
gtcatgatagagattgcagactatg

SEQ ID NO: 205992 - DNA, 25 bp, SARS Virus
tcatgatagaggatgcagactatgt

SEQ ID NO: 205993 - DNA, 25 bp, SARS Virus
catgatagaggtagcagactatgtt

SEQ ID NO: 205994 - DNA, 25 bp, SARS Virus
atgatagaggttacagactatgttc

SEQ ID NO: 205995 - DNA, 25 bp, SARS Virus
tgatagaggttgaagactatgttct

SEQ ID NO: 205996 - DNA, 25 bp, SARS Virus
gatagaggttgcagactatgttctc

SEQ ID NO: 205997 - DNA, 25 bp, SARS Virus
atagaggttgcaaactatgttctcg

SEQ ID NO: 205998 - DNA, 25 bp, SARS Virus
tagaggttgcagactatgttctcga

SEQ ID NO: 205999 - DNA, 25 bp, SARS Virus
agaggttgcagaatatgttctcgaa

SEQ ID NO: 206000 - DNA, 25 bp, SARS Virus
gaggttgcagacaatgttctcgaac

SEQ ID NO: 206001 - DNA, 25 bp, SARS Virus
aggttgcagactatgttctcgaacc

SEQ ID NO: 206002 - DNA, 25 bp, SARS Virus
ggttgcagactaagttctcgaacca

SEQ ID NO: 206003 - DNA, 25 bp, SARS Virus
gttgcagactatattctcgaaccag

SEQ ID NO: 206004 - DNA, 25 bp, SARS Virus
ttgcagactatgatctcgaaccagt

SEQ ID NO: 206005 - DNA, 25 bp, SARS Virus
tgcagactatgtactcgaaccagtt

SEQ ID NO: 206006 - DNA, 25 bp, SARS Virus
gcagactatgttatcgaaccagttc

SEQ ID NO: 206007 - DNA, 25 bp, SARS Virus
cagactatgttcacgaaccagttcg

SEQ ID NO: 206008 - DNA, 25 bp, SARS Virus
agactatgttctagaaccagttcgt

SEQ ID NO: 206009 - DNA, 25 bp, SARS Virus
gactatgttctcaaaccagttcgtt

SEQ ID NO: 206010 - DNA, 25 bp, SARS Virus
actatgttctcgaaccagttcgttg

SEQ ID NO: 206011 - DNA, 25 bp, SARS Virus
ctatgttctcgaaccagttcgttgt

SEQ ID NO: 206012 - DNA, 25 bp, SARS Virus
tatgttctcgaaacagttcgttgtc

SEQ ID NO: 206013 - DNA, 25 bp, SARS Virus
atgttctcgaacaagttcgttgtct

SEQ ID NO: 206014 - DNA, 25 bp, SARS Virus
tgttctcgaaccagttcgttgtctt

SEQ ID NO: 206015 - DNA, 25 bp, SARS Virus
gttctcgaaccaattcgttgtctta

SEQ ID NO: 206016 - DNA, 25 bp, SARS Virus
ttctcgaaccagatcgttgtcttat

SEQ ID NO: 206017 - DNA, 25 bp, SARS Virus
tctcgaaccagtacgttgtcttatc

SEQ ID NO: 206018 - DNA, 25 bp, SARS Virus
ctcgaaccagttagttgtcttatcc

SEQ ID NO: 206019 - DNA, 25 bp, SARS Virus
tcgaaccagttcattgtcttatcca

SEQ ID NO: 206020 - DNA, 25 bp, SARS Virus
cgaaccagttcgatgtcttatccaa

SEQ ID NO: 206021 - DNA, 25 bp, SARS Virus
gaaccagttcgtagtcttatccaac

SEQ ID NO: 206022 - DNA, 25 bp, SARS Virus
aaccagttcgttatcttatccaacc

SEQ ID NO: 206023 - DNA, 25 bp, SARS Virus
accagttcgttgacttatccaaccg

SEQ ID NO: 206024 - DNA, 25 bp, SARS Virus
ccagttcgttgtattatccaaccgt

SEQ ID NO: 206025 - DNA, 25 bp, SARS Virus
cagttcgttgtcatatccaaccgtg

SEQ ID NO: 206026 - DNA, 25 bp, SARS Virus
agttcgttgtctaatccaaccgtgt

SEQ ID NO: 206027 - DNA, 25 bp, SARS Virus
gttcgttgtcttatccaaccgtgta

SEQ ID NO: 206028 - DNA, 25 bp, SARS Virus
ttcgttgtcttaaccaaccgtgtag

SEQ ID NO: 206029 - DNA, 25 bp, SARS Virus
tcgttgtcttatacaaccgtgtagt

SEQ ID NO: 206030 - DNA, 25 bp, SARS Virus
cgttgtcttatcaaaccgtgtagtc

SEQ ID NO: 206031 - DNA, 25 bp, SARS Virus
gttgtcttatccaaccgtgtagtcg

SEQ ID NO: 206032 - DNA, 25 bp, SARS Virus
ttgtcttatccaaccgtgtagtcga

SEQ ID NO: 206033 - DNA, 25 bp, SARS Virus
tgtcttatccaaacgtgtagtcgac

SEQ ID NO: 206034 - DNA, 25 bp, SARS Virus
gtcttatccaacagtgtagtcgact

SEQ ID NO: 206035 - DNA, 25 bp, SARS Virus
tcttatccaaccatgtagtcgactg

SEQ ID NO: 206036 - DNA, 25 bp, SARS Virus
cttatccaaccgagtagtcgactga

SEQ ID NO: 206037 - DNA, 25 bp, SARS Virus
ttatccaaccgtatagtcgactgac

SEQ ID NO: 206038 - DNA, 25 bp, SARS Virus
tatccaaccgtgaagtcgactgaca

SEQ ID NO: 206039 - DNA, 25 bp, SARS Virus
atccaaccgtgtagtcgactgacat

SEQ ID NO: 206040 - DNA, 25 bp, SARS Virus
tccaaccgtgtaatcgactgacatc

SEQ ID NO: 206041 - DNA, 25 bp, SARS Virus
ccaaccgtgtagacgactgacatca

SEQ ID NO: 206042 - DNA, 25 bp, SARS Virus
caaccgtgtagtagactgacatcat

SEQ ID NO: 206043 - DNA, 25 bp, SARS Virus
aaccgtgtagtcaactgacatcatg

SEQ ID NO: 206044 - DNA, 25 bp, SARS Virus
accgtgtagtcgactgacatcatgt

SEQ ID NO: 206045 - DNA, 25 bp, SARS Virus
ccgtgtagtcgaatgacatcatgtg

SEQ ID NO: 206046 - DNA, 25 bp, SARS Virus
cgtgtagtcgacagacatcatgtgt

SEQ ID NO: 206047 - DNA, 25 bp, SARS Virus
gtgtagtcgactaacatcatgtgtc

SEQ ID NO: 206048 - DNA, 25 bp, SARS Virus
tgtagtcgactgacatcatgtgtct

SEQ ID NO: 206049 - DNA, 25 bp, SARS Virus
gtagtcgactgaaatcatgtgtctt

SEQ ID NO: 206050 - DNA, 25 bp, SARS Virus
tagtcgactgacatcatgtgtcttc

SEQ ID NO: 206051 - DNA, 25 bp, SARS Virus
agtcgactgacaacatgtgtcttcg

SEQ ID NO: 206052 - DNA, 25 bp, SARS Virus
gtcgactgacataatgtgtcttcgt

SEQ ID NO: 206053 - DNA, 25 bp, SARS Virus
tcgactgacatcatgtgtcttcgtc

SEQ ID NO: 206054 - DNA, 25 bp, SARS Virus
cgactgacatcaagtgtcttcgtct

SEQ ID NO: 206055 - DNA, 25 bp, SARS Virus
gactgacatcatatgtcttcgtctg

SEQ ID NO: 206056 - DNA, 25 bp, SARS Virus
actgacatcatgagtcttcgtctga

SEQ ID NO: 206057 - DNA, 25 bp, SARS Virus
ctgacatcatgtatcttcgtctgaa

SEQ ID NO: 206058 - DNA, 25 bp, SARS Virus
tgacatcatgtgacttcgtctgaat

SEQ ID NO: 206059 - DNA, 25 bp, SARS Virus
gacatcatgtgtattcgtctgaatc

SEQ ID NO: 206060 - DNA, 25 bp, SARS Virus
acatcatgtgtcatcgtctgaatct

SEQ ID NO: 206061 - DNA, 25 bp, SARS Virus
catcatgtgtctacgtctgaatctt

SEQ ID NO: 206062 - DNA, 25 bp, SARS Virus
atcatgtgtcttagtctgaatcttc

SEQ ID NO: 206063 - DNA, 25 bp, SARS Virus
tcatgtgtcttcatctgaatcttcg

SEQ ID NO: 206064 - DNA, 25 bp, SARS Virus
catgtgtcttcgactgaatcttcgt

SEQ ID NO: 206065 - DNA, 25 bp, SARS Virus
atgtgtcttcgtatgaatcttcgtc

SEQ ID NO: 206066 - DNA, 25 bp, SARS Virus
tgtgtcttcgtcagaatcttcgtct

SEQ ID NO: 206067 - DNA, 25 bp, SARS Virus
gtgtcttcgtctaaatcttcgtctg

SEQ ID NO: 206068 - DNA, 25 bp, SARS Virus
tgtcttcgtctgaatcttcgtctga

SEQ ID NO: 206069 - DNA, 25 bp, SARS Virus
gtcttcgtctgaatcttcgtctgag

SEQ ID NO: 206070 - DNA, 25 bp, SARS Virus
tcttcgtctgaaacttcgtctgagc

SEQ ID NO: 206071 - DNA, 25 bp, SARS Virus
cttcgtctgaatattcgtctgagca

SEQ ID NO: 206072 - DNA, 25 bp, SARS Virus
ttcgtctgaatcatcgtctgagcag

SEQ ID NO: 206073 - DNA, 25 bp, SARS Virus
tcgtctgaatctacgtctgagcagc

SEQ ID NO: 206074 - DNA, 25 bp, SARS Virus
cgtctgaatcttagtctgagcagcg

SEQ ID NO: 206075 - DNA, 25 bp, SARS Virus
gtctgaatcttcatctgagcagcgt

SEQ ID NO: 206076 - DNA, 25 bp, SARS Virus
tctgaatcttcgactgagcagcgta

SEQ ID NO: 206077 - DNA, 25 bp, SARS Virus
ctgaatcttcgtatgagcagcgtaa

SEQ ID NO: 206078 - DNA, 25 bp, SARS Virus
tgaatcttcgtcagagcagcgtaaa

SEQ ID NO: 206079 - DNA, 25 bp, SARS Virus
gaatcttcgtctaagcagcgtaaac

SEQ ID NO: 206080 - DNA, 25 bp, SARS Virus
aatcttcgtctgagcagcgtaaacc

SEQ ID NO: 206081 - DNA, 25 bp, SARS Virus
atcttcgtctgaacagcgtaaacct

SEQ ID NO: 206082 - DNA, 25 bp, SARS Virus
tcttcgtctgagaagcgtaaacctg

SEQ ID NO: 206083 - DNA, 25 bp, SARS Virus
cttcgtctgagcagcgtaaacctga

SEQ ID NO: 206084 - DNA, 25 bp, SARS Virus
ttcgtctgagcaacgtaaacctgaa

SEQ ID NO: 206085 - DNA, 25 bp, SARS Virus
tcgtctgagcagagtaaacctgaac

SEQ ID NO: 206086 - DNA, 25 bp, SARS Virus
cgtctgagcagcataaacctgaacg

SEQ ID NO: 206087 - DNA, 25 bp, SARS Virus
gtctgagcagcgaaaacctgaacgg

SEQ ID NO: 206088 - DNA, 25 bp, SARS Virus
tctgagcagcgtaaacctgaacggt

SEQ ID NO: 206089 - DNA, 25 bp, SARS Virus
ctgagcagcgtaaacctgaacggta

SEQ ID NO: 206090 - DNA, 25 bp, SARS Virus
tgagcagcgtaaacctgaacggtag

SEQ ID NO: 206091 - DNA, 25 bp, SARS Virus
gagcagcgtaaaactgaacggtagt

SEQ ID NO: 206092 - DNA, 25 bp, SARS Virus
agcagcgtaaacatgaacggtagtt

SEQ ID NO: 206093 - DNA, 25 bp, SARS Virus
gcagcgtaaaccagaacggtagttt

SEQ ID NO: 206094 - DNA, 25 bp, SARS Virus
cagcgtaaacctaaacggtagtttt

SEQ ID NO: 206095 - DNA, 25 bp, SARS Virus
agcgtaaacctgaacggtagttttt

SEQ ID NO: 206096 - DNA, 25 bp, SARS Virus
gcgtaaacctgaacggtagtttttg

SEQ ID NO: 206097 - DNA, 25 bp, SARS Virus
cgtaaacctgaaaggtagtttttga

SEQ ID NO: 206098 - DNA, 25 bp, SARS Virus
gtaaacctgaacagtagtttttgat

SEQ ID NO: 206099 - DNA, 25 bp, SARS Virus
taaacctgaacgatagtttttgata

SEQ ID NO: 206100 - DNA, 25 bp, SARS Virus
aaacctgaacggaagtttttgatac

SEQ ID NO: 206101 - DNA, 25 bp, SARS Virus
aacctgaacggtagtttttgatact

SEQ ID NO: 206102 - DNA, 25 bp, SARS Virus
acctgaacggtaatttttgatactg

SEQ ID NO: 206103 - DNA, 25 bp, SARS Virus
cctgaacggtagattttgatactgt

SEQ ID NO: 206104 - DNA, 25 bp, SARS Virus
ctgaacggtagtatttgatactgta

SEQ ID NO: 206105 - DNA, 25 bp, SARS Virus
tgaacggtagttattgatactgtaa

SEQ ID NO: 206106 - DNA, 25 bp, SARS Virus
gaacggtagtttatgatactgtaat

SEQ ID NO: 206107 - DNA, 25 bp, SARS Virus
aacggtagttttagatactgtaatt

SEQ ID NO: 206108 - DNA, 25 bp, SARS Virus
acggtagtttttaatactgtaatta

SEQ ID NO: 206109 - DNA, 25 bp, SARS Virus
cggtagtttttgatactgtaattat

SEQ ID NO: 206110 - DNA, 25 bp, SARS Virus
ggtagtttttgaaactgtaattatc

SEQ ID NO: 206111 - DNA, 25 bp, SARS Virus
gtagtttttgatactgtaattatcc

SEQ ID NO: 206112 - DNA, 25 bp, SARS Virus
tagtttttgataatgtaattatccg

SEQ ID NO: 206113 - DNA, 25 bp, SARS Virus
agtttttgatacagtaattatccgt

SEQ ID NO: 206114 - DNA, 25 bp, SARS Virus
gtttttgatactataattatccgtc

SEQ ID NO: 206115 - DNA, 25 bp, SARS Virus
tttttgatactgaaattatccgtca

SEQ ID NO: 206116 - DNA, 25 bp, SARS Virus
ttttgatactgtaattatccgtcac

SEQ ID NO: 206117 - DNA, 25 bp, SARS Virus
tttgatactgtaattatccgtcact

SEQ ID NO: 206118 - DNA, 25 bp, SARS Virus
ttgatactgtaaatatccgtcactt

SEQ ID NO: 206119 - DNA, 25 bp, SARS Virus
tgatactgtaataatccgtcacttg

SEQ ID NO: 206120 - DNA, 25 bp, SARS Virus
gatactgtaattatccgtcacttgg

SEQ ID NO: 206121 - DNA, 25 bp, SARS Virus
atactgtaattaaccgtcacttgga

SEQ ID NO: 206122 - DNA, 25 bp, SARS Virus
tactgtaattatacgtcacttggaa

SEQ ID NO: 206123 - DNA, 25 bp, SARS Virus
actgtaattatcagtcacttggaaa

SEQ ID NO: 206124 - DNA, 25 bp, SARS Virus
ctgtaattatccatcacttggaaat

SEQ ID NO: 206125 - DNA, 25 bp, SARS Virus
tgtaattatccgacacttggaaatc

SEQ ID NO: 206126 - DNA, 25 bp, SARS Virus
gtaattatccgtaacttggaaatca

SEQ ID NO: 206127 - DNA, 25 bp, SARS Virus
taattatccgtcacttggaaatcac

SEQ ID NO: 206128 - DNA, 25 bp, SARS Virus
aattatccgtcaattggaaatcaca

SEQ ID NO: 206129 - DNA, 25 bp, SARS Virus
attatccgtcacatggaaatcacaa

SEQ ID NO: 206130 - DNA, 25 bp, SARS Virus
ttatccgtcactaggaaatcacaac

SEQ ID NO: 206131 - DNA, 25 bp, SARS Virus
tatccgtcacttagaaatcacaaca

SEQ ID NO: 206132 - DNA, 25 bp, SARS Virus
atccgtcacttgaaaatcacaacaa

SEQ ID NO: 206133 - DNA, 25 bp, SARS Virus
tccgtcacttggaaatcacaacaat

SEQ ID NO: 206134 - DNA, 25 bp, SARS Virus
ccgtcacttggaaatcacaacaatc

SEQ ID NO: 206135 - DNA, 25 bp, SARS Virus
cgtcacttggaaatcacaacaatcg

SEQ ID NO: 206136 - DNA, 25 bp, SARS Virus
gtcacttggaaaacacaacaatcga

SEQ ID NO: 206137 - DNA, 25 bp, SARS Virus
tcacttggaaataacaacaatcgag

SEQ ID NO: 206138 - DNA, 25 bp, SARS Virus
cacttggaaatcacaacaatcgaga

SEQ ID NO: 206139 - DNA, 25 bp, SARS Virus
acttggaaatcaaaacaatcgagag

SEQ ID NO: 206140 - DNA, 25 bp, SARS Virus
cttggaaatcacaacaatcgagagt

SEQ ID NO: 206141 - DNA, 25 bp, SARS Virus
ttggaaatcacaacaatcgagagtt

SEQ ID NO: 206142 - DNA, 25 bp, SARS Virus
tggaaatcacaaaaatcgagagttt

SEQ ID NO: 206143 - DNA, 25 bp, SARS Virus
ggaaatcacaacaatcgagagttta

SEQ ID NO: 206144 - DNA, 25 bp, SARS Virus
gaaatcacaacaatcgagagtttaa

SEQ ID NO: 206145 - DNA, 25 bp, SARS Virus
aaatcacaacaaacgagagtttaac

SEQ ID NO: 206146 - DNA, 25 bp, SARS Virus
aatcacaacaatagagagtttaaca

SEQ ID NO: 206147 - DNA, 25 bp, SARS Virus
atcacaacaatcaagagtttaacag

SEQ ID NO: 206148 - DNA, 25 bp, SARS Virus
tcacaacaatcgagagtttaacaga

SEQ ID NO: 206149 - DNA, 25 bp, SARS Virus
cacaacaatcgaaagtttaacagat

SEQ ID NO: 206150 - DNA, 25 bp, SARS Virus
acaacaatcgagagtttaacagatt

SEQ ID NO: 206151 - DNA, 25 bp, SARS Virus
caacaatcgagaatttaacagattt

SEQ ID NO: 206152 - DNA, 25 bp, SARS Virus
aacaatcgagagattaacagattta

SEQ ID NO: 206153 - DNA, 25 bp, SARS Virus
acaatcgagagtataacagatttaa

SEQ ID NO: 206154 - DNA, 25 bp, SARS Virus
caatcgagagttaaacagatttaac

SEQ ID NO: 206155 - DNA, 25 bp, SARS Virus
aatcgagagtttaacagatttaact

SEQ ID NO: 206156 - DNA, 25 bp, SARS Virus
atcgagagtttaacagatttaactg

SEQ ID NO: 206157 - DNA, 25 bp, SARS Virus
tcgagagtttaaaagatttaactgt

SEQ ID NO: 206158 - DNA, 25 bp, SARS Virus
cgagagtttaacagatttaactgtt

SEQ ID NO: 206159 - DNA, 25 bp, SARS Virus
gagagtttaacaaatttaactgttt

SEQ ID NO: 206160 - DNA, 25 bp, SARS Virus
agagtttaacagatttaactgtttt

SEQ ID NO: 206161 - DNA, 25 bp, SARS Virus
gagtttaacagaattaactgtttta

SEQ ID NO: 206162 - DNA, 25 bp, SARS Virus
agtttaacagatataactgttttac

SEQ ID NO: 206163 - DNA, 25 bp, SARS Virus
gtttaacagattaaactgttttacc

SEQ ID NO: 206164 - DNA, 25 bp, SARS Virus
tttaacagatttaactgttttaccc

SEQ ID NO: 206165 - DNA, 25 bp, SARS Virus
ttaacagatttaactgttttaccct

SEQ ID NO: 206166 - DNA, 25 bp, SARS Virus
taacagatttaaatgttttaccctc

SEQ ID NO: 206167 - DNA, 25 bp, SARS Virus
aacagatttaacagttttaccctct

SEQ ID NO: 206168 - DNA, 25 bp, SARS Virus
acagatttaactattttaccctctc

SEQ ID NO: 206169 - DNA, 25 bp, SARS Virus
cagatttaactgatttaccctctcg

SEQ ID NO: 206170 - DNA, 25 bp, SARS Virus
agatttaactgtattaccctctcgc

SEQ ID NO: 206171 - DNA, 25 bp, SARS Virus
gatttaactgttataccctctcgcc

SEQ ID NO: 206172 - DNA, 25 bp, SARS Virus
atttaactgtttaaccctctcgcct

SEQ ID NO: 206173 - DNA, 25 bp, SARS Virus
tttaactgttttaccctctcgccta

SEQ ID NO: 206174 - DNA, 25 bp, SARS Virus
ttaactgttttaacctctcgcctac

SEQ ID NO: 206175 - DNA, 25 bp, SARS Virus
taactgttttacactctcgcctaca

SEQ ID NO: 206176 - DNA, 25 bp, SARS Virus
aactgttttaccatctcgcctacag

SEQ ID NO: 206177 - DNA, 25 bp, SARS Virus
actgttttacccactcgcctacaga

SEQ ID NO: 206178 - DNA, 25 bp, SARS Virus
ctgttttaccctatcgcctacagag

SEQ ID NO: 206179 - DNA, 25 bp, SARS Virus
tgttttaccctcacgcctacagaga

SEQ ID NO: 206180 - DNA, 25 bp, SARS Virus
gttttaccctctagcctacagagag

SEQ ID NO: 206181 - DNA, 25 bp, SARS Virus
ttttaccctctcacctacagagagt

SEQ ID NO: 206182 - DNA, 25 bp, SARS Virus
tttaccctctcgactacagagagta

SEQ ID NO: 206183 - DNA, 25 bp, SARS Virus
ttaccctctcgcatacagagagtat

SEQ ID NO: 206184 - DNA, 25 bp, SARS Virus
taccctctcgccaacagagagtatc

SEQ ID NO: 206185 - DNA, 25 bp, SARS Virus
accctctcgcctacagagagtatcc

SEQ ID NO: 206186 - DNA, 25 bp, SARS Virus
ccctctcgcctaaagagagtatcca

SEQ ID NO: 206187 - DNA, 25 bp, SARS Virus
cctctcgcctacagagagtatccag

SEQ ID NO: 206188 - DNA, 25 bp, SARS Virus
ctctcgcctacaaagagtatccaga

SEQ ID NO: 206189 - DNA, 25 bp, SARS Virus
tctcgcctacagagagtatccagaa

SEQ ID NO: 206190 - DNA, 25 bp, SARS Virus
ctcgcctacagaaagtatccagaaa

SEQ ID NO: 206191 - DNA, 25 bp, SARS Virus
tcgcctacagagagtatccagaaaa

SEQ ID NO: 206192 - DNA, 25 bp, SARS Virus
cgcctacagagaatatccagaaaac

SEQ ID NO: 206193 - DNA, 25 bp, SARS Virus
gcctacagagagaatccagaaaact

SEQ ID NO: 206194 - DNA, 25 bp, SARS Virus
cctacagagagtatccagaaaactg

SEQ ID NO: 206195 - DNA, 25 bp, SARS Virus
ctacagagagtaaccagaaaactgg

SEQ ID NO: 206196 - DNA, 25 bp, SARS Virus
tacagagagtatacagaaaactggt

SEQ ID NO: 206197 - DNA, 25 bp, SARS Virus
acagagagtatcaagaaaactggtc

SEQ ID NO: 206198 - DNA, 25 bp, SARS Virus
cagagagtatccagaaaactggtcg

SEQ ID NO: 206199 - DNA, 25 bp, SARS Virus
agagagtatccaaaaaactggtcgg

SEQ ID NO: 206200 - DNA, 25 bp, SARS Virus
gagagtatccagaaaactggtcgga

SEQ ID NO: 206201 - DNA, 25 bp, SARS Virus
agagtatccagaaaactggtcggaa

SEQ ID NO: 206202 - DNA, 25 bp, SARS Virus
gagtatccagaaaactggtcggaac

SEQ ID NO: 206203 - DNA, 25 bp, SARS Virus
agtatccagaaaactggtcggaaca

SEQ ID NO: 206204 - DNA, 25 bp, SARS Virus
gtatccagaaaaatggtcggaacag

SEQ ID NO: 206205 - DNA, 25 bp, SARS Virus
tatccagaaaacaggtcggaacagt

SEQ ID NO: 206206 - DNA, 25 bp, SARS Virus
atccagaaaactagtcggaacagtt

SEQ ID NO: 206207 - DNA, 25 bp, SARS Virus
tccagaaaactgatcggaacagttt

SEQ ID NO: 206208 - DNA, 25 bp, SARS Virus
ccagaaaactggacggaacagtttc

SEQ ID NO: 206209 - DNA, 25 bp, SARS Virus
cagaaaactggtaggaacagtttca

SEQ ID NO: 206210 - DNA, 25 bp, SARS Virus
agaaaactggtcagaacagtttcat

SEQ ID NO: 206211 - DNA, 25 bp, SARS Virus
gaaaactggtcgaaacagtttcatc

SEQ ID NO: 206212 - DNA, 25 bp, SARS Virus
aaaactggtcggaacagtttcatct

SEQ ID NO: 206213 - DNA, 25 bp, SARS Virus
aaactggtcggaacagtttcatctc

SEQ ID NO: 206214 - DNA, 25 bp, SARS Virus
aactggtcggaaaagtttcatctcc

SEQ ID NO: 206215 - DNA, 25 bp, SARS Virus
actggtcggaacagtttcatctcca

SEQ ID NO: 206216 - DNA, 25 bp, SARS Virus
ctggtcggaacaatttcatctccac

SEQ ID NO: 206217 - DNA, 25 bp, SARS Virus
tggtcggaacagattcatctccact

SEQ ID NO: 206218 - DNA, 25 bp, SARS Virus
ggtcggaacagtatcatctccactt

SEQ ID NO: 206219 - DNA, 25 bp, SARS Virus
gtcggaacagttacatctccacttc

SEQ ID NO: 206220 - DNA, 25 bp, SARS Virus
tcggaacagtttaatctccacttcg

SEQ ID NO: 206221 - DNA, 25 bp, SARS Virus
cggaacagtttcatctccacttcgc

SEQ ID NO: 206222 - DNA, 25 bp, SARS Virus
ggaacagtttcaactccacttcgcg

SEQ ID NO: 206223 - DNA, 25 bp, SARS Virus
gaacagtttcatatccacttcgcgc

SEQ ID NO: 206224 - DNA, 25 bp, SARS Virus
aacagtttcatcaccacttcgcgcg

SEQ ID NO: 206225 - DNA, 25 bp, SARS Virus
acagtttcatctacacttcgcgcgg

SEQ ID NO: 206226 - DNA, 25 bp, SARS Virus
cagtttcatctcaacttcgcgcggt

SEQ ID NO: 206227 - DNA, 25 bp, SARS Virus
agtttcatctccacttcgcgcggta

SEQ ID NO: 206228 - DNA, 25 bp, SARS Virus
gtttcatctccaattcgcgcggtaa

SEQ ID NO: 206229 - DNA, 25 bp, SARS Virus
tttcatctccacatcgcgcggtaaa

SEQ ID NO: 206230 - DNA, 25 bp, SARS Virus
ttcatctccactacgcgcggtaaaa

SEQ ID NO: 206231 - DNA, 25 bp, SARS Virus
tcatctccacttagcgcggtaaaaa

SEQ ID NO: 206232 - DNA, 25 bp, SARS Virus
catctccacttcacgcggtaaaaag

SEQ ID NO: 206233 - DNA, 25 bp, SARS Virus
atctccacttcgagcggtaaaaagt

SEQ ID NO: 206234 - DNA, 25 bp, SARS Virus
tctccacttcgcacggtaaaaagtg

SEQ ID NO: 206235 - DNA, 25 bp, SARS Virus
ctccacttcgcgaggtaaaaagtgt

SEQ ID NO: 206236 - DNA, 25 bp, SARS Virus
tccacttcgcgcagtaaaaagtgtc

SEQ ID NO: 206237 - DNA, 25 bp, SARS Virus
ccacttcgcgcgataaaaagtgtcg

SEQ ID NO: 206238 - DNA, 25 bp, SARS Virus
cacttcgcgcggaaaaaagtgtcgt

SEQ ID NO: 206239 - DNA, 25 bp, SARS Virus
acttcgcgcggtaaaaagtgtcgtt

SEQ ID NO: 206240 - DNA, 25 bp, SARS Virus
cttcgcgcggtaaaaagtgtcgttg

SEQ ID NO: 206241 - DNA, 25 bp, SARS Virus
ttcgcgcggtaaaaagtgtcgttgt

SEQ ID NO: 206242 - DNA, 25 bp, SARS Virus
tcgcgcggtaaaaagtgtcgttgtg

SEQ ID NO: 206243 - DNA, 25 bp, SARS Virus
cgcgcggtaaaaagtgtcgttgtga

SEQ ID NO: 206244 - DNA, 25 bp, SARS Virus
gcgcggtaaaaaatgtcgttgtgat

SEQ ID NO: 206245 - DNA, 25 bp, SARS Virus
cgcggtaaaaagagtcgttgtgata

SEQ ID NO: 206246 - DNA, 25 bp, SARS Virus
gcggtaaaaagtatcgttgtgatag

SEQ ID NO: 206247 - DNA, 25 bp, SARS Virus
cggtaaaaagtgacgttgtgatagt

SEQ ID NO: 206248 - DNA, 25 bp, SARS Virus
ggtaaaaagtgtagttgtgatagtt

SEQ ID NO: 206249 - DNA, 25 bp, SARS Virus
gtaaaaagtgtcattgtgatagttg

SEQ ID NO: 206250 - DNA, 25 bp, SARS Virus
taaaaagtgtcgatgtgatagttgt

SEQ ID NO: 206251 - DNA, 25 bp, SARS Virus
aaaaagtgtcgtagtgatagttgtt

SEQ ID NO: 206252 - DNA, 25 bp, SARS Virus
aaaagtgtcgttatgatagttgtta

SEQ ID NO: 206253 - DNA, 25 bp, SARS Virus
aaagtgtcgttgagatagttgttat

SEQ ID NO: 206254 - DNA, 25 bp, SARS Virus
aagtgtcgttgtaatagttgttata

SEQ ID NO: 206255 - DNA, 25 bp, SARS Virus
agtgtcgttgtgatagttgttatat

SEQ ID NO: 206256 - DNA, 25 bp, SARS Virus
gtgtcgttgtgaaagttgttatatg

SEQ ID NO: 206257 - DNA, 25 bp, SARS Virus
tgtcgttgtgatagttgttatatgc

SEQ ID NO: 206258 - DNA, 25 bp, SARS Virus
gtcgttgtgataattgttatatgct

SEQ ID NO: 206259 - DNA, 25 bp, SARS Virus
tcgttgtgatagatgttatatgcta

SEQ ID NO: 206260 - DNA, 25 bp, SARS Virus
cgttgtgatagtagttatatgctac

SEQ ID NO: 206261 - DNA, 25 bp, SARS Virus
gttgtgatagttattatatgctact

SEQ ID NO: 206262 - DNA, 25 bp, SARS Virus
ttgtgatagttgatatatgctactg

SEQ ID NO: 206263 - DNA, 25 bp, SARS Virus
tgtgatagttgtaatatgctactga

SEQ ID NO: 206264 - DNA, 25 bp, SARS Virus
gtgatagttgttatatgctactgac

SEQ ID NO: 206265 - DNA, 25 bp, SARS Virus
tgatagttgttaaatgctactgacc

SEQ ID NO: 206266 - DNA, 25 bp, SARS Virus
gatagttgttatatgctactgacca

SEQ ID NO: 206267 - DNA, 25 bp, SARS Virus
atagttgttataagctactgaccag

SEQ ID NO: 206268 - DNA, 25 bp, SARS Virus
tagttgttatatactactgaccagt

SEQ ID NO: 206269 - DNA, 25 bp, SARS Virus
agttgttatatgatactgaccagtc

SEQ ID NO: 206270 - DNA, 25 bp, SARS Virus
gttgttatatgcaactgaccagtca

SEQ ID NO: 206271 - DNA, 25 bp, SARS Virus
ttgttatatgctactgaccagtcat

SEQ ID NO: 206272 - DNA, 25 bp, SARS Virus
tgttatatgctaatgaccagtcatc

SEQ ID NO: 206273 - DNA, 25 bp, SARS Virus
gttatatgctacagaccagtcatcc

SEQ ID NO: 206274 - DNA, 25 bp, SARS Virus
ttatatgctactaaccagtcatccc

SEQ ID NO: 206275 - DNA, 25 bp, SARS Virus
tatatgctactgaccagtcatccca

SEQ ID NO: 206276 - DNA, 25 bp, SARS Virus
atatgctactgaacagtcatcccaa

SEQ ID NO: 206277 - DNA, 25 bp, SARS Virus
tatgctactgacaagtcatcccaac

SEQ ID NO: 206278 - DNA, 25 bp, SARS Virus
atgctactgaccagtcatcccaact

SEQ ID NO: 206279 - DNA, 25 bp, SARS Virus
tgctactgaccaatcatcccaacta

SEQ ID NO: 206280 - DNA, 25 bp, SARS Virus
gctactgaccagacatcccaactaa

SEQ ID NO: 206281 - DNA, 25 bp, SARS Virus
ctactgaccagtaatcccaactaac

SEQ ID NO: 206282 - DNA, 25 bp, SARS Virus
tactgaccagtcatcccaactaacc

SEQ ID NO: 206283 - DNA, 25 bp, SARS Virus
actgaccagtcaacccaactaacca

SEQ ID NO: 206284 - DNA, 25 bp, SARS Virus
ctgaccagtcataccaactaaccag

SEQ ID NO: 206285 - DNA, 25 bp, SARS Virus
tgaccagtcatcacaactaaccaga

SEQ ID NO: 206286 - DNA, 25 bp, SARS Virus
gaccagtcatccaaactaaccagaa

SEQ ID NO: 206287 - DNA, 25 bp, SARS Virus
accagtcatcccaactaaccagaaa

SEQ ID NO: 206288 - DNA, 25 bp, SARS Virus
ccagtcatcccaactaaccagaaaa

SEQ ID NO: 206289 - DNA, 25 bp, SARS Virus
cagtcatcccaaataaccagaaaat

SEQ ID NO: 206290 - DNA, 25 bp, SARS Virus
agtcatcccaacaaaccagaaaatt

SEQ ID NO: 206291 - DNA, 25 bp, SARS Virus
gtcatcccaactaaccagaaaattt

SEQ ID NO: 206292 - DNA, 25 bp, SARS Virus
tcatcccaactaaccagaaaatttg

SEQ ID NO: 206293 - DNA, 25 bp, SARS Virus
catcccaactaaacagaaaatttga

SEQ ID NO: 206294 - DNA, 25 bp, SARS Virus
atcccaactaacaagaaaatttgac

SEQ ID NO: 206295 - DNA, 25 bp, SARS Virus
tcccaactaaccagaaaatttgacc

SEQ ID NO: 206296 - DNA, 25 bp, SARS Virus
cccaactaaccaaaaaatttgacct

SEQ ID NO: 206297 - DNA, 25 bp, SARS Virus
ccaactaaccagaaaatttgacctc

SEQ ID NO: 206298 - DNA, 25 bp, SARS Virus
caactaaccagaaaatttgacctca

SEQ ID NO: 206299 - DNA, 25 bp, SARS Virus
aactaaccagaaaatttgacctcac

SEQ ID NO: 206300 - DNA, 25 bp, SARS Virus
actaaccagaaaatttgacctcact

SEQ ID NO: 206301 - DNA, 25 bp, SARS Virus
ctaaccagaaaaattgacctcactg

SEQ ID NO: 206302 - DNA, 25 bp, SARS Virus
taaccagaaaatatgacctcactgt

SEQ ID NO: 206303 - DNA, 25 bp, SARS Virus
aaccagaaaattagacctcactgtt

SEQ ID NO: 206304 - DNA, 25 bp, SARS Virus
accagaaaatttaacctcactgttt

SEQ ID NO: 206305 - DNA, 25 bp, SARS Virus
ccagaaaatttgacctcactgttta

SEQ ID NO: 206306 - DNA, 25 bp, SARS Virus
cagaaaatttgaactcactgtttag

SEQ ID NO: 206307 - DNA, 25 bp, SARS Virus
agaaaatttgacatcactgtttagt

SEQ ID NO: 206308 - DNA, 25 bp, SARS Virus
gaaaatttgaccacactgtttagtg

SEQ ID NO: 206309 - DNA, 25 bp, SARS Virus
aaaatttgacctaactgtttagtgc

SEQ ID NO: 206310 - DNA, 25 bp, SARS Virus
aaatttgacctcactgtttagtgct

SEQ ID NO: 206311 - DNA, 25 bp, SARS Virus
aatttgacctcaatgtttagtgctc

SEQ ID NO: 206312 - DNA, 25 bp, SARS Virus
atttgacctcacagtttagtgctcg

SEQ ID NO: 206313 - DNA, 25 bp, SARS Virus
tttgacctcactatttagtgctcgt

SEQ ID NO: 206314 - DNA, 25 bp, SARS Virus
ttgacctcactgattagtgctcgtt

SEQ ID NO: 206315 - DNA, 25 bp, SARS Virus
tgacctcactgtatagtgctcgttg

SEQ ID NO: 206316 - DNA, 25 bp, SARS Virus
gacctcactgttaagtgctcgttga

SEQ ID NO: 206317 - DNA, 25 bp, SARS Virus
acctcactgtttagtgctcgttgaa

SEQ ID NO: 206318 - DNA, 25 bp, SARS Virus
cctcactgtttaatgctcgttgaag

SEQ ID NO: 206319 - DNA, 25 bp, SARS Virus
ctcactgtttagagctcgttgaagt

SEQ ID NO: 206320 - DNA, 25 bp, SARS Virus
tcactgtttagtactcgttgaagta

SEQ ID NO: 206321 - DNA, 25 bp, SARS Virus
cactgtttagtgatcgttgaagtag

SEQ ID NO: 206322 - DNA, 25 bp, SARS Virus
actgtttagtgcacgttgaagtagt

SEQ ID NO: 206323 - DNA, 25 bp, SARS Virus
ctgtttagtgctagttgaagtagtg

SEQ ID NO: 206324 - DNA, 25 bp, SARS Virus
tgtttagtgctcattgaagtagtga

SEQ ID NO: 206325 - DNA, 25 bp, SARS Virus
gtttagtgctcgatgaagtagtgat

SEQ ID NO: 206326 - DNA, 25 bp, SARS Virus
tttagtgctcgtagaagtagtgatt

SEQ ID NO: 206327 - DNA, 25 bp, SARS Virus
ttagtgctcgttaaagtagtgatta

SEQ ID NO: 206328 - DNA, 25 bp, SARS Virus
tagtgctcgttgaagtagtgattac

SEQ ID NO: 206329 - DNA, 25 bp, SARS Virus
agtgctcgttgaagtagtgattact

SEQ ID NO: 206330 - DNA, 25 bp, SARS Virus
gtgctcgttgaaatagtgattactt

SEQ ID NO: 206331 - DNA, 25 bp, SARS Virus
tgctcgttgaagaagtgattactta

SEQ ID NO: 206332 - DNA, 25 bp, SARS Virus
gctcgttgaagtagtgattacttac

SEQ ID NO: 206333 - DNA, 25 bp, SARS Virus
ctcgttgaagtaatgattacttaca

SEQ ID NO: 206334 - DNA, 25 bp, SARS Virus
tcgttgaagtagagattacttacat

SEQ ID NO: 206335 - DNA, 25 bp, SARS Virus
cgttgaagtagtaattacttacatg

SEQ ID NO: 206336 - DNA, 25 bp, SARS Virus
gttgaagtagtgattacttacatga

SEQ ID NO: 206337 - DNA, 25 bp, SARS Virus
ttgaagtagtgaatacttacatgat

SEQ ID NO: 206338 - DNA, 25 bp, SARS Virus
tgaagtagtgataacttacatgatg

SEQ ID NO: 206339 - DNA, 25 bp, SARS Virus
gaagtagtgattacttacatgatgg

SEQ ID NO: 206340 - DNA, 25 bp, SARS Virus
aagtagtgattaattacatgatggt

SEQ ID NO: 206341 - DNA, 25 bp, SARS Virus
agtagtgattacatacatgatggtc

SEQ ID NO: 206342 - DNA, 25 bp, SARS Virus
gtagtgattactaacatgatggtca

SEQ ID NO: 206343 - DNA, 25 bp, SARS Virus
tagtgattacttacatgatggtcac

SEQ ID NO: 206344 - DNA, 25 bp, SARS Virus
agtgattacttaaatgatggtcacg

SEQ ID NO: 206345 - DNA, 25 bp, SARS Virus
gtgattacttacatgatggtcacgt

SEQ ID NO: 206346 - DNA, 25 bp, SARS Virus
tgattacttacaagatggtcacgtt

SEQ ID NO: 206347 - DNA, 25 bp, SARS Virus
gattacttacataatggtcacgttt

SEQ ID NO: 206348 - DNA, 25 bp, SARS Virus
attacttacatgatggtcacgtttt

SEQ ID NO: 206349 - DNA, 25 bp, SARS Virus
ttacttacatgaaggtcacgtttta

SEQ ID NO: 206350 - DNA, 25 bp, SARS Virus
tacttacatgatagtcacgttttac

SEQ ID NO: 206351 - DNA, 25 bp, SARS Virus
acttacatgatgatcacgttttaca

SEQ ID NO: 206352 - DNA, 25 bp, SARS Virus
cttacatgatggacacgttttacac

SEQ ID NO: 206353 - DNA, 25 bp, SARS Virus
ttacatgatggtaacgttttacaca

SEQ ID NO: 206354 - DNA, 25 bp, SARS Virus
tacatgatggtcacgttttacacag

SEQ ID NO: 206355 - DNA, 25 bp, SARS Virus
acatgatggtcaagttttacacagt

SEQ ID NO: 206356 - DNA, 25 bp, SARS Virus
catgatggtcacattttacacagtg

SEQ ID NO: 206357 - DNA, 25 bp, SARS Virus
atgatggtcacgatttacacagtgt

SEQ ID NO: 206358 - DNA, 25 bp, SARS Virus
tgatggtcacgtattacacagtgtt

SEQ ID NO: 206359 - DNA, 25 bp, SARS Virus
gatggtcacgttatacacagtgtta

SEQ ID NO: 206360 - DNA, 25 bp, SARS Virus
atggtcacgtttaacacagtgttaa

SEQ ID NO: 206361 - DNA, 25 bp, SARS Virus
tggtcacgttttacacagtgttaac

SEQ ID NO: 206362 - DNA, 25 bp, SARS Virus
ggtcacgttttaaacagtgttaact

SEQ ID NO: 206363 - DNA, 25 bp, SARS Virus
gtcacgttttacacagtgttaactc

SEQ ID NO: 206364 - DNA, 25 bp, SARS Virus
tcacgttttacaaagtgttaactct

SEQ ID NO: 206365 - DNA, 25 bp, SARS Virus
cacgttttacacagtgttaactctg

SEQ ID NO: 206366 - DNA, 25 bp, SARS Virus
acgttttacacaatgttaactctgt

SEQ ID NO: 206367 - DNA, 25 bp, SARS Virus
cgttttacacagagttaactctgtt

SEQ ID NO: 206368 - DNA, 25 bp, SARS Virus
gttttacacagtattaactctgtta

SEQ ID NO: 206369 - DNA, 25 bp, SARS Virus
ttttacacagtgataactctgttaa

SEQ ID NO: 206370 - DNA, 25 bp, SARS Virus
tttacacagtgtaaactctgttaag

SEQ ID NO: 206371 - DNA, 25 bp, SARS Virus
ttacacagtgttaactctgttaagg

SEQ ID NO: 206372 - DNA, 25 bp, SARS Virus
tacacagtgttaactctgttaaggt

SEQ ID NO: 206373 - DNA, 25 bp, SARS Virus
acacagtgttaaatctgttaaggtt

SEQ ID NO: 206374 - DNA, 25 bp, SARS Virus
cacagtgttaacactgttaaggtta

SEQ ID NO: 206375 - DNA, 25 bp, SARS Virus
acagtgttaactatgttaaggttaa

SEQ ID NO: 206376 - DNA, 25 bp, SARS Virus
cagtgttaactcagttaaggttaac

SEQ ID NO: 206377 - DNA, 25 bp, SARS Virus
agtgttaactctattaaggttaaca

SEQ ID NO: 206378 - DNA, 25 bp, SARS Virus
gtgttaactctgataaggttaacac

SEQ ID NO: 206379 - DNA, 25 bp, SARS Virus
tgttaactctgtaaaggttaacact

SEQ ID NO: 206380 - DNA, 25 bp, SARS Virus
gttaactctgttaaggttaacactc

SEQ ID NO: 206381 - DNA, 25 bp, SARS Virus
ttaactctgttaaggttaacactca

SEQ ID NO: 206382 - DNA, 25 bp, SARS Virus
taactctgttaaagttaacactcag

SEQ ID NO: 206383 - DNA, 25 bp, SARS Virus
aactctgttaagattaacactcaga

SEQ ID NO: 206384 - DNA, 25 bp, SARS Virus
actctgttaaggataacactcagaa

SEQ ID NO: 206385 - DNA, 25 bp, SARS Virus
ctctgttaaggtaaacactcagaac

SEQ ID NO: 206386 - DNA, 25 bp, SARS Virus
tctgttaaggttaacactcagaacg

SEQ ID NO: 206387 - DNA, 25 bp, SARS Virus
ctgttaaggttaacactcagaacgt

SEQ ID NO: 206388 - DNA, 25 bp, SARS Virus
tgttaaggttaaaactcagaacgtc

SEQ ID NO: 206389 - DNA, 25 bp, SARS Virus
gttaaggttaacactcagaacgtct

SEQ ID NO: 206390 - DNA, 25 bp, SARS Virus
ttaaggttaacaatcagaacgtctt

SEQ ID NO: 206391 - DNA, 25 bp, SARS Virus
taaggttaacacacagaacgtcttc

SEQ ID NO: 206392 - DNA, 25 bp, SARS Virus
aaggttaacactaagaacgtcttcg

SEQ ID NO: 206393 - DNA, 25 bp, SARS Virus
aggttaacactcagaacgtcttcgg

SEQ ID NO: 206394 - DNA, 25 bp, SARS Virus
ggttaacactcaaaacgtcttcggt

SEQ ID NO: 206395 - DNA, 25 bp, SARS Virus
gttaacactcagaacgtcttcggtg

SEQ ID NO: 206396 - DNA, 25 bp, SARS Virus
ttaacactcagaacgtcttcggtgc

SEQ ID NO: 206397 - DNA, 25 bp, SARS Virus
taacactcagaaagtcttcggtgcc

SEQ ID NO: 206398 - DNA, 25 bp, SARS Virus
aacactcagaacatcttcggtgccg

SEQ ID NO: 206399 - DNA, 25 bp, SARS Virus
acactcagaacgacttcggtgccgg

SEQ ID NO: 206400 - DNA, 25 bp, SARS Virus
cactcagaacgtattcggtgccgga

SEQ ID NO: 206401 - DNA, 25 bp, SARS Virus
actcagaacgtcatcggtgccggag

SEQ ID NO: 206402 - DNA, 25 bp, SARS Virus
ctcagaacgtctacggtgccggagg

SEQ ID NO: 206403 - DNA, 25 bp, SARS Virus
tcagaacgtcttaggtgccggaggt

SEQ ID NO: 206404 - DNA, 25 bp, SARS Virus
cagaacgtcttcagtgccggaggta

SEQ ID NO: 206405 - DNA, 25 bp, SARS Virus
agaacgtcttcgatgccggaggtaa

SEQ ID NO: 206406 - DNA, 25 bp, SARS Virus
gaacgtcttcggagccggaggtaaa

SEQ ID NO: 206407 - DNA, 25 bp, SARS Virus
aacgtcttcggtaccggaggtaaac

SEQ ID NO: 206408 - DNA, 25 bp, SARS Virus
acgtcttcggtgacggaggtaaacg

SEQ ID NO: 206409 - DNA, 25 bp, SARS Virus
cgtcttcggtgcaggaggtaaacgt

SEQ ID NO: 206410 - DNA, 25 bp, SARS Virus
gtcttcggtgccagaggtaaacgta

SEQ ID NO: 206411 - DNA, 25 bp, SARS Virus
tcttcggtgccgaaggtaaacgtat

SEQ ID NO: 206412 - DNA, 25 bp, SARS Virus
cttcggtgccggaggtaaacgtatc

SEQ ID NO: 206413 - DNA, 25 bp, SARS Virus
ttcggtgccggaagtaaacgtatct

SEQ ID NO: 206414 - DNA, 25 bp, SARS Virus
tcggtgccggagataaacgtatctg

SEQ ID NO: 206415 - DNA, 25 bp, SARS Virus
cggtgccggaggaaaacgtatctgt

SEQ ID NO: 206416 - DNA, 25 bp, SARS Virus
ggtgccggaggtaaacgtatctgta

SEQ ID NO: 206417 - DNA, 25 bp, SARS Virus
gtgccggaggtaaacgtatctgtat

SEQ ID NO: 206418 - DNA, 25 bp, SARS Virus
tgccggaggtaaacgtatctgtatc

SEQ ID NO: 206419 - DNA, 25 bp, SARS Virus
gccggaggtaaaagtatctgtatct

SEQ ID NO: 206420 - DNA, 25 bp, SARS Virus
ccggaggtaaacatatctgtatctt

SEQ ID NO: 206421 - DNA, 25 bp, SARS Virus
cggaggtaaacgaatctgtatcttt

SEQ ID NO: 206422 - DNA, 25 bp, SARS Virus
ggaggtaaacgtatctgtatctttc

SEQ ID NO: 206423 - DNA, 25 bp, SARS Virus
gaggtaaacgtaactgtatctttct

SEQ ID NO: 206424 - DNA, 25 bp, SARS Virus
aggtaaacgtatatgtatctttcta

SEQ ID NO: 206425 - DNA, 25 bp, SARS Virus
ggtaaacgtatcagtatctttctag

SEQ ID NO: 206426 - DNA, 25 bp, SARS Virus
gtaaacgtatctatatctttctaga

SEQ ID NO: 206427 - DNA, 25 bp, SARS Virus
taaacgtatctgaatctttctagag

SEQ ID NO: 206428 - DNA, 25 bp, SARS Virus
aaacgtatctgtatctttctagaga

SEQ ID NO: 206429 - DNA, 25 bp, SARS Virus
aacgtatctgtaactttctagagaa

SEQ ID NO: 206430 - DNA, 25 bp, SARS Virus
acgtatctgtatatttctagagaag

SEQ ID NO: 206431 - DNA, 25 bp, SARS Virus
cgtatctgtatcattctagagaagt

SEQ ID NO: 206432 - DNA, 25 bp, SARS Virus
gtatctgtatctatctagagaagta

SEQ ID NO: 206433 - DNA, 25 bp, SARS Virus
tatctgtatcttactagagaagtac

SEQ ID NO: 206434 - DNA, 25 bp, SARS Virus
atctgtatctttatagagaagtacg

SEQ ID NO: 206435 - DNA, 25 bp, SARS Virus
tctgtatctttcaagagaagtacgg

SEQ ID NO: 206436 - DNA, 25 bp, SARS Virus
ctgtatctttctagagaagtacggt

SEQ ID NO: 206437 - DNA, 25 bp, SARS Virus
tgtatctttctaaagaagtacggta

SEQ ID NO: 206438 - DNA, 25 bp, SARS Virus
gtatctttctagagaagtacggtaa

SEQ ID NO: 206439 - DNA, 25 bp, SARS Virus
tatctttctagaaaagtacggtaat

SEQ ID NO: 206440 - DNA, 25 bp, SARS Virus
atctttctagagaagtacggtaatt

SEQ ID NO: 206441 - DNA, 25 bp, SARS Virus
tctttctagagaagtacggtaattg

SEQ ID NO: 206442 - DNA, 25 bp, SARS Virus
ctttctagagaaatacggtaattgt

SEQ ID NO: 206443 - DNA, 25 bp, SARS Virus
tttctagagaagaacggtaattgtt

SEQ ID NO: 206444 - DNA, 25 bp, SARS Virus
ttctagagaagtacggtaattgtta

SEQ ID NO: 206445 - DNA, 25 bp, SARS Virus
tctagagaagtaaggtaattgttat

SEQ ID NO: 206446 - DNA, 25 bp, SARS Virus
ctagagaagtacagtaattgttatc

SEQ ID NO: 206447 - DNA, 25 bp, SARS Virus
tagagaagtacgataattgttatca

SEQ ID NO: 206448 - DNA, 25 bp, SARS Virus
agagaagtacggaaattgttatcaa

SEQ ID NO: 206449 - DNA, 25 bp, SARS Virus
gagaagtacggtaattgttatcaac

SEQ ID NO: 206450 - DNA, 25 bp, SARS Virus
agaagtacggtaattgttatcaaca

SEQ ID NO: 206451 - DNA, 25 bp, SARS Virus
gaagtacggtaaatgttatcaacat

SEQ ID NO: 206452 - DNA, 25 bp, SARS Virus
aagtacggtaatagttatcaacatg

SEQ ID NO: 206453 - DNA, 25 bp, SARS Virus
agtacggtaattattatcaacatgt

SEQ ID NO: 206454 - DNA, 25 bp, SARS Virus
gtacggtaattgatatcaacatgtg

SEQ ID NO: 206455 - DNA, 25 bp, SARS Virus
tacggtaattgtaatcaacatgtga

SEQ ID NO: 206456 - DNA, 25 bp, SARS Virus
acggtaattgttatcaacatgtgag

SEQ ID NO: 206457 - DNA, 25 bp, SARS Virus
agtttgtagaatcgcctttgaagtc

SEQ ID NO: 206458 - DNA, 25 bp, SARS Virus
gtttgtagaattccctttgaagtca

SEQ ID NO: 206459 - DNA, 25 bp, SARS Virus
tttgtagaattgcctttgaagtcat

SEQ ID NO: 206460 - DNA, 25 bp, SARS Virus
ttgtagaattgcctttgaagtcatg

SEQ ID NO: 206461 - DNA, 25 bp, SARS Virus
tgtagaattgcccttgaagtcatga

SEQ ID NO: 206462 - DNA, 25 bp, SARS Virus
gtagaattgcctctgaagtcatgat

SEQ ID NO: 206463 - DNA, 25 bp, SARS Virus
tagaattgccttcgaagtcatgata

SEQ ID NO: 206464 - DNA, 25 bp, SARS Virus
agaattgcctttcaagtcatgatag

SEQ ID NO: 206465 - DNA, 25 bp, SARS Virus
gaattgcctttgcagtcatgataga

SEQ ID NO: 206466 - DNA, 25 bp, SARS Virus
aattgcctttgacgtcatgatagag

SEQ ID NO: 206467 - DNA, 25 bp, SARS Virus
attgcctttgaactcatgatagagg

SEQ ID NO: 206468 - DNA, 25 bp, SARS Virus
ttgcctttgaagccatgatagaggt

SEQ ID NO: 206469 - DNA, 25 bp, SARS Virus
tgcctttgaagtcatgatagaggtt

SEQ ID NO: 206470 - DNA, 25 bp, SARS Virus
gcctttgaagtcctgatagaggttg

SEQ ID NO: 206471 - DNA, 25 bp, SARS Virus
cctttgaagtcacgatagaggttgc

SEQ ID NO: 206472 - DNA, 25 bp, SARS Virus
ctttgaagtcatcatagaggttgca

SEQ ID NO: 206473 - DNA, 25 bp, SARS Virus
tttgaagtcatgctagaggttgcag

SEQ ID NO: 206474 - DNA, 25 bp, SARS Virus
ttgaagtcatgacagaggttgcaga

SEQ ID NO: 206475 - DNA, 25 bp, SARS Virus
tgaagtcatgatcgaggttgcagac

SEQ ID NO: 206476 - DNA, 25 bp, SARS Virus
gaagtcatgatacaggttgcagact

SEQ ID NO: 206477 - DNA, 25 bp, SARS Virus
aagtcatgatagcggttgcagacta

SEQ ID NO: 206478 - DNA, 25 bp, SARS Virus
agtcatgatagacgttgcagactat

SEQ ID NO: 206479 - DNA, 25 bp, SARS Virus
gtcatgatagagcttgcagactatg

SEQ ID NO: 206480 - DNA, 25 bp, SARS Virus
tcatgatagaggctgcagactatgt

SEQ ID NO: 206481 - DNA, 25 bp, SARS Virus
catgatagaggtcgcagactatgtt

SEQ ID NO: 206482 - DNA, 25 bp, SARS Virus
atgatagaggttccagactatgttc

SEQ ID NO: 206483 - DNA, 25 bp, SARS Virus
tgatagaggttgcagactatgttct

SEQ ID NO: 206484 - DNA, 25 bp, SARS Virus
gatagaggttgccgactatgttctc

SEQ ID NO: 206485 - DNA, 25 bp, SARS Virus
atagaggttgcacactatgttctcg

SEQ ID NO: 206486 - DNA, 25 bp, SARS Virus
tagaggttgcagcctatgttctcga

SEQ ID NO: 206487 - DNA, 25 bp, SARS Virus
agaggttgcagactatgttctcgaa

SEQ ID NO: 206488 - DNA, 25 bp, SARS Virus
gaggttgcagaccatgttctcgaac

SEQ ID NO: 206489 - DNA, 25 bp, SARS Virus
aggttgcagactctgttctcgaacc

SEQ ID NO: 206490 - DNA, 25 bp, SARS Virus
ggttgcagactacgttctcgaacca

SEQ ID NO: 206491 - DNA, 25 bp, SARS Virus
gttgcagactatcttctcgaaccag

SEQ ID NO: 206492 - DNA, 25 bp, SARS Virus
ttgcagactatgctctcgaaccagt

SEQ ID NO: 206493 - DNA, 25 bp, SARS Virus
tgcagactatgtcctcgaaccagtt

SEQ ID NO: 206494 - DNA, 25 bp, SARS Virus
gcagactatgttctcgaaccagttc

SEQ ID NO: 206495 - DNA, 25 bp, SARS Virus
cagactatgttcccgaaccagttcg

SEQ ID NO: 206496 - DNA, 25 bp, SARS Virus
agactatgttctcgaaccagttcgt

SEQ ID NO: 206497 - DNA, 25 bp, SARS Virus
gactatgttctccaaccagttcgtt

SEQ ID NO: 206498 - DNA, 25 bp, SARS Virus
actatgttctcgcaccagttcgttg

SEQ ID NO: 206499 - DNA, 25 bp, SARS Virus
ctatgttctcgacccagttcgttgt

SEQ ID NO: 206500 - DNA, 25 bp, SARS Virus
tatgttctcgaaccagttcgttgtc

SEQ ID NO: 206501 - DNA, 25 bp, SARS Virus
atgttctcgaaccagttcgttgtct

SEQ ID NO: 206502 - DNA, 25 bp, SARS Virus
tgttctcgaacccgttcgttgtctt

SEQ ID NO: 206503 - DNA, 25 bp, SARS Virus
gttctcgaaccacttcgttgtctta

SEQ ID NO: 206504 - DNA, 25 bp, SARS Virus
ttctcgaaccagctcgttgtcttat

SEQ ID NO: 206505 - DNA, 25 bp, SARS Virus
tctcgaaccagtccgttgtcttatc

SEQ ID NO: 206506 - DNA, 25 bp, SARS Virus
ctcgaaccagttcgttgtcttatcc

SEQ ID NO: 206507 - DNA, 25 bp, SARS Virus
tcgaaccagttccttgtcttatcca

SEQ ID NO: 206508 - DNA, 25 bp, SARS Virus
cgaaccagttcgctgtcttatccaa

SEQ ID NO: 206509 - DNA, 25 bp, SARS Virus
gaaccagttcgtcgtcttatccaac

SEQ ID NO: 206510 - DNA, 25 bp, SARS Virus
aaccagttcgttctcttatccaacc

SEQ ID NO: 206511 - DNA, 25 bp, SARS Virus
accagttcgttgccttatccaaccg

SEQ ID NO: 206512 - DNA, 25 bp, SARS Virus
ccagttcgttgtcttatccaaccgt

SEQ ID NO: 206513 - DNA, 25 bp, SARS Virus
cagttcgttgtcctatccaaccgtg

SEQ ID NO: 206514 - DNA, 25 bp, SARS Virus
agttcgttgtctcatccaaccgtgt

SEQ ID NO: 206515 - DNA, 25 bp, SARS Virus
gttcgttgtcttctccaaccgtgta

SEQ ID NO: 206516 - DNA, 25 bp, SARS Virus
ttcgttgtcttacccaaccgtgtag

SEQ ID NO: 206517 - DNA, 25 bp, SARS Virus
tcgttgtcttatccaaccgtgtagt

SEQ ID NO: 206518 - DNA, 25 bp, SARS Virus
cgttgtcttatccaaccgtgtagtc

SEQ ID NO: 206519 - DNA, 25 bp, SARS Virus
gttgtcttatcccaccgtgtagtcg

SEQ ID NO: 206520 - DNA, 25 bp, SARS Virus
ttgtcttatccacccgtgtagtcga

SEQ ID NO: 206521 - DNA, 25 bp, SARS Virus
tgtcttatccaaccgtgtagtcgac

SEQ ID NO: 206522 - DNA, 25 bp, SARS Virus
gtcttatccaaccgtgtagtcgact

SEQ ID NO: 206523 - DNA, 25 bp, SARS Virus
tcttatccaaccctgtagtcgactg

SEQ ID NO: 206524 - DNA, 25 bp, SARS Virus
cttatccaaccgcgtagtcgactga

SEQ ID NO: 206525 - DNA, 25 bp, SARS Virus
ttatccaaccgtctagtcgactgac

SEQ ID NO: 206526 - DNA, 25 bp, SARS Virus
tatccaaccgtgcagtcgactgaca

SEQ ID NO: 206527 - DNA, 25 bp, SARS Virus
atccaaccgtgtcgtcgactgacat

SEQ ID NO: 206528 - DNA, 25 bp, SARS Virus
tccaaccgtgtactcgactgacatc

SEQ ID NO: 206529 - DNA, 25 bp, SARS Virus
ccaaccgtgtagccgactgacatca

SEQ ID NO: 206530 - DNA, 25 bp, SARS Virus
caaccgtgtagtcgactgacatcat

SEQ ID NO: 206531 - DNA, 25 bp, SARS Virus
aaccgtgtagtccactgacatcatg

SEQ ID NO: 206532 - DNA, 25 bp, SARS Virus
accgtgtagtcgcctgacatcatgt

SEQ ID NO: 206533 - DNA, 25 bp, SARS Virus
ccgtgtagtcgactgacatcatgtg

SEQ ID NO: 206534 - DNA, 25 bp, SARS Virus
cgtgtagtcgaccgacatcatgtgt

SEQ ID NO: 206535 - DNA, 25 bp, SARS Virus
gtgtagtcgactcacatcatgtgtc

SEQ ID NO: 206536 - DNA, 25 bp, SARS Virus
tgtagtcgactgccatcatgtgtct

SEQ ID NO: 206537 - DNA, 25 bp, SARS Virus
gtagtcgactgacatcatgtgtctt

SEQ ID NO: 206538 - DNA, 25 bp, SARS Virus
tagtcgactgacctcatgtgtcttc

SEQ ID NO: 206539 - DNA, 25 bp, SARS Virus
agtcgactgacaccatgtgtcttcg

SEQ ID NO: 206540 - DNA, 25 bp, SARS Virus
gtcgactgacatcatgtgtcttcgt

SEQ ID NO: 206541 - DNA, 25 bp, SARS Virus
tcgactgacatcctgtgtcttcgtc

SEQ ID NO: 206542 - DNA, 25 bp, SARS Virus
cgactgacatcacgtgtcttcgtct

SEQ ID NO: 206543 - DNA, 25 bp, SARS Virus
gactgacatcatctgtcttcgtctg

SEQ ID NO: 206544 - DNA, 25 bp, SARS Virus
actgacatcatgcgtcttcgtctga

SEQ ID NO: 206545 - DNA, 25 bp, SARS Virus
ctgacatcatgtctcttcgtctgaa

SEQ ID NO: 206546 - DNA, 25 bp, SARS Virus
tgacatcatgtgccttcgtctgaat

SEQ ID NO: 206547 - DNA, 25 bp, SARS Virus
gacatcatgtgtcttcgtctgaatc

SEQ ID NO: 206548 - DNA, 25 bp, SARS Virus
acatcatgtgtcctcgtctgaatct

SEQ ID NO: 206549 - DNA, 25 bp, SARS Virus
catcatgtgtctccgtctgaatctt

SEQ ID NO: 206550 - DNA, 25 bp, SARS Virus
atcatgtgtcttcgtctgaatcttc

SEQ ID NO: 206551 - DNA, 25 bp, SARS Virus
tcatgtgtcttcctctgaatcttcg

SEQ ID NO: 206552 - DNA, 25 bp, SARS Virus
catgtgtcttcgcctgaatcttcgt

SEQ ID NO: 206553 - DNA, 25 bp, SARS Virus
atgtgtcttcgtctgaatcttcgtc

SEQ ID NO: 206554 - DNA, 25 bp, SARS Virus
tgtgtcttcgtccgaatcttcgtct

SEQ ID NO: 206555 - DNA, 25 bp, SARS Virus
gtgtcttcgtctcaatcttcgtctg

SEQ ID NO: 206556 - DNA, 25 bp, SARS Virus
tgtcttcgtctgcatcttcgtctga

SEQ ID NO: 206557 - DNA, 25 bp, SARS Virus
gtcttcgtctgactcttcgtctgag

SEQ ID NO: 206558 - DNA, 25 bp, SARS Virus
tcttcgtctgaaccttcgtctgagc

SEQ ID NO: 206559 - DNA, 25 bp, SARS Virus
cttcgtctgaatcttcgtctgagca

SEQ ID NO: 206560 - DNA, 25 bp, SARS Virus
ttcgtctgaatcctcgtctgagcag

SEQ ID NO: 206561 - DNA, 25 bp, SARS Virus
tcgtctgaatctccgtctgagcagc

SEQ ID NO: 206562 - DNA, 25 bp, SARS Virus
cgtctgaatcttcgtctgagcagcg

SEQ ID NO: 206563 - DNA, 25 bp, SARS Virus
gtctgaatcttcctctgagcagcgt

SEQ ID NO: 206564 - DNA, 25 bp, SARS Virus
tctgaatcttcgcctgagcagcgta

SEQ ID NO: 206565 - DNA, 25 bp, SARS Virus
ctgaatcttcgtctgagcagcgtaa

SEQ ID NO: 206566 - DNA, 25 bp, SARS Virus
tgaatcttcgtccgagcagcgtaaa

SEQ ID NO: 206567 - DNA, 25 bp, SARS Virus
gaatcttcgtctcagcagcgtaaac

SEQ ID NO: 206568 - DNA, 25 bp, SARS Virus
aatcttcgtctgcgcagcgtaaacc

SEQ ID NO: 206569 - DNA, 25 bp, SARS Virus
atcttcgtctgaccagcgtaaacct

SEQ ID NO: 206570 - DNA, 25 bp, SARS Virus
tcttcgtctgagcagcgtaaacctg

SEQ ID NO: 206571 - DNA, 25 bp, SARS Virus
cttcgtctgagccgcgtaaacctga

SEQ ID NO: 206572 - DNA, 25 bp, SARS Virus
ttcgtctgagcaccgtaaacctgaa

SEQ ID NO: 206573 - DNA, 25 bp, SARS Virus
tcgtctgagcagcgtaaacctgaac

SEQ ID NO: 206574 - DNA, 25 bp, SARS Virus
cgtctgagcagcctaaacctgaacg

SEQ ID NO: 206575 - DNA, 25 bp, SARS Virus
gtctgagcagcgcaaacctgaacgg

SEQ ID NO: 206576 - DNA, 25 bp, SARS Virus
tctgagcagcgtcaacctgaacggt

SEQ ID NO: 206577 - DNA, 25 bp, SARS Virus
ctgagcagcgtacacctgaacggta

SEQ ID NO: 206578 - DNA, 25 bp, SARS Virus
tgagcagcgtaaccctgaacggtag

SEQ ID NO: 206579 - DNA, 25 bp, SARS Virus
gagcagcgtaaacctgaacggtagt

SEQ ID NO: 206580 - DNA, 25 bp, SARS Virus
agcagcgtaaacctgaacggtagtt

SEQ ID NO: 206581 - DNA, 25 bp, SARS Virus
gcagcgtaaacccgaacggtagttt

SEQ ID NO: 206582 - DNA, 25 bp, SARS Virus
cagcgtaaacctcaacggtagtttt

SEQ ID NO: 206583 - DNA, 25 bp, SARS Virus
agcgtaaacctgcacggtagttttt

SEQ ID NO: 206584 - DNA, 25 bp, SARS Virus
gcgtaaacctgaccggtagtttttg

SEQ ID NO: 206585 - DNA, 25 bp, SARS Virus
cgtaaacctgaacggtagtttttga

SEQ ID NO: 206586 - DNA, 25 bp, SARS Virus
gtaaacctgaaccgtagtttttgat

SEQ ID NO: 206587 - DNA, 25 bp, SARS Virus
taaacctgaacgctagtttttgata

SEQ ID NO: 206588 - DNA, 25 bp, SARS Virus
aaacctgaacggcagtttttgatac

SEQ ID NO: 206589 - DNA, 25 bp, SARS Virus
aacctgaacggtcgtttttgatact

SEQ ID NO: 206590 - DNA, 25 bp, SARS Virus
acctgaacggtactttttgatactg

SEQ ID NO: 206591 - DNA, 25 bp, SARS Virus
cctgaacggtagcttttgatactgt

SEQ ID NO: 206592 - DNA, 25 bp, SARS Virus
ctgaacggtagtctttgatactgta

SEQ ID NO: 206593 - DNA, 25 bp, SARS Virus
tgaacggtagttcttgatactgtaa

SEQ ID NO: 206594 - DNA, 25 bp, SARS Virus
gaacggtagtttctgatactgtaat

SEQ ID NO: 206595 - DNA, 25 bp, SARS Virus
aacggtagttttcgatactgtaatt

SEQ ID NO: 206596 - DNA, 25 bp, SARS Virus
acggtagtttttcatactgtaatta

SEQ ID NO: 206597 - DNA, 25 bp, SARS Virus
cggtagtttttgctactgtaattat

SEQ ID NO: 206598 - DNA, 25 bp, SARS Virus
ggtagtttttgacactgtaattatc

SEQ ID NO: 206599 - DNA, 25 bp, SARS Virus
gtagtttttgatcctgtaattatcc

SEQ ID NO: 206600 - DNA, 25 bp, SARS Virus
tagtttttgatactgtaattatccg

SEQ ID NO: 206601 - DNA, 25 bp, SARS Virus
agtttttgataccgtaattatccgt

SEQ ID NO: 206602 - DNA, 25 bp, SARS Virus
gtttttgatactctaattatccgtc

SEQ ID NO: 206603 - DNA, 25 bp, SARS Virus
tttttgatactgcaattatccgtca

SEQ ID NO: 206604 - DNA, 25 bp, SARS Virus
ttttgatactgtcattatccgtcac

SEQ ID NO: 206605 - DNA, 25 bp, SARS Virus
tttgatactgtacttatccgtcact

SEQ ID NO: 206606 - DNA, 25 bp, SARS Virus
ttgatactgtaactatccgtcactt

SEQ ID NO: 206607 - DNA, 25 bp, SARS Virus
tgatactgtaatcatccgtcacttg

SEQ ID NO: 206608 - DNA, 25 bp, SARS Virus
gatactgtaattctccgtcacttgg

SEQ ID NO: 206609 - DNA, 25 bp, SARS Virus
atactgtaattacccgtcacttgga

SEQ ID NO: 206610 - DNA, 25 bp, SARS Virus
tactgtaattatccgtcacttggaa

SEQ ID NO: 206611 - DNA, 25 bp, SARS Virus
actgtaattatccgtcacttggaaa

SEQ ID NO: 206612 - DNA, 25 bp, SARS Virus
ctgtaattatccctcacttggaaat

SEQ ID NO: 206613 - DNA, 25 bp, SARS Virus
tgtaattatccgccacttggaaatc

SEQ ID NO: 206614 - DNA, 25 bp, SARS Virus
gtaattatccgtcacttggaaatca

SEQ ID NO: 206615 - DNA, 25 bp, SARS Virus
taattatccgtcccttggaaatcac

SEQ ID NO: 206616 - DNA, 25 bp, SARS Virus
aattatccgtcacttggaaatcaca

SEQ ID NO: 206617 - DNA, 25 bp, SARS Virus
attatccgtcacctggaaatcacaa

SEQ ID NO: 206618 - DNA, 25 bp, SARS Virus
ttatccgtcactcggaaatcacaac

SEQ ID NO: 206619 - DNA, 25 bp, SARS Virus
tatccgtcacttcgaaatcacaaca

SEQ ID NO: 206620 - DNA, 25 bp, SARS Virus
atccgtcacttgcaaatcacaacaa

SEQ ID NO: 206621 - DNA, 25 bp, SARS Virus
tccgtcacttggcaatcacaacaat

SEQ ID NO: 206622 - DNA, 25 bp, SARS Virus
ccgtcacttggacatcacaacaatc

SEQ ID NO: 206623 - DNA, 25 bp, SARS Virus
cgtcacttggaactcacaacaatcg

SEQ ID NO: 206624 - DNA, 25 bp, SARS Virus
gtcacttggaaaccacaacaatcga

SEQ ID NO: 206625 - DNA, 25 bp, SARS Virus
tcacttggaaatcacaacaatcgag

SEQ ID NO: 206626 - DNA, 25 bp, SARS Virus
cacttggaaatcccaacaatcgaga

SEQ ID NO: 206627 - DNA, 25 bp, SARS Virus
acttggaaatcacaacaatcgagag

SEQ ID NO: 206628 - DNA, 25 bp, SARS Virus
cttggaaatcaccacaatcgagagt

SEQ ID NO: 206629 - DNA, 25 bp, SARS Virus
ttggaaatcacaccaatcgagagtt

SEQ ID NO: 206630 - DNA, 25 bp, SARS Virus
tggaaatcacaacaatcgagagttt

SEQ ID NO: 206631 - DNA, 25 bp, SARS Virus
ggaaatcacaaccatcgagagttta

SEQ ID NO: 206632 - DNA, 25 bp, SARS Virus
gaaatcacaacactcgagagtttaa

SEQ ID NO: 206633 - DNA, 25 bp, SARS Virus
aaatcacaacaaccgagagtttaac

SEQ ID NO: 206634 - DNA, 25 bp, SARS Virus
aatcacaacaatcgagagtttaaca

SEQ ID NO: 206635 - DNA, 25 bp, SARS Virus
atcacaacaatccagagtttaacag

SEQ ID NO: 206636 - DNA, 25 bp, SARS Virus
tcacaacaatcgcgagtttaacaga

SEQ ID NO: 206637 - DNA, 25 bp, SARS Virus
cacaacaatcgacagtttaacagat

SEQ ID NO: 206638 - DNA, 25 bp, SARS Virus
acaacaatcgagcgtttaacagatt

SEQ ID NO: 206639 - DNA, 25 bp, SARS Virus
caacaatcgagactttaacagattt

SEQ ID NO: 206640 - DNA, 25 bp, SARS Virus
aacaatcgagagcttaacagattta

SEQ ID NO: 206641 - DNA, 25 bp, SARS Virus
acaatcgagagtctaacagatttaa

SEQ ID NO: 206642 - DNA, 25 bp, SARS Virus
caatcgagagttcaacagatttaac

SEQ ID NO: 206643 - DNA, 25 bp, SARS Virus
aatcgagagtttcacagatttaact

SEQ ID NO: 206644 - DNA, 25 bp, SARS Virus
atcgagagtttaccagatttaactg

SEQ ID NO: 206645 - DNA, 25 bp, SARS Virus
tcgagagtttaacagatttaactgt

SEQ ID NO: 206646 - DNA, 25 bp, SARS Virus
cgagagtttaaccgatttaactgtt

SEQ ID NO: 206647 - DNA, 25 bp, SARS Virus
gagagtttaacacatttaactgttt

SEQ ID NO: 206648 - DNA, 25 bp, SARS Virus
agagtttaacagctttaactgtttt

SEQ ID NO: 206649 - DNA, 25 bp, SARS Virus
gagtttaacagacttaactgtttta

SEQ ID NO: 206650 - DNA, 25 bp, SARS Virus
agtttaacagatctaactgttttac

SEQ ID NO: 206651 - DNA, 25 bp, SARS Virus
gtttaacagattcaactgttttacc

SEQ ID NO: 206652 - DNA, 25 bp, SARS Virus
tttaacagatttcactgttttaccc

SEQ ID NO: 206653 - DNA, 25 bp, SARS Virus
ttaacagatttacctgttttaccct

SEQ ID NO: 206654 - DNA, 25 bp, SARS Virus
taacagatttaactgttttaccctc

SEQ ID NO: 206655 - DNA, 25 bp, SARS Virus
aacagatttaaccgttttaccctct

SEQ ID NO: 206656 - DNA, 25 bp, SARS Virus
acagatttaactcttttaccctctc

SEQ ID NO: 206657 - DNA, 25 bp, SARS Virus
cagatttaactgctttaccctctcg

SEQ ID NO: 206658 - DNA, 25 bp, SARS Virus
agatttaactgtcttaccctctcgc

SEQ ID NO: 206659 - DNA, 25 bp, SARS Virus
gatttaactgttctaccctctcgcc

SEQ ID NO: 206660 - DNA, 25 bp, SARS Virus
atttaactgtttcaccctctcgcct

SEQ ID NO: 206661 - DNA, 25 bp, SARS Virus
tttaactgttttcccctctcgccta

SEQ ID NO: 206662 - DNA, 25 bp, SARS Virus
ttaactgttttaccctctcgcctac

SEQ ID NO: 206663 - DNA, 25 bp, SARS Virus
taactgttttaccctctcgcctaca

SEQ ID NO: 206664 - DNA, 25 bp, SARS Virus
aactgttttaccctctcgcctacag

SEQ ID NO: 206665 - DNA, 25 bp, SARS Virus
actgttttaccccctcgcctacaga

SEQ ID NO: 206666 - DNA, 25 bp, SARS Virus
ctgttttaccctctcgcctacagag

SEQ ID NO: 206667 - DNA, 25 bp, SARS Virus
tgttttaccctcccgcctacagaga

SEQ ID NO: 206668 - DNA, 25 bp, SARS Virus
gttttaccctctcgcctacagagag

SEQ ID NO: 206669 - DNA, 25 bp, SARS Virus
ttttaccctctcccctacagagagt

SEQ ID NO: 206670 - DNA, 25 bp, SARS Virus
tttaccctctcgcctacagagagta

SEQ ID NO: 206671 - DNA, 25 bp, SARS Virus
ttaccctctcgcctacagagagtat

SEQ ID NO: 206672 - DNA, 25 bp, SARS Virus
taccctctcgcccacagagagtatc

SEQ ID NO: 206673 - DNA, 25 bp, SARS Virus
accctctcgcctccagagagtatcc

SEQ ID NO: 206674 - DNA, 25 bp, SARS Virus
ccctctcgcctacagagagtatcca

SEQ ID NO: 206675 - DNA, 25 bp, SARS Virus
cctctcgcctaccgagagtatccag

SEQ ID NO: 206676 - DNA, 25 bp, SARS Virus
ctctcgcctacacagagtatccaga

SEQ ID NO: 206677 - DNA, 25 bp, SARS Virus
tctcgcctacagcgagtatccagaa

SEQ ID NO: 206678 - DNA, 25 bp, SARS Virus
ctcgcctacagacagtatccagaaa

SEQ ID NO: 206679 - DNA, 25 bp, SARS Virus
tcgcctacagagcgtatccagaaaa

SEQ ID NO: 206680 - DNA, 25 bp, SARS Virus
cgcctacagagactatccagaaaac

SEQ ID NO: 206681 - DNA, 25 bp, SARS Virus
gcctacagagagcatccagaaaact

SEQ ID NO: 206682 - DNA, 25 bp, SARS Virus
cctacagagagtctccagaaaactg

SEQ ID NO: 206683 - DNA, 25 bp, SARS Virus
ctacagagagtacccagaaaactgg

SEQ ID NO: 206684 - DNA, 25 bp, SARS Virus
tacagagagtatccagaaaactggt

SEQ ID NO: 206685 - DNA, 25 bp, SARS Virus
acagagagtatccagaaaactggtc

SEQ ID NO: 206686 - DNA, 25 bp, SARS Virus
cagagagtatcccgaaaactggtcg

SEQ ID NO: 206687 - DNA, 25 bp, SARS Virus
agagagtatccacaaaactggtcgg

SEQ ID NO: 206688 - DNA, 25 bp, SARS Virus
gagagtatccagcaaactggtcgga

SEQ ID NO: 206689 - DNA, 25 bp, SARS Virus
agagtatccagacaactggtcggaa

SEQ ID NO: 206690 - DNA, 25 bp, SARS Virus
gagtatccagaacactggtcggaac

SEQ ID NO: 206691 - DNA, 25 bp, SARS Virus
agtatccagaaacctggtcggaaca

SEQ ID NO: 206692 - DNA, 25 bp, SARS Virus
gtatccagaaaactggtcggaacag

SEQ ID NO: 206693 - DNA, 25 bp, SARS Virus
tatccagaaaaccggtcggaacagt

SEQ ID NO: 206694 - DNA, 25 bp, SARS Virus
atccagaaaactcgtcggaacagtt

SEQ ID NO: 206695 - DNA, 25 bp, SARS Virus
tccagaaaactgctcggaacagttt

SEQ ID NO: 206696 - DNA, 25 bp, SARS Virus
ccagaaaactggccggaacagtttc

SEQ ID NO: 206697 - DNA, 25 bp, SARS Virus
cagaaaactggtcggaacagtttca

SEQ ID NO: 206698 - DNA, 25 bp, SARS Virus
agaaaactggtccgaacagtttcat

SEQ ID NO: 206699 - DNA, 25 bp, SARS Virus
gaaaactggtcgcaacagtttcatc

SEQ ID NO: 206700 - DNA, 25 bp, SARS Virus
aaaactggtcggcacagtttcatct

SEQ ID NO: 206701 - DNA, 25 bp, SARS Virus
aaactggtcggaccagtttcatctc

SEQ ID NO: 206702 - DNA, 25 bp, SARS Virus
aactggtcggaacagtttcatctcc

SEQ ID NO: 206703 - DNA, 25 bp, SARS Virus
actggtcggaaccgtttcatctcca

SEQ ID NO: 206704 - DNA, 25 bp, SARS Virus
ctggtcggaacactttcatctccac

SEQ ID NO: 206705 - DNA, 25 bp, SARS Virus
tggtcggaacagcttcatctccact

SEQ ID NO: 206706 - DNA, 25 bp, SARS Virus
ggtcggaacagtctcatctccactt

SEQ ID NO: 206707 - DNA, 25 bp, SARS Virus
gtcggaacagttccatctccacttc

SEQ ID NO: 206708 - DNA, 25 bp, SARS Virus
tcggaacagtttcatctccacttcg

SEQ ID NO: 206709 - DNA, 25 bp, SARS Virus
cggaacagtttcctctccacttcgc

SEQ ID NO: 206710 - DNA, 25 bp, SARS Virus
ggaacagtttcacctccacttcgcg

SEQ ID NO: 206711 - DNA, 25 bp, SARS Virus
gaacagtttcatctccacttcgcgc

SEQ ID NO: 206712 - DNA, 25 bp, SARS Virus
aacagtttcatccccacttcgcgcg

SEQ ID NO: 206713 - DNA, 25 bp, SARS Virus
acagtttcatctccacttcgcgcgg

SEQ ID NO: 206714 - DNA, 25 bp, SARS Virus
cagtttcatctccacttcgcgcggt

SEQ ID NO: 206715 - DNA, 25 bp, SARS Virus
agtttcatctccccttcgcgcggta

SEQ ID NO: 206716 - DNA, 25 bp, SARS Virus
gtttcatctccacttcgcgcggtaa

SEQ ID NO: 206717 - DNA, 25 bp, SARS Virus
tttcatctccacctcgcgcggtaaa

SEQ ID NO: 206718 - DNA, 25 bp, SARS Virus
ttcatctccactccgcgcggtaaaa

SEQ ID NO: 206719 - DNA, 25 bp, SARS Virus
tcatctccacttcgcgcggtaaaaa

SEQ ID NO: 206720 - DNA, 25 bp, SARS Virus
catctccacttcccgcggtaaaaag

SEQ ID NO: 206721 - DNA, 25 bp, SARS Virus
atctccacttcgcgcggtaaaaagt

SEQ ID NO: 206722 - DNA, 25 bp, SARS Virus
tctccacttcgcccggtaaaaagtg

SEQ ID NO: 206723 - DNA, 25 bp, SARS Virus
ctccacttcgcgcggtaaaaagtgt

SEQ ID NO: 206724 - DNA, 25 bp, SARS Virus
tccacttcgcgccgtaaaaagtgtc

SEQ ID NO: 206725 - DNA, 25 bp, SARS Virus
ccacttcgcgcgctaaaaagtgtcg

SEQ ID NO: 206726 - DNA, 25 bp, SARS Virus
cacttcgcgcggcaaaaagtgtcgt

SEQ ID NO: 206727 - DNA, 25 bp, SARS Virus
acttcgcgcggtcaaaagtgtcgtt

SEQ ID NO: 206728 - DNA, 25 bp, SARS Virus
cttcgcgcggtacaaagtgtcgttg

SEQ ID NO: 206729 - DNA, 25 bp, SARS Virus
ttcgcgcggtaacaagtgtcgttgt

SEQ ID NO: 206730 - DNA, 25 bp, SARS Virus
tcgcgcggtaaacagtgtcgttgtg

SEQ ID NO: 206731 - DNA, 25 bp, SARS Virus
cgcgcggtaaaacgtgtcgttgtga

SEQ ID NO: 206732 - DNA, 25 bp, SARS Virus
gcgcggtaaaaactgtcgttgtgat

SEQ ID NO: 206733 - DNA, 25 bp, SARS Virus
cgcggtaaaaagcgtcgttgtgata

SEQ ID NO: 206734 - DNA, 25 bp, SARS Virus
gcggtaaaaagtctcgttgtgatag

SEQ ID NO: 206735 - DNA, 25 bp, SARS Virus
cggtaaaaagtgccgttgtgatagt

SEQ ID NO: 206736 - DNA, 25 bp, SARS Virus
ggtaaaaagtgtcgttgtgatagtt

SEQ ID NO: 206737 - DNA, 25 bp, SARS Virus
gtaaaaagtgtccttgtgatagttg

SEQ ID NO: 206738 - DNA, 25 bp, SARS Virus
taaaaagtgtcgctgtgatagttgt

SEQ ID NO: 206739 - DNA, 25 bp, SARS Virus
aaaaagtgtcgtcgtgatagttgtt

SEQ ID NO: 206740 - DNA, 25 bp, SARS Virus
aaaagtgtcgttctgatagttgtta

SEQ ID NO: 206741 - DNA, 25 bp, SARS Virus
aaagtgtcgttgcgatagttgttat

SEQ ID NO: 206742 - DNA, 25 bp, SARS Virus
aagtgtcgttgtcatagttgttata

SEQ ID NO: 206743 - DNA, 25 bp, SARS Virus
agtgtcgttgtgctagttgttatat

SEQ ID NO: 206744 - DNA, 25 bp, SARS Virus
gtgtcgttgtgacagttgttatatg

SEQ ID NO: 206745 - DNA, 25 bp, SARS Virus
tgtcgttgtgatcgttgttatatgc

SEQ ID NO: 206746 - DNA, 25 bp, SARS Virus
gtcgttgtgatacttgttatatgct

SEQ ID NO: 206747 - DNA, 25 bp, SARS Virus
tcgttgtgatagctgttatatgcta

SEQ ID NO: 206748 - DNA, 25 bp, SARS Virus
cgttgtgatagtcgttatatgctac

SEQ ID NO: 206749 - DNA, 25 bp, SARS Virus
gttgtgatagttcttatatgctact

SEQ ID NO: 206750 - DNA, 25 bp, SARS Virus
ttgtgatagttgctatatgctactg

SEQ ID NO: 206751 - DNA, 25 bp, SARS Virus
tgtgatagttgtcatatgctactga

SEQ ID NO: 206752 - DNA, 25 bp, SARS Virus
gtgatagttgttctatgctactgac

SEQ ID NO: 206753 - DNA, 25 bp, SARS Virus
tgatagttgttacatgctactgacc

SEQ ID NO: 206754 - DNA, 25 bp, SARS Virus
gatagttgttatctgctactgacca

SEQ ID NO: 206755 - DNA, 25 bp, SARS Virus
atagttgttatacgctactgaccag

SEQ ID NO: 206756 - DNA, 25 bp, SARS Virus
tagttgttatatcctactgaccagt

SEQ ID NO: 206757 - DNA, 25 bp, SARS Virus
agttgttatatgctactgaccagtc

SEQ ID NO: 206758 - DNA, 25 bp, SARS Virus
gttgttatatgccactgaccagtca

SEQ ID NO: 206759 - DNA, 25 bp, SARS Virus
ttgttatatgctcctgaccagtcat

SEQ ID NO: 206760 - DNA, 25 bp, SARS Virus
tgttatatgctactgaccagtcatc

SEQ ID NO: 206761 - DNA, 25 bp, SARS Virus
gttatatgctaccgaccagtcatcc

SEQ ID NO: 206762 - DNA, 25 bp, SARS Virus
ttatatgctactcaccagtcatccc

SEQ ID NO: 206763 - DNA, 25 bp, SARS Virus
tatatgctactgcccagtcatccca

SEQ ID NO: 206764 - DNA, 25 bp, SARS Virus
atatgctactgaccagtcatcccaa

SEQ ID NO: 206765 - DNA, 25 bp, SARS Virus
tatgctactgaccagtcatcccaac

SEQ ID NO: 206766 - DNA, 25 bp, SARS Virus
atgctactgacccgtcatcccaact

SEQ ID NO: 206767 - DNA, 25 bp, SARS Virus
tgctactgaccactcatcccaacta

SEQ ID NO: 206768 - DNA, 25 bp, SARS Virus
gctactgaccagccatcccaactaa

SEQ ID NO: 206769 - DNA, 25 bp, SARS Virus
ctactgaccagtcatcccaactaac

SEQ ID NO: 206770 - DNA, 25 bp, SARS Virus
tactgaccagtcctcccaactaacc

SEQ ID NO: 206771 - DNA, 25 bp, SARS Virus
actgaccagtcaccccaactaacca

SEQ ID NO: 206772 - DNA, 25 bp, SARS Virus
ctgaccagtcatcccaactaaccag

SEQ ID NO: 206773 - DNA, 25 bp, SARS Virus
tgaccagtcatcccaactaaccaga

SEQ ID NO: 206774 - DNA, 25 bp, SARS Virus
gaccagtcatcccaactaaccagaa

SEQ ID NO: 206775 - DNA, 25 bp, SARS Virus
accagtcatccccactaaccagaaa

SEQ ID NO: 206776 - DNA, 25 bp, SARS Virus
ccagtcatcccacctaaccagaaaa

SEQ ID NO: 206777 - DNA, 25 bp, SARS Virus
cagtcatcccaactaaccagaaaat

SEQ ID NO: 206778 - DNA, 25 bp, SARS Virus
agtcatcccaaccaaccagaaaatt

SEQ ID NO: 206779 - DNA, 25 bp, SARS Virus
gtcatcccaactcaccagaaaattt

SEQ ID NO: 206780 - DNA, 25 bp, SARS Virus
tcatcccaactacccagaaaatttg

SEQ ID NO: 206781 - DNA, 25 bp, SARS Virus
catcccaactaaccagaaaatttga

SEQ ID NO: 206782 - DNA, 25 bp, SARS Virus
atcccaactaaccagaaaatttgac

SEQ ID NO: 206783 - DNA, 25 bp, SARS Virus
tcccaactaacccgaaaatttgacc

SEQ ID NO: 206784 - DNA, 25 bp, SARS Virus
cccaactaaccacaaaatttgacct

SEQ ID NO: 206785 - DNA, 25 bp, SARS Virus
ccaactaaccagcaaatttgacctc

SEQ ID NO: 206786 - DNA, 25 bp, SARS Virus
caactaaccagacaatttgacctca

SEQ ID NO: 206787 - DNA, 25 bp, SARS Virus
aactaaccagaacatttgacctcac

SEQ ID NO: 206788 - DNA, 25 bp, SARS Virus
actaaccagaaactttgacctcact

SEQ ID NO: 206789 - DNA, 25 bp, SARS Virus
ctaaccagaaaacttgacctcactg

SEQ ID NO: 206790 - DNA, 25 bp, SARS Virus
taaccagaaaatctgacctcactgt

SEQ ID NO: 206791 - DNA, 25 bp, SARS Virus
aaccagaaaattcgacctcactgtt

SEQ ID NO: 206792 - DNA, 25 bp, SARS Virus
accagaaaatttcacctcactgttt

SEQ ID NO: 206793 - DNA, 25 bp, SARS Virus
ccagaaaatttgccctcactgttta

SEQ ID NO: 206794 - DNA, 25 bp, SARS Virus
cagaaaatttgacctcactgtttag

SEQ ID NO: 206795 - DNA, 25 bp, SARS Virus
agaaaatttgacctcactgtttagt

SEQ ID NO: 206796 - DNA, 25 bp, SARS Virus
gaaaatttgaccccactgtttagtg

SEQ ID NO: 206797 - DNA, 25 bp, SARS Virus
aaaatttgacctcactgtttagtgc

SEQ ID NO: 206798 - DNA, 25 bp, SARS Virus
aaatttgacctccctgtttagtgct

SEQ ID NO: 206799 - DNA, 25 bp, SARS Virus
aatttgacctcactgtttagtgctc

SEQ ID NO: 206800 - DNA, 25 bp, SARS Virus
atttgacctcaccgtttagtgctcg

SEQ ID NO: 206801 - DNA, 25 bp, SARS Virus
tttgacctcactctttagtgctcgt

SEQ ID NO: 206802 - DNA, 25 bp, SARS Virus
ttgacctcactgcttagtgctcgtt

SEQ ID NO: 206803 - DNA, 25 bp, SARS Virus
tgacctcactgtctagtgctcgttg

SEQ ID NO: 206804 - DNA, 25 bp, SARS Virus
gacctcactgttcagtgctcgttga

SEQ ID NO: 206805 - DNA, 25 bp, SARS Virus
acctcactgtttcgtgctcgttgaa

SEQ ID NO: 206806 - DNA, 25 bp, SARS Virus
cctcactgtttactgctcgttgaag

SEQ ID NO: 206807 - DNA, 25 bp, SARS Virus
ctcactgtttagcgctcgttgaagt

SEQ ID NO: 206808 - DNA, 25 bp, SARS Virus
tcactgtttagtcctcgttgaagta

SEQ ID NO: 206809 - DNA, 25 bp, SARS Virus
cactgtttagtgctcgttgaagtag

SEQ ID NO: 206810 - DNA, 25 bp, SARS Virus
actgtttagtgcccgttgaagtagt

SEQ ID NO: 206811 - DNA, 25 bp, SARS Virus
ctgtttagtgctcgttgaagtagtg

SEQ ID NO: 206812 - DNA, 25 bp, SARS Virus
tgtttagtgctccttgaagtagtga

SEQ ID NO: 206813 - DNA, 25 bp, SARS Virus
gtttagtgctcgctgaagtagtgat

SEQ ID NO: 206814 - DNA, 25 bp, SARS Virus
tttagtgctcgtcgaagtagtgatt

SEQ ID NO: 206815 - DNA, 25 bp, SARS Virus
ttagtgctcgttcaagtagtgatta

SEQ ID NO: 206816 - DNA, 25 bp, SARS Virus
tagtgctcgttgcagtagtgattac

SEQ ID NO: 206817 - DNA, 25 bp, SARS Virus
agtgctcgttgacgtagtgattact

SEQ ID NO: 206818 - DNA, 25 bp, SARS Virus
gtgctcgttgaactagtgattactt

SEQ ID NO: 206819 - DNA, 25 bp, SARS Virus
tgctcgttgaagcagtgattactta

SEQ ID NO: 206820 - DNA, 25 bp, SARS Virus
gctcgttgaagtcgtgattacttac

SEQ ID NO: 206821 - DNA, 25 bp, SARS Virus
ctcgttgaagtactgattacttaca

SEQ ID NO: 206822 - DNA, 25 bp, SARS Virus
tcgttgaagtagcgattacttacat

SEQ ID NO: 206823 - DNA, 25 bp, SARS Virus
cgttgaagtagtcattacttacatg

SEQ ID NO: 206824 - DNA, 25 bp, SARS Virus
gttgaagtagtgcttacttacatga

SEQ ID NO: 206825 - DNA, 25 bp, SARS Virus
ttgaagtagtgactacttacatgat

SEQ ID NO: 206826 - DNA, 25 bp, SARS Virus
tgaagtagtgatcacttacatgatg

SEQ ID NO: 206827 - DNA, 25 bp, SARS Virus
gaagtagtgattccttacatgatgg

SEQ ID NO: 206828 - DNA, 25 bp, SARS Virus
aagtagtgattacttacatgatggt

SEQ ID NO: 206829 - DNA, 25 bp, SARS Virus
agtagtgattacctacatgatggtc

SEQ ID NO: 206830 - DNA, 25 bp, SARS Virus
gtagtgattactcacatgatggtca

SEQ ID NO: 206831 - DNA, 25 bp, SARS Virus
tagtgattacttccatgatggtcac

SEQ ID NO: 206832 - DNA, 25 bp, SARS Virus
agtgattacttacatgatggtcacg

SEQ ID NO: 206833 - DNA, 25 bp, SARS Virus
gtgattacttacctgatggtcacgt

SEQ ID NO: 206834 - DNA, 25 bp, SARS Virus
tgattacttacacgatggtcacgtt

SEQ ID NO: 206835 - DNA, 25 bp, SARS Virus
gattacttacatcatggtcacgttt

SEQ ID NO: 206836 - DNA, 25 bp, SARS Virus
attacttacatgctggtcacgtttt

SEQ ID NO: 206837 - DNA, 25 bp, SARS Virus
ttacttacatgacggtcacgtttta

SEQ ID NO: 206838 - DNA, 25 bp, SARS Virus
tacttacatgatcgtcacgttttac

SEQ ID NO: 206839 - DNA, 25 bp, SARS Virus
acttacatgatgctcacgttttaca

SEQ ID NO: 206840 - DNA, 25 bp, SARS Virus
cttacatgatggccacgttttacac

SEQ ID NO: 206841 - DNA, 25 bp, SARS Virus
ttacatgatggtcacgttttacaca

SEQ ID NO: 206842 - DNA, 25 bp, SARS Virus
tacatgatggtcccgttttacacag

SEQ ID NO: 206843 - DNA, 25 bp, SARS Virus
acatgatggtcacgttttacacagt

SEQ ID NO: 206844 - DNA, 25 bp, SARS Virus
catgatggtcaccttttacacagtg

SEQ ID NO: 206845 - DNA, 25 bp, SARS Virus
atgatggtcacgctttacacagtgt

SEQ ID NO: 206846 - DNA, 25 bp, SARS Virus
tgatggtcacgtcttacacagtgtt

SEQ ID NO: 206847 - DNA, 25 bp, SARS Virus
gatggtcacgttctacacagtgtta

SEQ ID NO: 206848 - DNA, 25 bp, SARS Virus
atggtcacgtttcacacagtgttaa

SEQ ID NO: 206849 - DNA, 25 bp, SARS Virus
tggtcacgttttccacagtgttaac

SEQ ID NO: 206850 - DNA, 25 bp, SARS Virus
ggtcacgttttacacagtgttaact

SEQ ID NO: 206851 - DNA, 25 bp, SARS Virus
gtcacgttttacccagtgttaactc

SEQ ID NO: 206852 - DNA, 25 bp, SARS Virus
tcacgttttacacagtgttaactct

SEQ ID NO: 206853 - DNA, 25 bp, SARS Virus
cacgttttacaccgtgttaactctg

SEQ ID NO: 206854 - DNA, 25 bp, SARS Virus
acgttttacacactgttaactctgt

SEQ ID NO: 206855 - DNA, 25 bp, SARS Virus
cgttttacacagcgttaactctgtt

SEQ ID NO: 206856 - DNA, 25 bp, SARS Virus
gttttacacagtcttaactctgtta

SEQ ID NO: 206857 - DNA, 25 bp, SARS Virus
ttttacacagtgctaactctgttaa

SEQ ID NO: 206858 - DNA, 25 bp, SARS Virus
tttacacagtgtcaactctgttaag

SEQ ID NO: 206859 - DNA, 25 bp, SARS Virus
ttacacagtgttcactctgttaagg

SEQ ID NO: 206860 - DNA, 25 bp, SARS Virus
tacacagtgttacctctgttaaggt

SEQ ID NO: 206861 - DNA, 25 bp, SARS Virus
acacagtgttaactctgttaaggtt

SEQ ID NO: 206862 - DNA, 25 bp, SARS Virus
cacagtgttaaccctgttaaggtta

SEQ ID NO: 206863 - DNA, 25 bp, SARS Virus
acagtgttaactctgttaaggttaa

SEQ ID NO: 206864 - DNA, 25 bp, SARS Virus
cagtgttaactccgttaaggttaac

SEQ ID NO: 206865 - DNA, 25 bp, SARS Virus
agtgttaactctcttaaggttaaca

SEQ ID NO: 206866 - DNA, 25 bp, SARS Virus
gtgttaactctgctaaggttaacac

SEQ ID NO: 206867 - DNA, 25 bp, SARS Virus
tgttaactctgtcaaggttaacact

SEQ ID NO: 206868 - DNA, 25 bp, SARS Virus
gttaactctgttcaggttaacactc

SEQ ID NO: 206869 - DNA, 25 bp, SARS Virus
ttaactctgttacggttaacactca

SEQ ID NO: 206870 - DNA, 25 bp, SARS Virus
taactctgttaacgttaacactcag

SEQ ID NO: 206871 - DNA, 25 bp, SARS Virus
aactctgttaagcttaacactcaga

SEQ ID NO: 206872 - DNA, 25 bp, SARS Virus
actctgttaaggctaacactcagaa

SEQ ID NO: 206873 - DNA, 25 bp, SARS Virus
ctctgttaaggtcaacactcagaac

SEQ ID NO: 206874 - DNA, 25 bp, SARS Virus
tctgttaaggttcacactcagaacg

SEQ ID NO: 206875 - DNA, 25 bp, SARS Virus
ctgttaaggttaccactcagaacgt

SEQ ID NO: 206876 - DNA, 25 bp, SARS Virus
tgttaaggttaacactcagaacgtc

SEQ ID NO: 206877 - DNA, 25 bp, SARS Virus
gttaaggttaaccctcagaacgtct

SEQ ID NO: 206878 - DNA, 25 bp, SARS Virus
ttaaggttaacactcagaacgtctt

SEQ ID NO: 206879 - DNA, 25 bp, SARS Virus
taaggttaacacccagaacgtcttc

SEQ ID NO: 206880 - DNA, 25 bp, SARS Virus
aaggttaacactcagaacgtcttcg

SEQ ID NO: 206881 - DNA, 25 bp, SARS Virus
aggttaacactccgaacgtcttcgg

SEQ ID NO: 206882 - DNA, 25 bp, SARS Virus
ggttaacactcacaacgtcttcggt

SEQ ID NO: 206883 - DNA, 25 bp, SARS Virus
gttaacactcagcacgtcttcggtg

SEQ ID NO: 206884 - DNA, 25 bp, SARS Virus
ttaacactcagaccgtcttcggtgc

SEQ ID NO: 206885 - DNA, 25 bp, SARS Virus
taacactcagaacgtcttcggtgcc

SEQ ID NO: 206886 - DNA, 25 bp, SARS Virus
aacactcagaacctcttcggtgccg

SEQ ID NO: 206887 - DNA, 25 bp, SARS Virus
acactcagaacgccttcggtgccgg

SEQ ID NO: 206888 - DNA, 25 bp, SARS Virus
cactcagaacgtcttcggtgccgga

SEQ ID NO: 206889 - DNA, 25 bp, SARS Virus
actcagaacgtcctcggtgccggag

SEQ ID NO: 206890 - DNA, 25 bp, SARS Virus
ctcagaacgtctccggtgccggagg

SEQ ID NO: 206891 - DNA, 25 bp, SARS Virus
tcagaacgtcttcggtgccggaggt

SEQ ID NO: 206892 - DNA, 25 bp, SARS Virus
cagaacgtcttccgtgccggaggta

SEQ ID NO: 206893 - DNA, 25 bp, SARS Virus
agaacgtcttcgctgccggaggtaa

SEQ ID NO: 206894 - DNA, 25 bp, SARS Virus
gaacgtcttcggcgccggaggtaaa

SEQ ID NO: 206895 - DNA, 25 bp, SARS Virus
aacgtcttcggtcccggaggtaaac

SEQ ID NO: 206896 - DNA, 25 bp, SARS Virus
acgtcttcggtgccggaggtaaacg

SEQ ID NO: 206897 - DNA, 25 bp, SARS Virus
cgtcttcggtgccggaggtaaacgt

SEQ ID NO: 206898 - DNA, 25 bp, SARS Virus
gtcttcggtgcccgaggtaaacgta

SEQ ID NO: 206899 - DNA, 25 bp, SARS Virus
tcttcggtgccgcaggtaaacgtat

SEQ ID NO: 206900 - DNA, 25 bp, SARS Virus
cttcggtgccggcggtaaacgtatc

SEQ ID NO: 206901 - DNA, 25 bp, SARS Virus
ttcggtgccggacgtaaacgtatct

SEQ ID NO: 206902 - DNA, 25 bp, SARS Virus
tcggtgccggagctaaacgtatctg

SEQ ID NO: 206903 - DNA, 25 bp, SARS Virus
cggtgccggaggcaaacgtatctgt

SEQ ID NO: 206904 - DNA, 25 bp, SARS Virus
ggtgccggaggtcaacgtatctgta

SEQ ID NO: 206905 - DNA, 25 bp, SARS Virus
gtgccggaggtacacgtatctgtat

SEQ ID NO: 206906 - DNA, 25 bp, SARS Virus
tgccggaggtaaccgtatctgtatc

SEQ ID NO: 206907 - DNA, 25 bp, SARS Virus
gccggaggtaaacgtatctgtatct

SEQ ID NO: 206908 - DNA, 25 bp, SARS Virus
ccggaggtaaacctatctgtatctt

SEQ ID NO: 206909 - DNA, 25 bp, SARS Virus
cggaggtaaacgcatctgtatcttt

SEQ ID NO: 206910 - DNA, 25 bp, SARS Virus
ggaggtaaacgtctctgtatctttc

SEQ ID NO: 206911 - DNA, 25 bp, SARS Virus
gaggtaaacgtacctgtatctttct

SEQ ID NO: 206912 - DNA, 25 bp, SARS Virus
aggtaaacgtatctgtatctttcta

SEQ ID NO: 206913 - DNA, 25 bp, SARS Virus
ggtaaacgtatccgtatctttctag

SEQ ID NO: 206914 - DNA, 25 bp, SARS Virus
gtaaacgtatctctatctttctaga

SEQ ID NO: 206915 - DNA, 25 bp, SARS Virus
taaacgtatctgcatctttctagag

SEQ ID NO: 206916 - DNA, 25 bp, SARS Virus
aaacgtatctgtctctttctagaga

SEQ ID NO: 206917 - DNA, 25 bp, SARS Virus
aacgtatctgtacctttctagagaa

SEQ ID NO: 206918 - DNA, 25 bp, SARS Virus
acgtatctgtatctttctagagaag

SEQ ID NO: 206919 - DNA, 25 bp, SARS Virus
cgtatctgtatccttctagagaagt

SEQ ID NO: 206920 - DNA, 25 bp, SARS Virus
gtatctgtatctctctagagaagta

SEQ ID NO: 206921 - DNA, 25 bp, SARS Virus
tatctgtatcttcctagagaagtac

SEQ ID NO: 206922 - DNA, 25 bp, SARS Virus
atctgtatctttctagagaagtacg

SEQ ID NO: 206923 - DNA, 25 bp, SARS Virus
tctgtatctttccagagaagtacgg

SEQ ID NO: 206924 - DNA, 25 bp, SARS Virus
ctgtatctttctcgagaagtacggt

SEQ ID NO: 206925 - DNA, 25 bp, SARS Virus
tgtatctttctacagaagtacggta

SEQ ID NO: 206926 - DNA, 25 bp, SARS Virus
gtatctttctagcgaagtacggtaa

SEQ ID NO: 206927 - DNA, 25 bp, SARS Virus
tatctttctagacaagtacggtaat

SEQ ID NO: 206928 - DNA, 25 bp, SARS Virus
atctttctagagcagtacggtaatt

SEQ ID NO: 206929 - DNA, 25 bp, SARS Virus
tctttctagagacgtacggtaattg

SEQ ID NO: 206930 - DNA, 25 bp, SARS Virus
ctttctagagaactacggtaattgt

SEQ ID NO: 206931 - DNA, 25 bp, SARS Virus
tttctagagaagcacggtaattgtt

SEQ ID NO: 206932 - DNA, 25 bp, SARS Virus
ttctagagaagtccggtaattgtta

SEQ ID NO: 206933 - DNA, 25 bp, SARS Virus
tctagagaagtacggtaattgttat

SEQ ID NO: 206934 - DNA, 25 bp, SARS Virus
ctagagaagtaccgtaattgttatc

SEQ ID NO: 206935 - DNA, 25 bp, SARS Virus
tagagaagtacgctaattgttatca

SEQ ID NO: 206936 - DNA, 25 bp, SARS Virus
agagaagtacggcaattgttatcaa

SEQ ID NO: 206937 - DNA, 25 bp, SARS Virus
gagaagtacggtcattgttatcaac

SEQ ID NO: 206938 - DNA, 25 bp, SARS Virus
agaagtacggtacttgttatcaaca

SEQ ID NO: 206939 - DNA, 25 bp, SARS Virus
gaagtacggtaactgttatcaacat

SEQ ID NO: 206940 - DNA, 25 bp, SARS Virus
aagtacggtaatcgttatcaacatg

SEQ ID NO: 206941 - DNA, 25 bp, SARS Virus
agtacggtaattcttatcaacatgt

SEQ ID NO: 206942 - DNA, 25 bp, SARS Virus
gtacggtaattgctatcaacatgtg

SEQ ID NO: 206943 - DNA, 25 bp, SARS Virus
tacggtaattgtcatcaacatgtga

SEQ ID NO: 206944 - DNA, 25 bp, SARS Virus
acggtaattgttctcaacatgtgag

SEQ ID NO: 206945 - DNA, 25 bp, SARS Virus
agtttgtagaatggcctttgaagtc

SEQ ID NO: 206946 - DNA, 25 bp, SARS Virus
gtttgtagaattgcctttgaagtca

SEQ ID NO: 206947 - DNA, 25 bp, SARS Virus
tttgtagaattggctttgaagtcat

SEQ ID NO: 206948 - DNA, 25 bp, SARS Virus
ttgtagaattgcgtttgaagtcatg

SEQ ID NO: 206949 - DNA, 25 bp, SARS Virus
tgtagaattgccgttgaagtcatga

SEQ ID NO: 206950 - DNA, 25 bp, SARS Virus
gtagaattgcctgtgaagtcatgat

SEQ ID NO: 206951 - DNA, 25 bp, SARS Virus
tagaattgccttggaagtcatgata

SEQ ID NO: 206952 - DNA, 25 bp, SARS Virus
agaattgcctttgaagtcatgatag

SEQ ID NO: 206953 - DNA, 25 bp, SARS Virus
gaattgcctttggagtcatgataga

SEQ ID NO: 206954 - DNA, 25 bp, SARS Virus
aattgcctttgaggtcatgatagag

SEQ ID NO: 206955 - DNA, 25 bp, SARS Virus
attgcctttgaagtcatgatagagg

SEQ ID NO: 206956 - DNA, 25 bp, SARS Virus
ttgcctttgaaggcatgatagaggt

SEQ ID NO: 206957 - DNA, 25 bp, SARS Virus
tgcctttgaagtgatgatagaggtt

SEQ ID NO: 206958 - DNA, 25 bp, SARS Virus
gcctttgaagtcgtgatagaggttg

SEQ ID NO: 206959 - DNA, 25 bp, SARS Virus
cctttgaagtcaggatagaggttgc

SEQ ID NO: 206960 - DNA, 25 bp, SARS Virus
ctttgaagtcatgatagaggttgca

SEQ ID NO: 206961 - DNA, 25 bp, SARS Virus
tttgaagtcatggtagaggttgcag

SEQ ID NO: 206962 - DNA, 25 bp, SARS Virus
ttgaagtcatgagagaggttgcaga

SEQ ID NO: 206963 - DNA, 25 bp, SARS Virus
tgaagtcatgatggaggttgcagac

SEQ ID NO: 206964 - DNA, 25 bp, SARS Virus
gaagtcatgatagaggttgcagact

SEQ ID NO: 206965 - DNA, 25 bp, SARS Virus
aagtcatgataggggttgcagacta

SEQ ID NO: 206966 - DNA, 25 bp, SARS Virus
agtcatgatagaggttgcagactat

SEQ ID NO: 206967 - DNA, 25 bp, SARS Virus
gtcatgatagaggttgcagactatg

SEQ ID NO: 206968 - DNA, 25 bp, SARS Virus
tcatgatagagggtgcagactatgt

SEQ ID NO: 206969 - DNA, 25 bp, SARS Virus
catgatagaggtggcagactatgtt

SEQ ID NO: 206970 - DNA, 25 bp, SARS Virus
atgatagaggttgcagactatgttc

SEQ ID NO: 206971 - DNA, 25 bp, SARS Virus
tgatagaggttggagactatgttct

SEQ ID NO: 206972 - DNA, 25 bp, SARS Virus
gatagaggttgcggactatgttctc

SEQ ID NO: 206973 - DNA, 25 bp, SARS Virus
atagaggttgcagactatgttctcg

SEQ ID NO: 206974 - DNA, 25 bp, SARS Virus
tagaggttgcaggctatgttctcga

SEQ ID NO: 206975 - DNA, 25 bp, SARS Virus
agaggttgcagagtatgttctcgaa

SEQ ID NO: 206976 - DNA, 25 bp, SARS Virus
gaggttgcagacgatgttctcgaac

SEQ ID NO: 206977 - DNA, 25 bp, SARS Virus
aggttgcagactgtgttctcgaacc

SEQ ID NO: 206978 - DNA, 25 bp, SARS Virus
ggttgcagactaggttctcgaacca

SEQ ID NO: 206979 - DNA, 25 bp, SARS Virus
gttgcagactatgttctcgaaccag

SEQ ID NO: 206980 - DNA, 25 bp, SARS Virus
ttgcagactatggtctcgaaccagt

SEQ ID NO: 206981 - DNA, 25 bp, SARS Virus
tgcagactatgtgctcgaaccagtt

SEQ ID NO: 206982 - DNA, 25 bp, SARS Virus
gcagactatgttgtcgaaccagttc

SEQ ID NO: 206983 - DNA, 25 bp, SARS Virus
cagactatgttcgcgaaccagttcg

SEQ ID NO: 206984 - DNA, 25 bp, SARS Virus
agactatgttctggaaccagttcgt

SEQ ID NO: 206985 - DNA, 25 bp, SARS Virus
gactatgttctcgaaccagttcgtt

SEQ ID NO: 206986 - DNA, 25 bp, SARS Virus
actatgttctcggaccagttcgttg

SEQ ID NO: 206987 - DNA, 25 bp, SARS Virus
ctatgttctcgagccagttcgttgt

SEQ ID NO: 206988 - DNA, 25 bp, SARS Virus
tatgttctcgaagcagttcgttgtc

SEQ ID NO: 206989 - DNA, 25 bp, SARS Virus
atgttctcgaacgagttcgttgtct

SEQ ID NO: 206990 - DNA, 25 bp, SARS Virus
tgttctcgaaccggttcgttgtctt

SEQ ID NO: 206991 - DNA, 25 bp, SARS Virus
gttctcgaaccagttcgttgtctta

SEQ ID NO: 206992 - DNA, 25 bp, SARS Virus
ttctcgaaccaggtcgttgtcttat

SEQ ID NO: 206993 - DNA, 25 bp, SARS Virus
tctcgaaccagtgcgttgtcttatc

SEQ ID NO: 206994 - DNA, 25 bp, SARS Virus
ctcgaaccagttggttgtcttatcc

SEQ ID NO: 206995 - DNA, 25 bp, SARS Virus
tcgaaccagttcgttgtcttatcca

SEQ ID NO: 206996 - DNA, 25 bp, SARS Virus
cgaaccagttcggtgtcttatccaa

SEQ ID NO: 206997 - DNA, 25 bp, SARS Virus
gaaccagttcgtggtcttatccaac

SEQ ID NO: 206998 - DNA, 25 bp, SARS Virus
aaccagttcgttgtcttatccaacc

SEQ ID NO: 206999 - DNA, 25 bp, SARS Virus
accagttcgttggcttatccaaccg

SEQ ID NO: 207000 - DNA, 25 bp, SARS Virus
ccagttcgttgtgttatccaaccgt

SEQ ID NO: 207001 - DNA, 25 bp, SARS Virus
cagttcgttgtcgtatccaaccgtg

SEQ ID NO: 207002 - DNA, 25 bp, SARS Virus
agttcgttgtctgatccaaccgtgt

SEQ ID NO: 207003 - DNA, 25 bp, SARS Virus
gttcgttgtcttgtccaaccgtgta

SEQ ID NO: 207004 - DNA, 25 bp, SARS Virus
ttcgttgtcttagccaaccgtgtag

SEQ ID NO: 207005 - DNA, 25 bp, SARS Virus
tcgttgtcttatgcaaccgtgtagt

SEQ ID NO: 207006 - DNA, 25 bp, SARS Virus
cgttgtcttatcgaaccgtgtagtc

SEQ ID NO: 207007 - DNA, 25 bp, SARS Virus
gttgtcttatccgaccgtgtagtcg

SEQ ID NO: 207008 - DNA, 25 bp, SARS Virus
ttgtcttatccagccgtgtagtcga

SEQ ID NO: 207009 - DNA, 25 bp, SARS Virus
tgtcttatccaagcgtgtagtcgac

SEQ ID NO: 207010 - DNA, 25 bp, SARS Virus
gtcttatccaacggtgtagtcgact

SEQ ID NO: 207011 - DNA, 25 bp, SARS Virus
tcttatccaaccgtgtagtcgactg

SEQ ID NO: 207012 - DNA, 25 bp, SARS Virus
cttatccaaccgggtagtcgactga

SEQ ID NO: 207013 - DNA, 25 bp, SARS Virus
ttatccaaccgtgtagtcgactgac

SEQ ID NO: 207014 - DNA, 25 bp, SARS Virus
tatccaaccgtggagtcgactgaca

SEQ ID NO: 207015 - DNA, 25 bp, SARS Virus
atccaaccgtgtggtcgactgacat

SEQ ID NO: 207016 - DNA, 25 bp, SARS Virus
tccaaccgtgtagtcgactgacatc

SEQ ID NO: 207017 - DNA, 25 bp, SARS Virus
ccaaccgtgtaggcgactgacatca

SEQ ID NO: 207018 - DNA, 25 bp, SARS Virus
caaccgtgtagtggactgacatcat

SEQ ID NO: 207019 - DNA, 25 bp, SARS Virus
aaccgtgtagtcgactgacatcatg

SEQ ID NO: 207020 - DNA, 25 bp, SARS Virus
accgtgtagtcggctgacatcatgt

SEQ ID NO: 207021 - DNA, 25 bp, SARS Virus
ccgtgtagtcgagtgacatcatgtg

SEQ ID NO: 207022 - DNA, 25 bp, SARS Virus
cgtgtagtcgacggacatcatgtgt

SEQ ID NO: 207023 - DNA, 25 bp, SARS Virus
gtgtagtcgactgacatcatgtgtc

SEQ ID NO: 207024 - DNA, 25 bp, SARS Virus
tgtagtcgactggcatcatgtgtct

SEQ ID NO: 207025 - DNA, 25 bp, SARS Virus
gtagtcgactgagatcatgtgtctt

SEQ ID NO: 207026 - DNA, 25 bp, SARS Virus
tagtcgactgacgtcatgtgtcttc

SEQ ID NO: 207027 - DNA, 25 bp, SARS Virus
agtcgactgacagcatgtgtcttcg

SEQ ID NO: 207028 - DNA, 25 bp, SARS Virus
gtcgactgacatgatgtgtcttcgt

SEQ ID NO: 207029 - DNA, 25 bp, SARS Virus
tcgactgacatcgtgtgtcttcgtc

SEQ ID NO: 207030 - DNA, 25 bp, SARS Virus
cgactgacatcaggtgtcttcgtct

SEQ ID NO: 207031 - DNA, 25 bp, SARS Virus
gactgacatcatgtgtcttcgtctg

SEQ ID NO: 207032 - DNA, 25 bp, SARS Virus
actgacatcatgggtcttcgtctga

SEQ ID NO: 207033 - DNA, 25 bp, SARS Virus
ctgacatcatgtgtcttcgtctgaa

SEQ ID NO: 207034 - DNA, 25 bp, SARS Virus
tgacatcatgtggcttcgtctgaat

SEQ ID NO: 207035 - DNA, 25 bp, SARS Virus
gacatcatgtgtgttcgtctgaatc

SEQ ID NO: 207036 - DNA, 25 bp, SARS Virus
acatcatgtgtcgtcgtctgaatct

SEQ ID NO: 207037 - DNA, 25 bp, SARS Virus
catcatgtgtctgcgtctgaatctt

SEQ ID NO: 207038 - DNA, 25 bp, SARS Virus
atcatgtgtcttggtctgaatcttc

SEQ ID NO: 207039 - DNA, 25 bp, SARS Virus
tcatgtgtcttcgtctgaatcttcg

SEQ ID NO: 207040 - DNA, 25 bp, SARS Virus
catgtgtcttcggctgaatcttcgt

SEQ ID NO: 207041 - DNA, 25 bp, SARS Virus
atgtgtcttcgtgtgaatcttcgtc

SEQ ID NO: 207042 - DNA, 25 bp, SARS Virus
tgtgtcttcgtcggaatcttcgtct

SEQ ID NO: 207043 - DNA, 25 bp, SARS Virus
gtgtcttcgtctgaatcttcgtctg

SEQ ID NO: 207044 - DNA, 25 bp, SARS Virus
tgtcttcgtctggatcttcgtctga

SEQ ID NO: 207045 - DNA, 25 bp, SARS Virus
gtcttcgtctgagtcttcgtctgag

SEQ ID NO: 207046 - DNA, 25 bp, SARS Virus
tcttcgtctgaagcttcgtctgagc

SEQ ID NO: 207047 - DNA, 25 bp, SARS Virus
cttcgtctgaatgttcgtctgagca

SEQ ID NO: 207048 - DNA, 25 bp, SARS Virus
ttcgtctgaatcgtcgtctgagcag

SEQ ID NO: 207049 - DNA, 25 bp, SARS Virus
tcgtctgaatctgcgtctgagcagc

SEQ ID NO: 207050 - DNA, 25 bp, SARS Virus
cgtctgaatcttggtctgagcagcg

SEQ ID NO: 207051 - DNA, 25 bp, SARS Virus
gtctgaatcttcgtctgagcagcgt

SEQ ID NO: 207052 - DNA, 25 bp, SARS Virus
tctgaatcttcggctgagcagcgta

SEQ ID NO: 207053 - DNA, 25 bp, SARS Virus
ctgaatcttcgtgtgagcagcgtaa

SEQ ID NO: 207054 - DNA, 25 bp, SARS Virus
tgaatcttcgtcggagcagcgtaaa

SEQ ID NO: 207055 - DNA, 25 bp, SARS Virus
gaatcttcgtctgagcagcgtaaac

SEQ ID NO: 207056 - DNA, 25 bp, SARS Virus
aatcttcgtctgggcagcgtaaacc

SEQ ID NO: 207057 - DNA, 25 bp, SARS Virus
atcttcgtctgagcagcgtaaacct

SEQ ID NO: 207058 - DNA, 25 bp, SARS Virus
tcttcgtctgaggagcgtaaacctg

SEQ ID NO: 207059 - DNA, 25 bp, SARS Virus
cttcgtctgagcggcgtaaacctga

SEQ ID NO: 207060 - DNA, 25 bp, SARS Virus
ttcgtctgagcagcgtaaacctgaa

SEQ ID NO: 207061 - DNA, 25 bp, SARS Virus
tcgtctgagcagggtaaacctgaac

SEQ ID NO: 207062 - DNA, 25 bp, SARS Virus
cgtctgagcagcgtaaacctgaacg

SEQ ID NO: 207063 - DNA, 25 bp, SARS Virus
gtctgagcagcggaaacctgaacgg

SEQ ID NO: 207064 - DNA, 25 bp, SARS Virus
tctgagcagcgtgaacctgaacggt

SEQ ID NO: 207065 - DNA, 25 bp, SARS Virus
ctgagcagcgtagacctgaacggta

SEQ ID NO: 207066 - DNA, 25 bp, SARS Virus
tgagcagcgtaagcctgaacggtag

SEQ ID NO: 207067 - DNA, 25 bp, SARS Virus
gagcagcgtaaagctgaacggtagt

SEQ ID NO: 207068 - DNA, 25 bp, SARS Virus
agcagcgtaaacgtgaacggtagtt

SEQ ID NO: 207069 - DNA, 25 bp, SARS Virus
gcagcgtaaaccggaacggtagttt

SEQ ID NO: 207070 - DNA, 25 bp, SARS Virus
cagcgtaaacctgaacggtagtttt

SEQ ID NO: 207071 - DNA, 25 bp, SARS Virus
agcgtaaacctggacggtagttttt

SEQ ID NO: 207072 - DNA, 25 bp, SARS Virus
gcgtaaacctgagcggtagtttttg

SEQ ID NO: 207073 - DNA, 25 bp, SARS Virus
cgtaaacctgaagggtagtttttga

SEQ ID NO: 207074 - DNA, 25 bp, SARS Virus
gtaaacctgaacggtagtttttgat

SEQ ID NO: 207075 - DNA, 25 bp, SARS Virus
taaacctgaacggtagtttttgata

SEQ ID NO: 207076 - DNA, 25 bp, SARS Virus
aaacctgaacgggagtttttgatac

SEQ ID NO: 207077 - DNA, 25 bp, SARS Virus
aacctgaacggtggtttttgatact

SEQ ID NO: 207078 - DNA, 25 bp, SARS Virus
acctgaacggtagtttttgatactg

SEQ ID NO: 207079 - DNA, 25 bp, SARS Virus
cctgaacggtaggttttgatactgt

SEQ ID NO: 207080 - DNA, 25 bp, SARS Virus
ctgaacggtagtgtttgatactgta

SEQ ID NO: 207081 - DNA, 25 bp, SARS Virus
tgaacggtagttgttgatactgtaa

SEQ ID NO: 207082 - DNA, 25 bp, SARS Virus
gaacggtagtttgtgatactgtaat

SEQ ID NO: 207083 - DNA, 25 bp, SARS Virus
aacggtagttttggatactgtaatt

SEQ ID NO: 207084 - DNA, 25 bp, SARS Virus
acggtagtttttgatactgtaatta

SEQ ID NO: 207085 - DNA, 25 bp, SARS Virus
cggtagtttttggtactgtaattat

SEQ ID NO: 207086 - DNA, 25 bp, SARS Virus
ggtagtttttgagactgtaattatc

SEQ ID NO: 207087 - DNA, 25 bp, SARS Virus
gtagtttttgatgctgtaattatcc

SEQ ID NO: 207088 - DNA, 25 bp, SARS Virus
tagtttttgatagtgtaattatccg

SEQ ID NO: 207089 - DNA, 25 bp, SARS Virus
agtttttgatacggtaattatccgt

SEQ ID NO: 207090 - DNA, 25 bp, SARS Virus
gtttttgatactgtaattatccgtc

SEQ ID NO: 207091 - DNA, 25 bp, SARS Virus
tttttgatactggaattatccgtca

SEQ ID NO: 207092 - DNA, 25 bp, SARS Virus
ttttgatactgtgattatccgtcac

SEQ ID NO: 207093 - DNA, 25 bp, SARS Virus
tttgatactgtagttatccgtcact

SEQ ID NO: 207094 - DNA, 25 bp, SARS Virus
ttgatactgtaagtatccgtcactt

SEQ ID NO: 207095 - DNA, 25 bp, SARS Virus
tgatactgtaatgatccgtcacttg

SEQ ID NO: 207096 - DNA, 25 bp, SARS Virus
gatactgtaattgtccgtcacttgg

SEQ ID NO: 207097 - DNA, 25 bp, SARS Virus
atactgtaattagccgtcacttgga

SEQ ID NO: 207098 - DNA, 25 bp, SARS Virus
tactgtaattatgcgtcacttggaa

SEQ ID NO: 207099 - DNA, 25 bp, SARS Virus
actgtaattatcggtcacttggaaa

SEQ ID NO: 207100 - DNA, 25 bp, SARS Virus
ctgtaattatccgtcacttggaaat

SEQ ID NO: 207101 - DNA, 25 bp, SARS Virus
tgtaattatccggcacttggaaatc

SEQ ID NO: 207102 - DNA, 25 bp, SARS Virus
gtaattatccgtgacttggaaatca

SEQ ID NO: 207103 - DNA, 25 bp, SARS Virus
taattatccgtcgcttggaaatcac

SEQ ID NO: 207104 - DNA, 25 bp, SARS Virus
aattatccgtcagttggaaatcaca

SEQ ID NO: 207105 - DNA, 25 bp, SARS Virus
attatccgtcacgtggaaatcacaa

SEQ ID NO: 207106 - DNA, 25 bp, SARS Virus
ttatccgtcactgggaaatcacaac

SEQ ID NO: 207107 - DNA, 25 bp, SARS Virus
tatccgtcacttggaaatcacaaca

SEQ ID NO: 207108 - DNA, 25 bp, SARS Virus
atccgtcacttggaaatcacaacaa

SEQ ID NO: 207109 - DNA, 25 bp, SARS Virus
tccgtcacttgggaatcacaacaat

SEQ ID NO: 207110 - DNA, 25 bp, SARS Virus
ccgtcacttggagatcacaacaatc

SEQ ID NO: 207111 - DNA, 25 bp, SARS Virus
cgtcacttggaagtcacaacaatcg

SEQ ID NO: 207112 - DNA, 25 bp, SARS Virus
gtcacttggaaagcacaacaatcga

SEQ ID NO: 207113 - DNA, 25 bp, SARS Virus
tcacttggaaatgacaacaatcgag

SEQ ID NO: 207114 - DNA, 25 bp, SARS Virus
cacttggaaatcgcaacaatcgaga

SEQ ID NO: 207115 - DNA, 25 bp, SARS Virus
acttggaaatcagaacaatcgagag

SEQ ID NO: 207116 - DNA, 25 bp, SARS Virus
cttggaaatcacgacaatcgagagt

SEQ ID NO: 207117 - DNA, 25 bp, SARS Virus
ttggaaatcacagcaatcgagagtt

SEQ ID NO: 207118 - DNA, 25 bp, SARS Virus
tggaaatcacaagaatcgagagttt

SEQ ID NO: 207119 - DNA, 25 bp, SARS Virus
ggaaatcacaacgatcgagagttta

SEQ ID NO: 207120 - DNA, 25 bp, SARS Virus
gaaatcacaacagtcgagagtttaa

SEQ ID NO: 207121 - DNA, 25 bp, SARS Virus
aaatcacaacaagcgagagtttaac

SEQ ID NO: 207122 - DNA, 25 bp, SARS Virus
aatcacaacaatggagagtttaaca

SEQ ID NO: 207123 - DNA, 25 bp, SARS Virus
atcacaacaatcgagagtttaacag

SEQ ID NO: 207124 - DNA, 25 bp, SARS Virus
tcacaacaatcgggagtttaacaga

SEQ ID NO: 207125 - DNA, 25 bp, SARS Virus
cacaacaatcgagagtttaacagat

SEQ ID NO: 207126 - DNA, 25 bp, SARS Virus
acaacaatcgagggtttaacagatt

SEQ ID NO: 207127 - DNA, 25 bp, SARS Virus
caacaatcgagagtttaacagattt

SEQ ID NO: 207128 - DNA, 25 bp, SARS Virus
aacaatcgagaggttaacagattta

SEQ ID NO: 207129 - DNA, 25 bp, SARS Virus
acaatcgagagtgtaacagatttaa

SEQ ID NO: 207130 - DNA, 25 bp, SARS Virus
caatcgagagttgaacagatttaac

SEQ ID NO: 207131 - DNA, 25 bp, SARS Virus
aatcgagagtttgacagatttaact

SEQ ID NO: 207132 - DNA, 25 bp, SARS Virus
atcgagagtttagcagatttaactg

SEQ ID NO: 207133 - DNA, 25 bp, SARS Virus
tcgagagtttaagagatttaactgt

SEQ ID NO: 207134 - DNA, 25 bp, SARS Virus
cgagagtttaacggatttaactgtt

SEQ ID NO: 207135 - DNA, 25 bp, SARS Virus
gagagtttaacagatttaactgttt

SEQ ID NO: 207136 - DNA, 25 bp, SARS Virus
agagtttaacaggtttaactgtttt

SEQ ID NO: 207137 - DNA, 25 bp, SARS Virus
gagtttaacagagttaactgtttta

SEQ ID NO: 207138 - DNA, 25 bp, SARS Virus
agtttaacagatgtaactgttttac

SEQ ID NO: 207139 - DNA, 25 bp, SARS Virus
gtttaacagattgaactgttttacc

SEQ ID NO: 207140 - DNA, 25 bp, SARS Virus
tttaacagatttgactgttttaccc

SEQ ID NO: 207141 - DNA, 25 bp, SARS Virus
ttaacagatttagctgttttaccct

SEQ ID NO: 207142 - DNA, 25 bp, SARS Virus
taacagatttaagtgttttaccctc

SEQ ID NO: 207143 - DNA, 25 bp, SARS Virus
aacagatttaacggttttaccctct

SEQ ID NO: 207144 - DNA, 25 bp, SARS Virus
acagatttaactgttttaccctctc

SEQ ID NO: 207145 - DNA, 25 bp, SARS Virus
cagatttaactggtttaccctctcg

SEQ ID NO: 207146 - DNA, 25 bp, SARS Virus
agatttaactgtgttaccctctcgc

SEQ ID NO: 207147 - DNA, 25 bp, SARS Virus
gatttaactgttgtaccctctcgcc

SEQ ID NO: 207148 - DNA, 25 bp, SARS Virus
atttaactgtttgaccctctcgcct

SEQ ID NO: 207149 - DNA, 25 bp, SARS Virus
tttaactgttttgccctctcgccta

SEQ ID NO: 207150 - DNA, 25 bp, SARS Virus
ttaactgttttagcctctcgcctac

SEQ ID NO: 207151 - DNA, 25 bp, SARS Virus
taactgttttacgctctcgcctaca

SEQ ID NO: 207152 - DNA, 25 bp, SARS Virus
aactgttttaccgtctcgcctacag

SEQ ID NO: 207153 - DNA, 25 bp, SARS Virus
actgttttacccgctcgcctacaga

SEQ ID NO: 207154 - DNA, 25 bp, SARS Virus
ctgttttaccctgtcgcctacagag

SEQ ID NO: 207155 - DNA, 25 bp, SARS Virus
tgttttaccctcgcgcctacagaga

SEQ ID NO: 207156 - DNA, 25 bp, SARS Virus
gttttaccctctggcctacagagag

SEQ ID NO: 207157 - DNA, 25 bp, SARS Virus
ttttaccctctcgcctacagagagt

SEQ ID NO: 207158 - DNA, 25 bp, SARS Virus
tttaccctctcggctacagagagta

SEQ ID NO: 207159 - DNA, 25 bp, SARS Virus
ttaccctctcgcgtacagagagtat

SEQ ID NO: 207160 - DNA, 25 bp, SARS Virus
taccctctcgccgacagagagtatc

SEQ ID NO: 207161 - DNA, 25 bp, SARS Virus
accctctcgcctgcagagagtatcc

SEQ ID NO: 207162 - DNA, 25 bp, SARS Virus
ccctctcgcctagagagagtatcca

SEQ ID NO: 207163 - DNA, 25 bp, SARS Virus
cctctcgcctacggagagtatccag

SEQ ID NO: 207164 - DNA, 25 bp, SARS Virus
ctctcgcctacagagagtatccaga

SEQ ID NO: 207165 - DNA, 25 bp, SARS Virus
tctcgcctacagggagtatccagaa

SEQ ID NO: 207166 - DNA, 25 bp, SARS Virus
ctcgcctacagagagtatccagaaa

SEQ ID NO: 207167 - DNA, 25 bp, SARS Virus
tcgcctacagagggtatccagaaaa

SEQ ID NO: 207168 - DNA, 25 bp, SARS Virus
cgcctacagagagtatccagaaaac

SEQ ID NO: 207169 - DNA, 25 bp, SARS Virus
gcctacagagaggatccagaaaact

SEQ ID NO: 207170 - DNA, 25 bp, SARS Virus
cctacagagagtgtccagaaaactg

SEQ ID NO: 207171 - DNA, 25 bp, SARS Virus
ctacagagagtagccagaaaactgg

SEQ ID NO: 207172 - DNA, 25 bp, SARS Virus
tacagagagtatgcagaaaactggt

SEQ ID NO: 207173 - DNA, 25 bp, SARS Virus
acagagagtatcgagaaaactggtc

SEQ ID NO: 207174 - DNA, 25 bp, SARS Virus
cagagagtatccggaaaactggtcg

SEQ ID NO: 207175 - DNA, 25 bp, SARS Virus
agagagtatccagaaaactggtcgg

SEQ ID NO: 207176 - DNA, 25 bp, SARS Virus
gagagtatccaggaaactggtcgga

SEQ ID NO: 207177 - DNA, 25 bp, SARS Virus
agagtatccagagaactggtcggaa

SEQ ID NO: 207178 - DNA, 25 bp, SARS Virus
gagtatccagaagactggtcggaac

SEQ ID NO: 207179 - DNA, 25 bp, SARS Virus
agtatccagaaagctggtcggaaca

SEQ ID NO: 207180 - DNA, 25 bp, SARS Virus
gtatccagaaaagtggtcggaacag

SEQ ID NO: 207181 - DNA, 25 bp, SARS Virus
tatccagaaaacgggtcggaacagt

SEQ ID NO: 207182 - DNA, 25 bp, SARS Virus
atccagaaaactggtcggaacagtt

SEQ ID NO: 207183 - DNA, 25 bp, SARS Virus
tccagaaaactggtcggaacagttt

SEQ ID NO: 207184 - DNA, 25 bp, SARS Virus
ccagaaaactgggcggaacagtttc

SEQ ID NO: 207185 - DNA, 25 bp, SARS Virus
cagaaaactggtgggaacagtttca

SEQ ID NO: 207186 - DNA, 25 bp, SARS Virus
agaaaactggtcggaacagtttcat

SEQ ID NO: 207187 - DNA, 25 bp, SARS Virus
gaaaactggtcggaacagtttcatc

SEQ ID NO: 207188 - DNA, 25 bp, SARS Virus
aaaactggtcgggacagtttcatct

SEQ ID NO: 207189 - DNA, 25 bp, SARS Virus
aaactggtcggagcagtttcatctc

SEQ ID NO: 207190 - DNA, 25 bp, SARS Virus
aactggtcggaagagtttcatctcc

SEQ ID NO: 207191 - DNA, 25 bp, SARS Virus
actggtcggaacggtttcatctcca

SEQ ID NO: 207192 - DNA, 25 bp, SARS Virus
ctggtcggaacagtttcatctccac

SEQ ID NO: 207193 - DNA, 25 bp, SARS Virus
tggtcggaacaggttcatctccact

SEQ ID NO: 207194 - DNA, 25 bp, SARS Virus
ggtcggaacagtgtcatctccactt

SEQ ID NO: 207195 - DNA, 25 bp, SARS Virus
gtcggaacagttgcatctccacttc

SEQ ID NO: 207196 - DNA, 25 bp, SARS Virus
tcggaacagtttgatctccacttcg

SEQ ID NO: 207197 - DNA, 25 bp, SARS Virus
cggaacagtttcgtctccacttcgc

SEQ ID NO: 207198 - DNA, 25 bp, SARS Virus
ggaacagtttcagctccacttcgcg

SEQ ID NO: 207199 - DNA, 25 bp, SARS Virus
gaacagtttcatgtccacttcgcgc

SEQ ID NO: 207200 - DNA, 25 bp, SARS Virus
aacagtttcatcgccacttcgcgcg

SEQ ID NO: 207201 - DNA, 25 bp, SARS Virus
acagtttcatctgcacttcgcgcgg

SEQ ID NO: 207202 - DNA, 25 bp, SARS Virus
cagtttcatctcgacttcgcgcggt

SEQ ID NO: 207203 - DNA, 25 bp, SARS Virus
agtttcatctccgcttcgcgcggta

SEQ ID NO: 207204 - DNA, 25 bp, SARS Virus
gtttcatctccagttcgcgcggtaa

SEQ ID NO: 207205 - DNA, 25 bp, SARS Virus
tttcatctccacgtcgcgcggtaaa

SEQ ID NO: 207206 - DNA, 25 bp, SARS Virus
ttcatctccactgcgcgcggtaaaa

SEQ ID NO: 207207 - DNA, 25 bp, SARS Virus
tcatctccacttggcgcggtaaaaa

SEQ ID NO: 207208 - DNA, 25 bp, SARS Virus
catctccacttcgcgcggtaaaaag

SEQ ID NO: 207209 - DNA, 25 bp, SARS Virus
atctccacttcgggcggtaaaaagt

SEQ ID NO: 207210 - DNA, 25 bp, SARS Virus
tctccacttcgcgcggtaaaaagtg

SEQ ID NO: 207211 - DNA, 25 bp, SARS Virus
ctccacttcgcggggtaaaaagtgt

SEQ ID NO: 207212 - DNA, 25 bp, SARS Virus
tccacttcgcgcggtaaaaagtgtc

SEQ ID NO: 207213 - DNA, 25 bp, SARS Virus
ccacttcgcgcggtaaaaagtgtcg

SEQ ID NO: 207214 - DNA, 25 bp, SARS Virus
cacttcgcgcgggaaaaagtgtcgt

SEQ ID NO: 207215 - DNA, 25 bp, SARS Virus
acttcgcgcggtgaaaagtgtcgtt

SEQ ID NO: 207216 - DNA, 25 bp, SARS Virus
cttcgcgcggtagaaagtgtcgttg

SEQ ID NO: 207217 - DNA, 25 bp, SARS Virus
ttcgcgcggtaagaagtgtcgttgt

SEQ ID NO: 207218 - DNA, 25 bp, SARS Virus
tcgcgcggtaaagagtgtcgttgtg

SEQ ID NO: 207219 - DNA, 25 bp, SARS Virus
cgcgcggtaaaaggtgtcgttgtga

SEQ ID NO: 207220 - DNA, 25 bp, SARS Virus
gcgcggtaaaaagtgtcgttgtgat

SEQ ID NO: 207221 - DNA, 25 bp, SARS Virus
cgcggtaaaaagggtcgttgtgata

SEQ ID NO: 207222 - DNA, 25 bp, SARS Virus
gcggtaaaaagtgtcgttgtgatag

SEQ ID NO: 207223 - DNA, 25 bp, SARS Virus
cggtaaaaagtggcgttgtgatagt

SEQ ID NO: 207224 - DNA, 25 bp, SARS Virus
ggtaaaaagtgtggttgtgatagtt

SEQ ID NO: 207225 - DNA, 25 bp, SARS Virus
gtaaaaagtgtcgttgtgatagttg

SEQ ID NO: 207226 - DNA, 25 bp, SARS Virus
taaaaagtgtcggtgtgatagttgt

SEQ ID NO: 207227 - DNA, 25 bp, SARS Virus
aaaaagtgtcgtggtgatagttgtt

SEQ ID NO: 207228 - DNA, 25 bp, SARS Virus
aaaagtgtcgttgtgatagttgtta

SEQ ID NO: 207229 - DNA, 25 bp, SARS Virus
aaagtgtcgttgggatagttgttat

SEQ ID NO: 207230 - DNA, 25 bp, SARS Virus
aagtgtcgttgtgatagttgttata

SEQ ID NO: 207231 - DNA, 25 bp, SARS Virus
agtgtcgttgtggtagttgttatat

SEQ ID NO: 207232 - DNA, 25 bp, SARS Virus
gtgtcgttgtgagagttgttatatg

SEQ ID NO: 207233 - DNA, 25 bp, SARS Virus
tgtcgttgtgatggttgttatatgc

SEQ ID NO: 207234 - DNA, 25 bp, SARS Virus
gtcgttgtgatagttgttatatgct

SEQ ID NO: 207235 - DNA, 25 bp, SARS Virus
tcgttgtgataggtgttatatgcta

SEQ ID NO: 207236 - DNA, 25 bp, SARS Virus
cgttgtgatagtggttatatgctac

SEQ ID NO: 207237 - DNA, 25 bp, SARS Virus
gttgtgatagttgttatatgctact

SEQ ID NO: 207238 - DNA, 25 bp, SARS Virus
ttgtgatagttggtatatgctactg

SEQ ID NO: 207239 - DNA, 25 bp, SARS Virus
tgtgatagttgtgatatgctactga

SEQ ID NO: 207240 - DNA, 25 bp, SARS Virus
gtgatagttgttgtatgctactgac

SEQ ID NO: 207241 - DNA, 25 bp, SARS Virus
tgatagttgttagatgctactgacc

SEQ ID NO: 207242 - DNA, 25 bp, SARS Virus
gatagttgttatgtgctactgacca

SEQ ID NO: 207243 - DNA, 25 bp, SARS Virus
atagttgttataggctactgaccag

SEQ ID NO: 207244 - DNA, 25 bp, SARS Virus
tagttgttatatgctactgaccagt

SEQ ID NO: 207245 - DNA, 25 bp, SARS Virus
agttgttatatggtactgaccagtc

SEQ ID NO: 207246 - DNA, 25 bp, SARS Virus
gttgttatatgcgactgaccagtca

SEQ ID NO: 207247 - DNA, 25 bp, SARS Virus
ttgttatatgctgctgaccagtcat

SEQ ID NO: 207248 - DNA, 25 bp, SARS Virus
tgttatatgctagtgaccagtcatc

SEQ ID NO: 207249 - DNA, 25 bp, SARS Virus
gttatatgctacggaccagtcatcc

SEQ ID NO: 207250 - DNA, 25 bp, SARS Virus
ttatatgctactgaccagtcatccc

SEQ ID NO: 207251 - DNA, 25 bp, SARS Virus
tatatgctactggccagtcatccca

SEQ ID NO: 207252 - DNA, 25 bp, SARS Virus
atatgctactgagcagtcatcccaa

SEQ ID NO: 207253 - DNA, 25 bp, SARS Virus
tatgctactgacgagtcatcccaac

SEQ ID NO: 207254 - DNA, 25 bp, SARS Virus
atgctactgaccggtcatcccaact

SEQ ID NO: 207255 - DNA, 25 bp, SARS Virus
tgctactgaccagtcatcccaacta

SEQ ID NO: 207256 - DNA, 25 bp, SARS Virus
gctactgaccaggcatcccaactaa

SEQ ID NO: 207257 - DNA, 25 bp, SARS Virus
ctactgaccagtgatcccaactaac

SEQ ID NO: 207258 - DNA, 25 bp, SARS Virus
tactgaccagtcgtcccaactaacc

SEQ ID NO: 207259 - DNA, 25 bp, SARS Virus
actgaccagtcagcccaactaacca

SEQ ID NO: 207260 - DNA, 25 bp, SARS Virus
ctgaccagtcatgccaactaaccag

SEQ ID NO: 207261 - DNA, 25 bp, SARS Virus
tgaccagtcatcgcaactaaccaga

SEQ ID NO: 207262 - DNA, 25 bp, SARS Virus
gaccagtcatccgaactaaccagaa

SEQ ID NO: 207263 - DNA, 25 bp, SARS Virus
accagtcatcccgactaaccagaaa

SEQ ID NO: 207264 - DNA, 25 bp, SARS Virus
ccagtcatcccagctaaccagaaaa

SEQ ID NO: 207265 - DNA, 25 bp, SARS Virus
cagtcatcccaagtaaccagaaaat

SEQ ID NO: 207266 - DNA, 25 bp, SARS Virus
agtcatcccaacgaaccagaaaatt

SEQ ID NO: 207267 - DNA, 25 bp, SARS Virus
gtcatcccaactgaccagaaaattt

SEQ ID NO: 207268 - DNA, 25 bp, SARS Virus
tcatcccaactagccagaaaatttg

SEQ ID NO: 207269 - DNA, 25 bp, SARS Virus
catcccaactaagcagaaaatttga

SEQ ID NO: 207270 - DNA, 25 bp, SARS Virus
atcccaactaacgagaaaatttgac

SEQ ID NO: 207271 - DNA, 25 bp, SARS Virus
tcccaactaaccggaaaatttgacc

SEQ ID NO: 207272 - DNA, 25 bp, SARS Virus
cccaactaaccagaaaatttgacct

SEQ ID NO: 207273 - DNA, 25 bp, SARS Virus
ccaactaaccaggaaatttgacctc

SEQ ID NO: 207274 - DNA, 25 bp, SARS Virus
caactaaccagagaatttgacctca

SEQ ID NO: 207275 - DNA, 25 bp, SARS Virus
aactaaccagaagatttgacctcac

SEQ ID NO: 207276 - DNA, 25 bp, SARS Virus
actaaccagaaagtttgacctcact

SEQ ID NO: 207277 - DNA, 25 bp, SARS Virus
ctaaccagaaaagttgacctcactg

SEQ ID NO: 207278 - DNA, 25 bp, SARS Virus
taaccagaaaatgtgacctcactgt

SEQ ID NO: 207279 - DNA, 25 bp, SARS Virus
aaccagaaaattggacctcactgtt

SEQ ID NO: 207280 - DNA, 25 bp, SARS Virus
accagaaaatttgacctcactgttt

SEQ ID NO: 207281 - DNA, 25 bp, SARS Virus
ccagaaaatttggcctcactgttta

SEQ ID NO: 207282 - DNA, 25 bp, SARS Virus
cagaaaatttgagctcactgtttag

SEQ ID NO: 207283 - DNA, 25 bp, SARS Virus
agaaaatttgacgtcactgtttagt

SEQ ID NO: 207284 - DNA, 25 bp, SARS Virus
gaaaatttgaccgcactgtttagtg

SEQ ID NO: 207285 - DNA, 25 bp, SARS Virus
aaaatttgacctgactgtttagtgc

SEQ ID NO: 207286 - DNA, 25 bp, SARS Virus
aaatttgacctcgctgtttagtgct

SEQ ID NO: 207287 - DNA, 25 bp, SARS Virus
aatttgacctcagtgtttagtgctc

SEQ ID NO: 207288 - DNA, 25 bp, SARS Virus
atttgacctcacggtttagtgctcg

SEQ ID NO: 207289 - DNA, 25 bp, SARS Virus
tttgacctcactgtttagtgctcgt

SEQ ID NO: 207290 - DNA, 25 bp, SARS Virus
ttgacctcactggttagtgctcgtt

SEQ ID NO: 207291 - DNA, 25 bp, SARS Virus
tgacctcactgtgtagtgctcgttg

SEQ ID NO: 207292 - DNA, 25 bp, SARS Virus
gacctcactgttgagtgctcgttga

SEQ ID NO: 207293 - DNA, 25 bp, SARS Virus
acctcactgtttggtgctcgttgaa

SEQ ID NO: 207294 - DNA, 25 bp, SARS Virus
cctcactgtttagtgctcgttgaag

SEQ ID NO: 207295 - DNA, 25 bp, SARS Virus
ctcactgtttagggctcgttgaagt

SEQ ID NO: 207296 - DNA, 25 bp, SARS Virus
tcactgtttagtgctcgttgaagta

SEQ ID NO: 207297 - DNA, 25 bp, SARS Virus
cactgtttagtggtcgttgaagtag

SEQ ID NO: 207298 - DNA, 25 bp, SARS Virus
actgtttagtgcgcgttgaagtagt

SEQ ID NO: 207299 - DNA, 25 bp, SARS Virus
ctgtttagtgctggttgaagtagtg

SEQ ID NO: 207300 - DNA, 25 bp, SARS Virus
tgtttagtgctcgttgaagtagtga

SEQ ID NO: 207301 - DNA, 25 bp, SARS Virus
gtttagtgctcggtgaagtagtgat

SEQ ID NO: 207302 - DNA, 25 bp, SARS Virus
tttagtgctcgtggaagtagtgatt

SEQ ID NO: 207303 - DNA, 25 bp, SARS Virus
ttagtgctcgttgaagtagtgatta

SEQ ID NO: 207304 - DNA, 25 bp, SARS Virus
tagtgctcgttggagtagtgattac

SEQ ID NO: 207305 - DNA, 25 bp, SARS Virus
agtgctcgttgaggtagtgattact

SEQ ID NO: 207306 - DNA, 25 bp, SARS Virus
gtgctcgttgaagtagtgattactt

SEQ ID NO: 207307 - DNA, 25 bp, SARS Virus
tgctcgttgaaggagtgattactta

SEQ ID NO: 207308 - DNA, 25 bp, SARS Virus
gctcgttgaagtggtgattacttac

SEQ ID NO: 207309 - DNA, 25 bp, SARS Virus
ctcgttgaagtagtgattacttaca

SEQ ID NO: 207310 - DNA, 25 bp, SARS Virus
tcgttgaagtagggattacttacat

SEQ ID NO: 207311 - DNA, 25 bp, SARS Virus
cgttgaagtagtgattacttacatg

SEQ ID NO: 207312 - DNA, 25 bp, SARS Virus
gttgaagtagtggttacttacatga

SEQ ID NO: 207313 - DNA, 25 bp, SARS Virus
ttgaagtagtgagtacttacatgat

SEQ ID NO: 207314 - DNA, 25 bp, SARS Virus
tgaagtagtgatgacttacatgatg

SEQ ID NO: 207315 - DNA, 25 bp, SARS Virus
gaagtagtgattgcttacatgatgg

SEQ ID NO: 207316 - DNA, 25 bp, SARS Virus
aagtagtgattagttacatgatggt

SEQ ID NO: 207317 - DNA, 25 bp, SARS Virus
agtagtgattacgtacatgatggtc

SEQ ID NO: 207318 - DNA, 25 bp, SARS Virus
gtagtgattactgacatgatggtca

SEQ ID NO: 207319 - DNA, 25 bp, SARS Virus
tagtgattacttgcatgatggtcac

SEQ ID NO: 207320 - DNA, 25 bp, SARS Virus
agtgattacttagatgatggtcacg

SEQ ID NO: 207321 - DNA, 25 bp, SARS Virus
gtgattacttacgtgatggtcacgt

SEQ ID NO: 207322 - DNA, 25 bp, SARS Virus
tgattacttacaggatggtcacgtt

SEQ ID NO: 207323 - DNA, 25 bp, SARS Virus
gattacttacatgatggtcacgttt

SEQ ID NO: 207324 - DNA, 25 bp, SARS Virus
attacttacatggtggtcacgtttt

SEQ ID NO: 207325 - DNA, 25 bp, SARS Virus
ttacttacatgagggtcacgtttta

SEQ ID NO: 207326 - DNA, 25 bp, SARS Virus
tacttacatgatggtcacgttttac

SEQ ID NO: 207327 - DNA, 25 bp, SARS Virus
acttacatgatggtcacgttttaca

SEQ ID NO: 207328 - DNA, 25 bp, SARS Virus
cttacatgatgggcacgttttacac

SEQ ID NO: 207329 - DNA, 25 bp, SARS Virus
ttacatgatggtgacgttttacaca

SEQ ID NO: 207330 - DNA, 25 bp, SARS Virus
tacatgatggtcgcgttttacacag

SEQ ID NO: 207331 - DNA, 25 bp, SARS Virus
acatgatggtcaggttttacacagt

SEQ ID NO: 207332 - DNA, 25 bp, SARS Virus
catgatggtcacgttttacacagtg

SEQ ID NO: 207333 - DNA, 25 bp, SARS Virus
atgatggtcacggtttacacagtgt

SEQ ID NO: 207334 - DNA, 25 bp, SARS Virus
tgatggtcacgtgttacacagtgtt

SEQ ID NO: 207335 - DNA, 25 bp, SARS Virus
gatggtcacgttgtacacagtgtta

SEQ ID NO: 207336 - DNA, 25 bp, SARS Virus
atggtcacgtttgacacagtgttaa

SEQ ID NO: 207337 - DNA, 25 bp, SARS Virus
tggtcacgttttgcacagtgttaac

SEQ ID NO: 207338 - DNA, 25 bp, SARS Virus
ggtcacgttttagacagtgttaact

SEQ ID NO: 207339 - DNA, 25 bp, SARS Virus
gtcacgttttacgcagtgttaactc

SEQ ID NO: 207340 - DNA, 25 bp, SARS Virus
tcacgttttacagagtgttaactct

SEQ ID NO: 207341 - DNA, 25 bp, SARS Virus
cacgttttacacggtgttaactctg

SEQ ID NO: 207342 - DNA, 25 bp, SARS Virus
acgttttacacagtgttaactctgt

SEQ ID NO: 207343 - DNA, 25 bp, SARS Virus
cgttttacacagggttaactctgtt

SEQ ID NO: 207344 - DNA, 25 bp, SARS Virus
gttttacacagtgttaactctgtta

SEQ ID NO: 207345 - DNA, 25 bp, SARS Virus
ttttacacagtggtaactctgttaa

SEQ ID NO: 207346 - DNA, 25 bp, SARS Virus
tttacacagtgtgaactctgttaag

SEQ ID NO: 207347 - DNA, 25 bp, SARS Virus
ttacacagtgttgactctgttaagg

SEQ ID NO: 207348 - DNA, 25 bp, SARS Virus
tacacagtgttagctctgttaaggt

SEQ ID NO: 207349 - DNA, 25 bp, SARS Virus
acacagtgttaagtctgttaaggtt

SEQ ID NO: 207350 - DNA, 25 bp, SARS Virus
cacagtgttaacgctgttaaggtta

SEQ ID NO: 207351 - DNA, 25 bp, SARS Virus
acagtgttaactgtgttaaggttaa

SEQ ID NO: 207352 - DNA, 25 bp, SARS Virus
cagtgttaactcggttaaggttaac

SEQ ID NO: 207353 - DNA, 25 bp, SARS Virus
agtgttaactctgttaaggttaaca

SEQ ID NO: 207354 - DNA, 25 bp, SARS Virus
gtgttaactctggtaaggttaacac

SEQ ID NO: 207355 - DNA, 25 bp, SARS Virus
tgttaactctgtgaaggttaacact

SEQ ID NO: 207356 - DNA, 25 bp, SARS Virus
gttaactctgttgaggttaacactc

SEQ ID NO: 207357 - DNA, 25 bp, SARS Virus
ttaactctgttagggttaacactca

SEQ ID NO: 207358 - DNA, 25 bp, SARS Virus
taactctgttaaggttaacactcag

SEQ ID NO: 207359 - DNA, 25 bp, SARS Virus
aactctgttaaggttaacactcaga

SEQ ID NO: 207360 - DNA, 25 bp, SARS Virus
actctgttaagggtaacactcagaa

SEQ ID NO: 207361 - DNA, 25 bp, SARS Virus
ctctgttaaggtgaacactcagaac

SEQ ID NO: 207362 - DNA, 25 bp, SARS Virus
tctgttaaggttgacactcagaacg

SEQ ID NO: 207363 - DNA, 25 bp, SARS Virus
ctgttaaggttagcactcagaacgt

SEQ ID NO: 207364 - DNA, 25 bp, SARS Virus
tgttaaggttaagactcagaacgtc

SEQ ID NO: 207365 - DNA, 25 bp, SARS Virus
gttaaggttaacgctcagaacgtct

SEQ ID NO: 207366 - DNA, 25 bp, SARS Virus
ttaaggttaacagtcagaacgtctt

SEQ ID NO: 207367 - DNA, 25 bp, SARS Virus
taaggttaacacgcagaacgtcttc

SEQ ID NO: 207368 - DNA, 25 bp, SARS Virus
aaggttaacactgagaacgtcttcg

SEQ ID NO: 207369 - DNA, 25 bp, SARS Virus
aggttaacactcggaacgtcttcgg

SEQ ID NO: 207370 - DNA, 25 bp, SARS Virus
ggttaacactcagaacgtcttcggt

SEQ ID NO: 207371 - DNA, 25 bp, SARS Virus
gttaacactcaggacgtcttcggtg

SEQ ID NO: 207372 - DNA, 25 bp, SARS Virus
ttaacactcagagcgtcttcggtgc

SEQ ID NO: 207373 - DNA, 25 bp, SARS Virus
taacactcagaaggtcttcggtgcc

SEQ ID NO: 207374 - DNA, 25 bp, SARS Virus
aacactcagaacgtcttcggtgccg

SEQ ID NO: 207375 - DNA, 25 bp, SARS Virus
acactcagaacggcttcggtgccgg

SEQ ID NO: 207376 - DNA, 25 bp, SARS Virus
cactcagaacgtgttcggtgccgga

SEQ ID NO: 207377 - DNA, 25 bp, SARS Virus
actcagaacgtcgtcggtgccggag

SEQ ID NO: 207378 - DNA, 25 bp, SARS Virus
ctcagaacgtctgcggtgccggagg

SEQ ID NO: 207379 - DNA, 25 bp, SARS Virus
tcagaacgtcttgggtgccggaggt

SEQ ID NO: 207380 - DNA, 25 bp, SARS Virus
cagaacgtcttcggtgccggaggta

SEQ ID NO: 207381 - DNA, 25 bp, SARS Virus
agaacgtcttcggtgccggaggtaa

SEQ ID NO: 207382 - DNA, 25 bp, SARS Virus
gaacgtcttcggggccggaggtaaa

SEQ ID NO: 207383 - DNA, 25 bp, SARS Virus
aacgtcttcggtgccggaggtaaac

SEQ ID NO: 207384 - DNA, 25 bp, SARS Virus
acgtcttcggtggcggaggtaaacg

SEQ ID NO: 207385 - DNA, 25 bp, SARS Virus
cgtcttcggtgcgggaggtaaacgt

SEQ ID NO: 207386 - DNA, 25 bp, SARS Virus
gtcttcggtgccggaggtaaacgta

SEQ ID NO: 207387 - DNA, 25 bp, SARS Virus
tcttcggtgccggaggtaaacgtat

SEQ ID NO: 207388 - DNA, 25 bp, SARS Virus
cttcggtgccgggggtaaacgtatc

SEQ ID NO: 207389 - DNA, 25 bp, SARS Virus
ttcggtgccggaggtaaacgtatct

SEQ ID NO: 207390 - DNA, 25 bp, SARS Virus
tcggtgccggaggtaaacgtatctg

SEQ ID NO: 207391 - DNA, 25 bp, SARS Virus
cggtgccggagggaaacgtatctgt

SEQ ID NO: 207392 - DNA, 25 bp, SARS Virus
ggtgccggaggtgaacgtatctgta

SEQ ID NO: 207393 - DNA, 25 bp, SARS Virus
gtgccggaggtagacgtatctgtat

SEQ ID NO: 207394 - DNA, 25 bp, SARS Virus
tgccggaggtaagcgtatctgtatc

SEQ ID NO: 207395 - DNA, 25 bp, SARS Virus
gccggaggtaaaggtatctgtatct

SEQ ID NO: 207396 - DNA, 25 bp, SARS Virus
ccggaggtaaacgtatctgtatctt

SEQ ID NO: 207397 - DNA, 25 bp, SARS Virus
cggaggtaaacggatctgtatcttt

SEQ ID NO: 207398 - DNA, 25 bp, SARS Virus
ggaggtaaacgtgtctgtatctttc

SEQ ID NO: 207399 - DNA, 25 bp, SARS Virus
gaggtaaacgtagctgtatctttct

SEQ ID NO: 207400 - DNA, 25 bp, SARS Virus
aggtaaacgtatgtgtatctttcta

SEQ ID NO: 207401 - DNA, 25 bp, SARS Virus
ggtaaacgtatcggtatctttctag

SEQ ID NO: 207402 - DNA, 25 bp, SARS Virus
gtaaacgtatctgtatctttctaga

SEQ ID NO: 207403 - DNA, 25 bp, SARS Virus
taaacgtatctggatctttctagag

SEQ ID NO: 207404 - DNA, 25 bp, SARS Virus
aaacgtatctgtgtctttctagaga

SEQ ID NO: 207405 - DNA, 25 bp, SARS Virus
aacgtatctgtagctttctagagaa

SEQ ID NO: 207406 - DNA, 25 bp, SARS Virus
acgtatctgtatgtttctagagaag

SEQ ID NO: 207407 - DNA, 25 bp, SARS Virus
cgtatctgtatcgttctagagaagt

SEQ ID NO: 207408 - DNA, 25 bp, SARS Virus
gtatctgtatctgtctagagaagta

SEQ ID NO: 207409 - DNA, 25 bp, SARS Virus
tatctgtatcttgctagagaagtac

SEQ ID NO: 207410 - DNA, 25 bp, SARS Virus
atctgtatctttgtagagaagtacg

SEQ ID NO: 207411 - DNA, 25 bp, SARS Virus
tctgtatctttcgagagaagtacgg

SEQ ID NO: 207412 - DNA, 25 bp, SARS Virus
ctgtatctttctggagaagtacggt

SEQ ID NO: 207413 - DNA, 25 bp, SARS Virus
tgtatctttctagagaagtacggta

SEQ ID NO: 207414 - DNA, 25 bp, SARS Virus
gtatctttctagggaagtacggtaa

SEQ ID NO: 207415 - DNA, 25 bp, SARS Virus
tatctttctagagaagtacggtaat

SEQ ID NO: 207416 - DNA, 25 bp, SARS Virus
atctttctagaggagtacggtaatt

SEQ ID NO: 207417 - DNA, 25 bp, SARS Virus
tctttctagagaggtacggtaattg

SEQ ID NO: 207418 - DNA, 25 bp, SARS Virus
ctttctagagaagtacggtaattgt

SEQ ID NO: 207419 - DNA, 25 bp, SARS Virus
tttctagagaaggacggtaattgtt

SEQ ID NO: 207420 - DNA, 25 bp, SARS Virus
ttctagagaagtgcggtaattgtta

SEQ ID NO: 207421 - DNA, 25 bp, SARS Virus
tctagagaagtagggtaattgttat

SEQ ID NO: 207422 - DNA, 25 bp, SARS Virus
ctagagaagtacggtaattgttatc

SEQ ID NO: 207423 - DNA, 25 bp, SARS Virus
tagagaagtacggtaattgttatca

SEQ ID NO: 207424 - DNA, 25 bp, SARS Virus
agagaagtacgggaattgttatcaa

SEQ ID NO: 207425 - DNA, 25 bp, SARS Virus
gagaagtacggtgattgttatcaac

SEQ ID NO: 207426 - DNA, 25 bp, SARS Virus
agaagtacggtagttgttatcaaca

SEQ ID NO: 207427 - DNA, 25 bp, SARS Virus
gaagtacggtaagtgttatcaacat

SEQ ID NO: 207428 - DNA, 25 bp, SARS Virus
aagtacggtaatggttatcaacatg

SEQ ID NO: 207429 - DNA, 25 bp, SARS Virus
agtacggtaattgttatcaacatgt

SEQ ID NO: 207430 - DNA, 25 bp, SARS Virus
gtacggtaattggtatcaacatgtg

SEQ ID NO: 207431 - DNA, 25 bp, SARS Virus
tacggtaattgtgatcaacatgtga

SEQ ID NO: 207432 - DNA, 25 bp, SARS Virus
acggtaattgttgtcaacatgtgag

SEQ ID NO: 207433 - DNA, 25 bp, SARS Virus
agtttgtagaattgcctttgaagtc

SEQ ID NO: 207434 - DNA, 25 bp, SARS Virus
gtttgtagaatttcctttgaagtca

SEQ ID NO: 207435 - DNA, 25 bp, SARS Virus
tttgtagaattgtctttgaagtcat

SEQ ID NO: 207436 - DNA, 25 bp, SARS Virus
ttgtagaattgcttttgaagtcatg

SEQ ID NO: 207437 - DNA, 25 bp, SARS Virus
tgtagaattgcctttgaagtcatga

SEQ ID NO: 207438 - DNA, 25 bp, SARS Virus
gtagaattgcctttgaagtcatgat

SEQ ID NO: 207439 - DNA, 25 bp, SARS Virus
tagaattgcctttgaagtcatgata

SEQ ID NO: 207440 - DNA, 25 bp, SARS Virus
agaattgccttttaagtcatgatag

SEQ ID NO: 207441 - DNA, 25 bp, SARS Virus
gaattgcctttgtagtcatgataga

SEQ ID NO: 207442 - DNA, 25 bp, SARS Virus
aattgcctttgatgtcatgatagag

SEQ ID NO: 207443 - DNA, 25 bp, SARS Virus
attgcctttgaattcatgatagagg

SEQ ID NO: 207444 - DNA, 25 bp, SARS Virus
ttgcctttgaagtcatgatagaggt

SEQ ID NO: 207445 - DNA, 25 bp, SARS Virus
tgcctttgaagttatgatagaggtt

SEQ ID NO: 207446 - DNA, 25 bp, SARS Virus
gcctttgaagtcttgatagaggttg

SEQ ID NO: 207447 - DNA, 25 bp, SARS Virus
cctttgaagtcatgatagaggttgc

SEQ ID NO: 207448 - DNA, 25 bp, SARS Virus
ctttgaagtcattatagaggttgca

SEQ ID NO: 207449 - DNA, 25 bp, SARS Virus
tttgaagtcatgttagaggttgcag

SEQ ID NO: 207450 - DNA, 25 bp, SARS Virus
ttgaagtcatgatagaggttgcaga

SEQ ID NO: 207451 - DNA, 25 bp, SARS Virus
tgaagtcatgattgaggttgcagac

SEQ ID NO: 207452 - DNA, 25 bp, SARS Virus
gaagtcatgatataggttgcagact

SEQ ID NO: 207453 - DNA, 25 bp, SARS Virus
aagtcatgatagtggttgcagacta

SEQ ID NO: 207454 - DNA, 25 bp, SARS Virus
agtcatgatagatgttgcagactat

SEQ ID NO: 207455 - DNA, 25 bp, SARS Virus
gtcatgatagagtttgcagactatg

SEQ ID NO: 207456 - DNA, 25 bp, SARS Virus
tcatgatagaggttgcagactatgt

SEQ ID NO: 207457 - DNA, 25 bp, SARS Virus
catgatagaggttgcagactatgtt

SEQ ID NO: 207458 - DNA, 25 bp, SARS Virus
atgatagaggtttcagactatgttc

SEQ ID NO: 207459 - DNA, 25 bp, SARS Virus
tgatagaggttgtagactatgttct

SEQ ID NO: 207460 - DNA, 25 bp, SARS Virus
gatagaggttgctgactatgttctc

SEQ ID NO: 207461 - DNA, 25 bp, SARS Virus
atagaggttgcatactatgttctcg

SEQ ID NO: 207462 - DNA, 25 bp, SARS Virus
tagaggttgcagtctatgttctcga

SEQ ID NO: 207463 - DNA, 25 bp, SARS Virus
agaggttgcagattatgttctcgaa

SEQ ID NO: 207464 - DNA, 25 bp, SARS Virus
gaggttgcagactatgttctcgaac

SEQ ID NO: 207465 - DNA, 25 bp, SARS Virus
aggttgcagactttgttctcgaacc

SEQ ID NO: 207466 - DNA, 25 bp, SARS Virus
ggttgcagactatgttctcgaacca

SEQ ID NO: 207467 - DNA, 25 bp, SARS Virus
gttgcagactattttctcgaaccag

SEQ ID NO: 207468 - DNA, 25 bp, SARS Virus
ttgcagactatgttctcgaaccagt

SEQ ID NO: 207469 - DNA, 25 bp, SARS Virus
tgcagactatgttctcgaaccagtt

SEQ ID NO: 207470 - DNA, 25 bp, SARS Virus
gcagactatgttttcgaaccagttc

SEQ ID NO: 207471 - DNA, 25 bp, SARS Virus
cagactatgttctcgaaccagttcg

SEQ ID NO: 207472 - DNA, 25 bp, SARS Virus
agactatgttcttgaaccagttcgt

SEQ ID NO: 207473 - DNA, 25 bp, SARS Virus
gactatgttctctaaccagttcgtt

SEQ ID NO: 207474 - DNA, 25 bp, SARS Virus
actatgttctcgtaccagttcgttg

SEQ ID NO: 207475 - DNA, 25 bp, SARS Virus
ctatgttctcgatccagttcgttgt

SEQ ID NO: 207476 - DNA, 25 bp, SARS Virus
tatgttctcgaatcagttcgttgtc

SEQ ID NO: 207477 - DNA, 25 bp, SARS Virus
atgttctcgaactagttcgttgtct

SEQ ID NO: 207478 - DNA, 25 bp, SARS Virus
tgttctcgaacctgttcgttgtctt

SEQ ID NO: 207479 - DNA, 25 bp, SARS Virus
gttctcgaaccatttcgttgtctta

SEQ ID NO: 207480 - DNA, 25 bp, SARS Virus
ttctcgaaccagttcgttgtcttat

SEQ ID NO: 207481 - DNA, 25 bp, SARS Virus
tctcgaaccagttcgttgtcttatc

SEQ ID NO: 207482 - DNA, 25 bp, SARS Virus
ctcgaaccagtttgttgtcttatcc

SEQ ID NO: 207483 - DNA, 25 bp, SARS Virus
tcgaaccagttctttgtcttatcca

SEQ ID NO: 207484 - DNA, 25 bp, SARS Virus
cgaaccagttcgttgtcttatccaa

SEQ ID NO: 207485 - DNA, 25 bp, SARS Virus
gaaccagttcgttgtcttatccaac

SEQ ID NO: 207486 - DNA, 25 bp, SARS Virus
aaccagttcgttttcttatccaacc

SEQ ID NO: 207487 - DNA, 25 bp, SARS Virus
accagttcgttgtcttatccaaccg

SEQ ID NO: 207488 - DNA, 25 bp, SARS Virus
ccagttcgttgttttatccaaccgt

SEQ ID NO: 207489 - DNA, 25 bp, SARS Virus
cagttcgttgtcttatccaaccgtg

SEQ ID NO: 207490 - DNA, 25 bp, SARS Virus
agttcgttgtcttatccaaccgtgt

SEQ ID NO: 207491 - DNA, 25 bp, SARS Virus
gttcgttgtcttttccaaccgtgta

SEQ ID NO: 207492 - DNA, 25 bp, SARS Virus
ttcgttgtcttatccaaccgtgtag

SEQ ID NO: 207493 - DNA, 25 bp, SARS Virus
tcgttgtcttattcaaccgtgtagt

SEQ ID NO: 207494 - DNA, 25 bp, SARS Virus
cgttgtcttatctaaccgtgtagtc

SEQ ID NO: 207495 - DNA, 25 bp, SARS Virus
gttgtcttatcctaccgtgtagtcg

SEQ ID NO: 207496 - DNA, 25 bp, SARS Virus
ttgtcttatccatccgtgtagtcga

SEQ ID NO: 207497 - DNA, 25 bp, SARS Virus
tgtcttatccaatcgtgtagtcgac

SEQ ID NO: 207498 - DNA, 25 bp, SARS Virus
gtcttatccaactgtgtagtcgact

SEQ ID NO: 207499 - DNA, 25 bp, SARS Virus
tcttatccaaccttgtagtcgactg

SEQ ID NO: 207500 - DNA, 25 bp, SARS Virus
cttatccaaccgtgtagtcgactga

SEQ ID NO: 207501 - DNA, 25 bp, SARS Virus
ttatccaaccgtttagtcgactgac

SEQ ID NO: 207502 - DNA, 25 bp, SARS Virus
tatccaaccgtgtagtcgactgaca

SEQ ID NO: 207503 - DNA, 25 bp, SARS Virus
atccaaccgtgttgtcgactgacat

SEQ ID NO: 207504 - DNA, 25 bp, SARS Virus
tccaaccgtgtattcgactgacatc

SEQ ID NO: 207505 - DNA, 25 bp, SARS Virus
ccaaccgtgtagtcgactgacatca

SEQ ID NO: 207506 - DNA, 25 bp, SARS Virus
caaccgtgtagttgactgacatcat

SEQ ID NO: 207507 - DNA, 25 bp, SARS Virus
aaccgtgtagtctactgacatcatg

SEQ ID NO: 207508 - DNA, 25 bp, SARS Virus
accgtgtagtcgtctgacatcatgt

SEQ ID NO: 207509 - DNA, 25 bp, SARS Virus
ccgtgtagtcgattgacatcatgtg

SEQ ID NO: 207510 - DNA, 25 bp, SARS Virus
cgtgtagtcgactgacatcatgtgt

SEQ ID NO: 207511 - DNA, 25 bp, SARS Virus
gtgtagtcgacttacatcatgtgtc

SEQ ID NO: 207512 - DNA, 25 bp, SARS Virus
tgtagtcgactgtcatcatgtgtct

SEQ ID NO: 207513 - DNA, 25 bp, SARS Virus
gtagtcgactgatatcatgtgtctt

SEQ ID NO: 207514 - DNA, 25 bp, SARS Virus
tagtcgactgacttcatgtgtcttc

SEQ ID NO: 207515 - DNA, 25 bp, SARS Virus
agtcgactgacatcatgtgtcttcg

SEQ ID NO: 207516 - DNA, 25 bp, SARS Virus
gtcgactgacattatgtgtcttcgt

SEQ ID NO: 207517 - DNA, 25 bp, SARS Virus
tcgactgacatcttgtgtcttcgtc

SEQ ID NO: 207518 - DNA, 25 bp, SARS Virus
cgactgacatcatgtgtcttcgtct

SEQ ID NO: 207519 - DNA, 25 bp, SARS Virus
gactgacatcatttgtcttcgtctg

SEQ ID NO: 207520 - DNA, 25 bp, SARS Virus
actgacatcatgtgtcttcgtctga

SEQ ID NO: 207521 - DNA, 25 bp, SARS Virus
ctgacatcatgtttcttcgtctgaa

SEQ ID NO: 207522 - DNA, 25 bp, SARS Virus
tgacatcatgtgtcttcgtctgaat

SEQ ID NO: 207523 - DNA, 25 bp, SARS Virus
gacatcatgtgttttcgtctgaatc

SEQ ID NO: 207524 - DNA, 25 bp, SARS Virus
acatcatgtgtcttcgtctgaatct

SEQ ID NO: 207525 - DNA, 25 bp, SARS Virus
catcatgtgtcttcgtctgaatctt

SEQ ID NO: 207526 - DNA, 25 bp, SARS Virus
atcatgtgtctttgtctgaatcttc

SEQ ID NO: 207527 - DNA, 25 bp, SARS Virus
tcatgtgtcttcttctgaatcttcg

SEQ ID NO: 207528 - DNA, 25 bp, SARS Virus
catgtgtcttcgtctgaatcttcgt

SEQ ID NO: 207529 - DNA, 25 bp, SARS Virus
atgtgtcttcgtttgaatcttcgtc

SEQ ID NO: 207530 - DNA, 25 bp, SARS Virus
tgtgtcttcgtctgaatcttcgtct

SEQ ID NO: 207531 - DNA, 25 bp, SARS Virus
gtgtcttcgtcttaatcttcgtctg

SEQ ID NO: 207532 - DNA, 25 bp, SARS Virus
tgtcttcgtctgtatcttcgtctga

SEQ ID NO: 207533 - DNA, 25 bp, SARS Virus
gtcttcgtctgattcttcgtctgag

SEQ ID NO: 207534 - DNA, 25 bp, SARS Virus
tcttcgtctgaatcttcgtctgagc

SEQ ID NO: 207535 - DNA, 25 bp, SARS Virus
cttcgtctgaattttcgtctgagca

SEQ ID NO: 207536 - DNA, 25 bp, SARS Virus
ttcgtctgaatcttcgtctgagcag

SEQ ID NO: 207537 - DNA, 25 bp, SARS Virus
tcgtctgaatcttcgtctgagcagc

SEQ ID NO: 207538 - DNA, 25 bp, SARS Virus
cgtctgaatctttgtctgagcagcg

SEQ ID NO: 207539 - DNA, 25 bp, SARS Virus
gtctgaatcttcttctgagcagcgt

SEQ ID NO: 207540 - DNA, 25 bp, SARS Virus
tctgaatcttcgtctgagcagcgta

SEQ ID NO: 207541 - DNA, 25 bp, SARS Virus
ctgaatcttcgtttgagcagcgtaa

SEQ ID NO: 207542 - DNA, 25 bp, SARS Virus
tgaatcttcgtctgagcagcgtaaa

SEQ ID NO: 207543 - DNA, 25 bp, SARS Virus
gaatcttcgtcttagcagcgtaaac

SEQ ID NO: 207544 - DNA, 25 bp, SARS Virus
aatcttcgtctgtgcagcgtaaacc

SEQ ID NO: 207545 - DNA, 25 bp, SARS Virus
atcttcgtctgatcagcgtaaacct

SEQ ID NO: 207546 - DNA, 25 bp, SARS Virus
tcttcgtctgagtagcgtaaacctg

SEQ ID NO: 207547 - DNA, 25 bp, SARS Virus
cttcgtctgagctgcgtaaacctga

SEQ ID NO: 207548 - DNA, 25 bp, SARS Virus
ttcgtctgagcatcgtaaacctgaa

SEQ ID NO: 207549 - DNA, 25 bp, SARS Virus
tcgtctgagcagtgtaaacctgaac

SEQ ID NO: 207550 - DNA, 25 bp, SARS Virus
cgtctgagcagcttaaacctgaacg

SEQ ID NO: 207551 - DNA, 25 bp, SARS Virus
gtctgagcagcgtaaacctgaacgg

SEQ ID NO: 207552 - DNA, 25 bp, SARS Virus
tctgagcagcgttaacctgaacggt

SEQ ID NO: 207553 - DNA, 25 bp, SARS Virus
ctgagcagcgtatacctgaacggta

SEQ ID NO: 207554 - DNA, 25 bp, SARS Virus
tgagcagcgtaatcctgaacggtag

SEQ ID NO: 207555 - DNA, 25 bp, SARS Virus
gagcagcgtaaatctgaacggtagt

SEQ ID NO: 207556 - DNA, 25 bp, SARS Virus
agcagcgtaaacttgaacggtagtt

SEQ ID NO: 207557 - DNA, 25 bp, SARS Virus
gcagcgtaaacctgaacggtagttt

SEQ ID NO: 207558 - DNA, 25 bp, SARS Virus
cagcgtaaaccttaacggtagtttt

SEQ ID NO: 207559 - DNA, 25 bp, SARS Virus
agcgtaaacctgtacggtagttttt

SEQ ID NO: 207560 - DNA, 25 bp, SARS Virus
gcgtaaacctgatcggtagtttttg

SEQ ID NO: 207561 - DNA, 25 bp, SARS Virus
cgtaaacctgaatggtagtttttga

SEQ ID NO: 207562 - DNA, 25 bp, SARS Virus
gtaaacctgaactgtagtttttgat

SEQ ID NO: 207563 - DNA, 25 bp, SARS Virus
taaacctgaacgttagtttttgata

SEQ ID NO: 207564 - DNA, 25 bp, SARS Virus
aaacctgaacggtagtttttgatac

SEQ ID NO: 207565 - DNA, 25 bp, SARS Virus
aacctgaacggttgtttttgatact

SEQ ID NO: 207566 - DNA, 25 bp, SARS Virus
acctgaacggtattttttgatactg

SEQ ID NO: 207567 - DNA, 25 bp, SARS Virus
cctgaacggtagtttttgatactgt

SEQ ID NO: 207568 - DNA, 25 bp, SARS Virus
ctgaacggtagtttttgatactgta

SEQ ID NO: 207569 - DNA, 25 bp, SARS Virus
tgaacggtagtttttgatactgtaa

SEQ ID NO: 207570 - DNA, 25 bp, SARS Virus
gaacggtagtttttgatactgtaat

SEQ ID NO: 207571 - DNA, 25 bp, SARS Virus
aacggtagtttttgatactgtaatt

SEQ ID NO: 207572 - DNA, 25 bp, SARS Virus
acggtagttttttatactgtaatta

SEQ ID NO: 207573 - DNA, 25 bp, SARS Virus
cggtagtttttgttactgtaattat

SEQ ID NO: 207574 - DNA, 25 bp, SARS Virus
ggtagtttttgatactgtaattatc

SEQ ID NO: 207575 - DNA, 25 bp, SARS Virus
gtagtttttgattctgtaattatcc

SEQ ID NO: 207576 - DNA, 25 bp, SARS Virus
tagtttttgatattgtaattatccg

SEQ ID NO: 207577 - DNA, 25 bp, SARS Virus
agtttttgatactgtaattatccgt

SEQ ID NO: 207578 - DNA, 25 bp, SARS Virus
gtttttgatactttaattatccgtc

SEQ ID NO: 207579 - DNA, 25 bp, SARS Virus
tttttgatactgtaattatccgtca

SEQ ID NO: 207580 - DNA, 25 bp, SARS Virus
ttttgatactgttattatccgtcac

SEQ ID NO: 207581 - DNA, 25 bp, SARS Virus
tttgatactgtatttatccgtcact

SEQ ID NO: 207582 - DNA, 25 bp, SARS Virus
ttgatactgtaattatccgtcactt

SEQ ID NO: 207583 - DNA, 25 bp, SARS Virus
tgatactgtaattatccgtcacttg

SEQ ID NO: 207584 - DNA, 25 bp, SARS Virus
gatactgtaattttccgtcacttgg

SEQ ID NO: 207585 - DNA, 25 bp, SARS Virus
atactgtaattatccgtcacttgga

SEQ ID NO: 207586 - DNA, 25 bp, SARS Virus
tactgtaattattcgtcacttggaa

SEQ ID NO: 207587 - DNA, 25 bp, SARS Virus
actgtaattatctgtcacttggaaa

SEQ ID NO: 207588 - DNA, 25 bp, SARS Virus
ctgtaattatccttcacttggaaat

SEQ ID NO: 207589 - DNA, 25 bp, SARS Virus
tgtaattatccgtcacttggaaatc

SEQ ID NO: 207590 - DNA, 25 bp, SARS Virus
gtaattatccgttacttggaaatca

SEQ ID NO: 207591 - DNA, 25 bp, SARS Virus
taattatccgtctcttggaaatcac

SEQ ID NO: 207592 - DNA, 25 bp, SARS Virus
aattatccgtcatttggaaatcaca

SEQ ID NO: 207593 - DNA, 25 bp, SARS Virus
attatccgtcacttggaaatcacaa

SEQ ID NO: 207594 - DNA, 25 bp, SARS Virus
ttatccgtcacttggaaatcacaac

SEQ ID NO: 207595 - DNA, 25 bp, SARS Virus
tatccgtcactttgaaatcacaaca

SEQ ID NO: 207596 - DNA, 25 bp, SARS Virus
atccgtcacttgtaaatcacaacaa

SEQ ID NO: 207597 - DNA, 25 bp, SARS Virus
tccgtcacttggtaatcacaacaat

SEQ ID NO: 207598 - DNA, 25 bp, SARS Virus
ccgtcacttggatatcacaacaatc

SEQ ID NO: 207599 - DNA, 25 bp, SARS Virus
cgtcacttggaattcacaacaatcg

SEQ ID NO: 207600 - DNA, 25 bp, SARS Virus
gtcacttggaaatcacaacaatcga

SEQ ID NO: 207601 - DNA, 25 bp, SARS Virus
tcacttggaaattacaacaatcgag

SEQ ID NO: 207602 - DNA, 25 bp, SARS Virus
cacttggaaatctcaacaatcgaga

SEQ ID NO: 207603 - DNA, 25 bp, SARS Virus
acttggaaatcataacaatcgagag

SEQ ID NO: 207604 - DNA, 25 bp, SARS Virus
cttggaaatcactacaatcgagagt

SEQ ID NO: 207605 - DNA, 25 bp, SARS Virus
ttggaaatcacatcaatcgagagtt

SEQ ID NO: 207606 - DNA, 25 bp, SARS Virus
tggaaatcacaataatcgagagttt

SEQ ID NO: 207607 - DNA, 25 bp, SARS Virus
ggaaatcacaactatcgagagttta

SEQ ID NO: 207608 - DNA, 25 bp, SARS Virus
gaaatcacaacattcgagagtttaa

SEQ ID NO: 207609 - DNA, 25 bp, SARS Virus
aaatcacaacaatcgagagtttaac

SEQ ID NO: 207610 - DNA, 25 bp, SARS Virus
aatcacaacaattgagagtttaaca

SEQ ID NO: 207611 - DNA, 25 bp, SARS Virus
atcacaacaatctagagtttaacag

SEQ ID NO: 207612 - DNA, 25 bp, SARS Virus
tcacaacaatcgtgagtttaacaga

SEQ ID NO: 207613 - DNA, 25 bp, SARS Virus
cacaacaatcgatagtttaacagat

SEQ ID NO: 207614 - DNA, 25 bp, SARS Virus
acaacaatcgagtgtttaacagatt

SEQ ID NO: 207615 - DNA, 25 bp, SARS Virus
caacaatcgagattttaacagattt

SEQ ID NO: 207616 - DNA, 25 bp, SARS Virus
aacaatcgagagtttaacagattta

SEQ ID NO: 207617 - DNA, 25 bp, SARS Virus
acaatcgagagtttaacagatttaa

SEQ ID NO: 207618 - DNA, 25 bp, SARS Virus
caatcgagagtttaacagatttaac

SEQ ID NO: 207619 - DNA, 25 bp, SARS Virus
aatcgagagttttacagatttaact

SEQ ID NO: 207620 - DNA, 25 bp, SARS Virus
atcgagagtttatcagatttaactg

SEQ ID NO: 207621 - DNA, 25 bp, SARS Virus
tcgagagtttaatagatttaactgt

SEQ ID NO: 207622 - DNA, 25 bp, SARS Virus
cgagagtttaactgatttaactgtt

SEQ ID NO: 207623 - DNA, 25 bp, SARS Virus
gagagtttaacatatttaactgttt

SEQ ID NO: 207624 - DNA, 25 bp, SARS Virus
agagtttaacagttttaactgtttt

SEQ ID NO: 207625 - DNA, 25 bp, SARS Virus
gagtttaacagatttaactgtttta

SEQ ID NO: 207626 - DNA, 25 bp, SARS Virus
agtttaacagatttaactgttttac

SEQ ID NO: 207627 - DNA, 25 bp, SARS Virus
gtttaacagatttaactgttttacc

SEQ ID NO: 207628 - DNA, 25 bp, SARS Virus
tttaacagattttactgttttaccc

SEQ ID NO: 207629 - DNA, 25 bp, SARS Virus
ttaacagatttatctgttttaccct

SEQ ID NO: 207630 - DNA, 25 bp, SARS Virus
taacagatttaattgttttaccctc

SEQ ID NO: 207631 - DNA, 25 bp, SARS Virus
aacagatttaactgttttaccctct

SEQ ID NO: 207632 - DNA, 25 bp, SARS Virus
acagatttaacttttttaccctctc

SEQ ID NO: 207633 - DNA, 25 bp, SARS Virus
cagatttaactgttttaccctctcg

SEQ ID NO: 207634 - DNA, 25 bp, SARS Virus
agatttaactgttttaccctctcgc

SEQ ID NO: 207635 - DNA, 25 bp, SARS Virus
gatttaactgttttaccctctcgcc

SEQ ID NO: 207636 - DNA, 25 bp, SARS Virus
atttaactgttttaccctctcgcct

SEQ ID NO: 207637 - DNA, 25 bp, SARS Virus
tttaactgtttttccctctcgccta

SEQ ID NO: 207638 - DNA, 25 bp, SARS Virus
ttaactgttttatcctctcgcctac

SEQ ID NO: 207639 - DNA, 25 bp, SARS Virus
taactgttttactctctcgcctaca

SEQ ID NO: 207640 - DNA, 25 bp, SARS Virus
aactgttttaccttctcgcctacag

SEQ ID NO: 207641 - DNA, 25 bp, SARS Virus
actgttttaccctctcgcctacaga

SEQ ID NO: 207642 - DNA, 25 bp, SARS Virus
ctgttttaccctttcgcctacagag

SEQ ID NO: 207643 - DNA, 25 bp, SARS Virus
tgttttaccctctcgcctacagaga

SEQ ID NO: 207644 - DNA, 25 bp, SARS Virus
gttttaccctcttgcctacagagag

SEQ ID NO: 207645 - DNA, 25 bp, SARS Virus
ttttaccctctctcctacagagagt

SEQ ID NO: 207646 - DNA, 25 bp, SARS Virus
tttaccctctcgtctacagagagta

SEQ ID NO: 207647 - DNA, 25 bp, SARS Virus
ttaccctctcgcttacagagagtat

SEQ ID NO: 207648 - DNA, 25 bp, SARS Virus
taccctctcgcctacagagagtatc

SEQ ID NO: 207649 - DNA, 25 bp, SARS Virus
accctctcgccttcagagagtatcc

SEQ ID NO: 207650 - DNA, 25 bp, SARS Virus
ccctctcgcctatagagagtatcca

SEQ ID NO: 207651 - DNA, 25 bp, SARS Virus
cctctcgcctactgagagtatccag

SEQ ID NO: 207652 - DNA, 25 bp, SARS Virus
ctctcgcctacatagagtatccaga

SEQ ID NO: 207653 - DNA, 25 bp, SARS Virus
tctcgcctacagtgagtatccagaa

SEQ ID NO: 207654 - DNA, 25 bp, SARS Virus
ctcgcctacagatagtatccagaaa

SEQ ID NO: 207655 - DNA, 25 bp, SARS Virus
tcgcctacagagtgtatccagaaaa

SEQ ID NO: 207656 - DNA, 25 bp, SARS Virus
cgcctacagagattatccagaaaac

SEQ ID NO: 207657 - DNA, 25 bp, SARS Virus
gcctacagagagtatccagaaaact

SEQ ID NO: 207658 - DNA, 25 bp, SARS Virus
cctacagagagtttccagaaaactg

SEQ ID NO: 207659 - DNA, 25 bp, SARS Virus
ctacagagagtatccagaaaactgg

SEQ ID NO: 207660 - DNA, 25 bp, SARS Virus
tacagagagtattcagaaaactggt

SEQ ID NO: 207661 - DNA, 25 bp, SARS Virus
acagagagtatctagaaaactggtc

SEQ ID NO: 207662 - DNA, 25 bp, SARS Virus
cagagagtatcctgaaaactggtcg

SEQ ID NO: 207663 - DNA, 25 bp, SARS Virus
agagagtatccataaaactggtcgg

SEQ ID NO: 207664 - DNA, 25 bp, SARS Virus
gagagtatccagtaaactggtcgga

SEQ ID NO: 207665 - DNA, 25 bp, SARS Virus
agagtatccagataactggtcggaa

SEQ ID NO: 207666 - DNA, 25 bp, SARS Virus
gagtatccagaatactggtcggaac

SEQ ID NO: 207667 - DNA, 25 bp, SARS Virus
agtatccagaaatctggtcggaaca

SEQ ID NO: 207668 - DNA, 25 bp, SARS Virus
gtatccagaaaattggtcggaacag

SEQ ID NO: 207669 - DNA, 25 bp, SARS Virus
tatccagaaaactggtcggaacagt

SEQ ID NO: 207670 - DNA, 25 bp, SARS Virus
atccagaaaacttgtcggaacagtt

SEQ ID NO: 207671 - DNA, 25 bp, SARS Virus
tccagaaaactgttcggaacagttt

SEQ ID NO: 207672 - DNA, 25 bp, SARS Virus
ccagaaaactggtcggaacagtttc

SEQ ID NO: 207673 - DNA, 25 bp, SARS Virus
cagaaaactggttggaacagtttca

SEQ ID NO: 207674 - DNA, 25 bp, SARS Virus
agaaaactggtctgaacagtttcat

SEQ ID NO: 207675 - DNA, 25 bp, SARS Virus
gaaaactggtcgtaacagtttcatc

SEQ ID NO: 207676 - DNA, 25 bp, SARS Virus
aaaactggtcggtacagtttcatct

SEQ ID NO: 207677 - DNA, 25 bp, SARS Virus
aaactggtcggatcagtttcatctc

SEQ ID NO: 207678 - DNA, 25 bp, SARS Virus
aactggtcggaatagtttcatctcc

SEQ ID NO: 207679 - DNA, 25 bp, SARS Virus
actggtcggaactgtttcatctcca

SEQ ID NO: 207680 - DNA, 25 bp, SARS Virus
ctggtcggaacattttcatctccac

SEQ ID NO: 207681 - DNA, 25 bp, SARS Virus
tggtcggaacagtttcatctccact

SEQ ID NO: 207682 - DNA, 25 bp, SARS Virus
ggtcggaacagtttcatctccactt

SEQ ID NO: 207683 - DNA, 25 bp, SARS Virus
gtcggaacagtttcatctccacttc

SEQ ID NO: 207684 - DNA, 25 bp, SARS Virus
tcggaacagttttatctccacttcg

SEQ ID NO: 207685 - DNA, 25 bp, SARS Virus
cggaacagtttcttctccacttcgc

SEQ ID NO: 207686 - DNA, 25 bp, SARS Virus
ggaacagtttcatctccacttcgcg

SEQ ID NO: 207687 - DNA, 25 bp, SARS Virus
gaacagtttcatttccacttcgcgc

SEQ ID NO: 207688 - DNA, 25 bp, SARS Virus
aacagtttcatctccacttcgcgcg

SEQ ID NO: 207689 - DNA, 25 bp, SARS Virus
acagtttcatcttcacttcgcgcgg

SEQ ID NO: 207690 - DNA, 25 bp, SARS Virus
cagtttcatctctacttcgcgcggt

SEQ ID NO: 207691 - DNA, 25 bp, SARS Virus
agtttcatctcctcttcgcgcggta

SEQ ID NO: 207692 - DNA, 25 bp, SARS Virus
gtttcatctccatttcgcgcggtaa

SEQ ID NO: 207693 - DNA, 25 bp, SARS Virus
tttcatctccacttcgcgcggtaaa

SEQ ID NO: 207694 - DNA, 25 bp, SARS Virus
ttcatctccacttcgcgcggtaaaa

SEQ ID NO: 207695 - DNA, 25 bp, SARS Virus
tcatctccactttgcgcggtaaaaa

SEQ ID NO: 207696 - DNA, 25 bp, SARS Virus
catctccacttctcgcggtaaaaag

SEQ ID NO: 207697 - DNA, 25 bp, SARS Virus
atctccacttcgtgcggtaaaaagt

SEQ ID NO: 207698 - DNA, 25 bp, SARS Virus
tctccacttcgctcggtaaaaagtg

SEQ ID NO: 207699 - DNA, 25 bp, SARS Virus
ctccacttcgcgtggtaaaaagtgt

SEQ ID NO: 207700 - DNA, 25 bp, SARS Virus
tccacttcgcgctgtaaaaagtgtc

SEQ ID NO: 207701 - DNA, 25 bp, SARS Virus
ccacttcgcgcgttaaaaagtgtcg

SEQ ID NO: 207702 - DNA, 25 bp, SARS Virus
cacttcgcgcggtaaaaagtgtcgt

SEQ ID NO: 207703 - DNA, 25 bp, SARS Virus
acttcgcgcggttaaaagtgtcgtt

SEQ ID NO: 207704 - DNA, 25 bp, SARS Virus
cttcgcgcggtataaagtgtcgttg

SEQ ID NO: 207705 - DNA, 25 bp, SARS Virus
ttcgcgcggtaataagtgtcgttgt

SEQ ID NO: 207706 - DNA, 25 bp, SARS Virus
tcgcgcggtaaatagtgtcgttgtg

SEQ ID NO: 207707 - DNA, 25 bp, SARS Virus
cgcgcggtaaaatgtgtcgttgtga

SEQ ID NO: 207708 - DNA, 25 bp, SARS Virus
gcgcggtaaaaattgtcgttgtgat

SEQ ID NO: 207709 - DNA, 25 bp, SARS Virus
cgcggtaaaaagtgtcgttgtgata

SEQ ID NO: 207710 - DNA, 25 bp, SARS Virus
gcggtaaaaagtttcgttgtgatag

SEQ ID NO: 207711 - DNA, 25 bp, SARS Virus
cggtaaaaagtgtcgttgtgatagt

SEQ ID NO: 207712 - DNA, 25 bp, SARS Virus
ggtaaaaagtgttgttgtgatagtt

SEQ ID NO: 207713 - DNA, 25 bp, SARS Virus
gtaaaaagtgtctttgtgatagttg

SEQ ID NO: 207714 - DNA, 25 bp, SARS Virus
taaaaagtgtcgttgtgatagttgt

SEQ ID NO: 207715 - DNA, 25 bp, SARS Virus
aaaaagtgtcgttgtgatagttgtt

SEQ ID NO: 207716 - DNA, 25 bp, SARS Virus
aaaagtgtcgttttgatagttgtta

SEQ ID NO: 207717 - DNA, 25 bp, SARS Virus
aaagtgtcgttgtgatagttgttat

SEQ ID NO: 207718 - DNA, 25 bp, SARS Virus
aagtgtcgttgttatagttgttata

SEQ ID NO: 207719 - DNA, 25 bp, SARS Virus
agtgtcgttgtgttagttgttatat

SEQ ID NO: 207720 - DNA, 25 bp, SARS Virus
gtgtcgttgtgatagttgttatatg

SEQ ID NO: 207721 - DNA, 25 bp, SARS Virus
tgtcgttgtgattgttgttatatgc

SEQ ID NO: 207722 - DNA, 25 bp, SARS Virus
gtcgttgtgatatttgttatatgct

SEQ ID NO: 207723 - DNA, 25 bp, SARS Virus
tcgttgtgatagttgttatatgcta

SEQ ID NO: 207724 - DNA, 25 bp, SARS Virus
cgttgtgatagttgttatatgctac

SEQ ID NO: 207725 - DNA, 25 bp, SARS Virus
gttgtgatagtttttatatgctact

SEQ ID NO: 207726 - DNA, 25 bp, SARS Virus
ttgtgatagttgttatatgctactg

SEQ ID NO: 207727 - DNA, 25 bp, SARS Virus
tgtgatagttgttatatgctactga

SEQ ID NO: 207728 - DNA, 25 bp, SARS Virus
gtgatagttgttttatgctactgac

SEQ ID NO: 207729 - DNA, 25 bp, SARS Virus
tgatagttgttatatgctactgacc

SEQ ID NO: 207730 - DNA, 25 bp, SARS Virus
gatagttgttatttgctactgacca

SEQ ID NO: 207731 - DNA, 25 bp, SARS Virus
atagttgttatatgctactgaccag

SEQ ID NO: 207732 - DNA, 25 bp, SARS Virus
tagttgttatattctactgaccagt

SEQ ID NO: 207733 - DNA, 25 bp, SARS Virus
agttgttatatgttactgaccagtc

SEQ ID NO: 207734 - DNA, 25 bp, SARS Virus
gttgttatatgctactgaccagtca

SEQ ID NO: 207735 - DNA, 25 bp, SARS Virus
ttgttatatgcttctgaccagtcat

SEQ ID NO: 207736 - DNA, 25 bp, SARS Virus
tgttatatgctattgaccagtcatc

SEQ ID NO: 207737 - DNA, 25 bp, SARS Virus
gttatatgctactgaccagtcatcc

SEQ ID NO: 207738 - DNA, 25 bp, SARS Virus
ttatatgctacttaccagtcatccc

SEQ ID NO: 207739 - DNA, 25 bp, SARS Virus
tatatgctactgtccagtcatccca

SEQ ID NO: 207740 - DNA, 25 bp, SARS Virus
atatgctactgatcagtcatcccaa

SEQ ID NO: 207741 - DNA, 25 bp, SARS Virus
tatgctactgactagtcatcccaac

SEQ ID NO: 207742 - DNA, 25 bp, SARS Virus
atgctactgacctgtcatcccaact

SEQ ID NO: 207743 - DNA, 25 bp, SARS Virus
tgctactgaccattcatcccaacta

SEQ ID NO: 207744 - DNA, 25 bp, SARS Virus
gctactgaccagtcatcccaactaa

SEQ ID NO: 207745 - DNA, 25 bp, SARS Virus
ctactgaccagttatcccaactaac

SEQ ID NO: 207746 - DNA, 25 bp, SARS Virus
tactgaccagtcttcccaactaacc

SEQ ID NO: 207747 - DNA, 25 bp, SARS Virus
actgaccagtcatcccaactaacca

SEQ ID NO: 207748 - DNA, 25 bp, SARS Virus
ctgaccagtcattccaactaaccag

SEQ ID NO: 207749 - DNA, 25 bp, SARS Virus
tgaccagtcatctcaactaaccaga

SEQ ID NO: 207750 - DNA, 25 bp, SARS Virus
gaccagtcatcctaactaaccagaa

SEQ ID NO: 207751 - DNA, 25 bp, SARS Virus
accagtcatccctactaaccagaaa

SEQ ID NO: 207752 - DNA, 25 bp, SARS Virus
ccagtcatcccatctaaccagaaaa

SEQ ID NO: 207753 - DNA, 25 bp, SARS Virus
cagtcatcccaattaaccagaaaat

SEQ ID NO: 207754 - DNA, 25 bp, SARS Virus
agtcatcccaactaaccagaaaatt

SEQ ID NO: 207755 - DNA, 25 bp, SARS Virus
gtcatcccaacttaccagaaaattt

SEQ ID NO: 207756 - DNA, 25 bp, SARS Virus
tcatcccaactatccagaaaatttg

SEQ ID NO: 207757 - DNA, 25 bp, SARS Virus
catcccaactaatcagaaaatttga

SEQ ID NO: 207758 - DNA, 25 bp, SARS Virus
atcccaactaactagaaaatttgac

SEQ ID NO: 207759 - DNA, 25 bp, SARS Virus
tcccaactaacctgaaaatttgacc

SEQ ID NO: 207760 - DNA, 25 bp, SARS Virus
cccaactaaccataaaatttgacct

SEQ ID NO: 207761 - DNA, 25 bp, SARS Virus
ccaactaaccagtaaatttgacctc

SEQ ID NO: 207762 - DNA, 25 bp, SARS Virus
caactaaccagataatttgacctca

SEQ ID NO: 207763 - DNA, 25 bp, SARS Virus
aactaaccagaatatttgacctcac

SEQ ID NO: 207764 - DNA, 25 bp, SARS Virus
actaaccagaaattttgacctcact

SEQ ID NO: 207765 - DNA, 25 bp, SARS Virus
ctaaccagaaaatttgacctcactg

SEQ ID NO: 207766 - DNA, 25 bp, SARS Virus
taaccagaaaatttgacctcactgt

SEQ ID NO: 207767 - DNA, 25 bp, SARS Virus
aaccagaaaatttgacctcactgtt

SEQ ID NO: 207768 - DNA, 25 bp, SARS Virus
accagaaaattttacctcactgttt

SEQ ID NO: 207769 - DNA, 25 bp, SARS Virus
ccagaaaatttgtcctcactgttta

SEQ ID NO: 207770 - DNA, 25 bp, SARS Virus
cagaaaatttgatctcactgtttag

SEQ ID NO: 207771 - DNA, 25 bp, SARS Virus
agaaaatttgacttcactgtttagt

SEQ ID NO: 207772 - DNA, 25 bp, SARS Virus
gaaaatttgacctcactgtttagtg

SEQ ID NO: 207773 - DNA, 25 bp, SARS Virus
aaaatttgaccttactgtttagtgc

SEQ ID NO: 207774 - DNA, 25 bp, SARS Virus
aaatttgacctctctgtttagtgct

SEQ ID NO: 207775 - DNA, 25 bp, SARS Virus
aatttgacctcattgtttagtgctc

SEQ ID NO: 207776 - DNA, 25 bp, SARS Virus
atttgacctcactgtttagtgctcg

SEQ ID NO: 207777 - DNA, 25 bp, SARS Virus
tttgacctcactttttagtgctcgt

SEQ ID NO: 207778 - DNA, 25 bp, SARS Virus
ttgacctcactgtttagtgctcgtt

SEQ ID NO: 207779 - DNA, 25 bp, SARS Virus
tgacctcactgtttagtgctcgttg

SEQ ID NO: 207780 - DNA, 25 bp, SARS Virus
gacctcactgtttagtgctcgttga

SEQ ID NO: 207781 - DNA, 25 bp, SARS Virus
acctcactgttttgtgctcgttgaa

SEQ ID NO: 207782 - DNA, 25 bp, SARS Virus
cctcactgtttattgctcgttgaag

SEQ ID NO: 207783 - DNA, 25 bp, SARS Virus
ctcactgtttagtgctcgttgaagt

SEQ ID NO: 207784 - DNA, 25 bp, SARS Virus
tcactgtttagttctcgttgaagta

SEQ ID NO: 207785 - DNA, 25 bp, SARS Virus
cactgtttagtgttcgttgaagtag

SEQ ID NO: 207786 - DNA, 25 bp, SARS Virus
actgtttagtgctcgttgaagtagt

SEQ ID NO: 207787 - DNA, 25 bp, SARS Virus
ctgtttagtgcttgttgaagtagtg

SEQ ID NO: 207788 - DNA, 25 bp, SARS Virus
tgtttagtgctctttgaagtagtga

SEQ ID NO: 207789 - DNA, 25 bp, SARS Virus
gtttagtgctcgttgaagtagtgat

SEQ ID NO: 207790 - DNA, 25 bp, SARS Virus
tttagtgctcgttgaagtagtgatt

SEQ ID NO: 207791 - DNA, 25 bp, SARS Virus
ttagtgctcgtttaagtagtgatta

SEQ ID NO: 207792 - DNA, 25 bp, SARS Virus
tagtgctcgttgtagtagtgattac

SEQ ID NO: 207793 - DNA, 25 bp, SARS Virus
agtgctcgttgatgtagtgattact

SEQ ID NO: 207794 - DNA, 25 bp, SARS Virus
gtgctcgttgaattagtgattactt

SEQ ID NO: 207795 - DNA, 25 bp, SARS Virus
tgctcgttgaagtagtgattactta

SEQ ID NO: 207796 - DNA, 25 bp, SARS Virus
gctcgttgaagttgtgattacttac

SEQ ID NO: 207797 - DNA, 25 bp, SARS Virus
ctcgttgaagtattgattacttaca

SEQ ID NO: 207798 - DNA, 25 bp, SARS Virus
tcgttgaagtagtgattacttacat

SEQ ID NO: 207799 - DNA, 25 bp, SARS Virus
cgttgaagtagttattacttacatg

SEQ ID NO: 207800 - DNA, 25 bp, SARS Virus
gttgaagtagtgtttacttacatga

SEQ ID NO: 207801 - DNA, 25 bp, SARS Virus
ttgaagtagtgattacttacatgat

SEQ ID NO: 207802 - DNA, 25 bp, SARS Virus
tgaagtagtgattacttacatgatg

SEQ ID NO: 207803 - DNA, 25 bp, SARS Virus
gaagtagtgatttcttacatgatgg

SEQ ID NO: 207804 - DNA, 25 bp, SARS Virus
aagtagtgattatttacatgatggt

SEQ ID NO: 207805 - DNA, 25 bp, SARS Virus
agtagtgattacttacatgatggtc

SEQ ID NO: 207806 - DNA, 25 bp, SARS Virus
gtagtgattacttacatgatggtca

SEQ ID NO: 207807 - DNA, 25 bp, SARS Virus
tagtgattactttcatgatggtcac

SEQ ID NO: 207808 - DNA, 25 bp, SARS Virus
agtgattacttatatgatggtcacg

SEQ ID NO: 207809 - DNA, 25 bp, SARS Virus
gtgattacttacttgatggtcacgt

SEQ ID NO: 207810 - DNA, 25 bp, SARS Virus
tgattacttacatgatggtcacgtt

SEQ ID NO: 207811 - DNA, 25 bp, SARS Virus
gattacttacattatggtcacgttt

SEQ ID NO: 207812 - DNA, 25 bp, SARS Virus
attacttacatgttggtcacgtttt

SEQ ID NO: 207813 - DNA, 25 bp, SARS Virus
ttacttacatgatggtcacgtttta

SEQ ID NO: 207814 - DNA, 25 bp, SARS Virus
tacttacatgattgtcacgttttac

SEQ ID NO: 207815 - DNA, 25 bp, SARS Virus
acttacatgatgttcacgttttaca

SEQ ID NO: 207816 - DNA, 25 bp, SARS Virus
cttacatgatggtcacgttttacac

SEQ ID NO: 207817 - DNA, 25 bp, SARS Virus
ttacatgatggttacgttttacaca

SEQ ID NO: 207818 - DNA, 25 bp, SARS Virus
tacatgatggtctcgttttacacag

SEQ ID NO: 207819 - DNA, 25 bp, SARS Virus
acatgatggtcatgttttacacagt

SEQ ID NO: 207820 - DNA, 25 bp, SARS Virus
catgatggtcactttttacacagtg

SEQ ID NO: 207821 - DNA, 25 bp, SARS Virus
atgatggtcacgttttacacagtgt

SEQ ID NO: 207822 - DNA, 25 bp, SARS Virus
tgatggtcacgttttacacagtgtt

SEQ ID NO: 207823 - DNA, 25 bp, SARS Virus
gatggtcacgttttacacagtgtta

SEQ ID NO: 207824 - DNA, 25 bp, SARS Virus
atggtcacgttttacacagtgttaa

SEQ ID NO: 207825 - DNA, 25 bp, SARS Virus
tggtcacgtttttcacagtgttaac

SEQ ID NO: 207826 - DNA, 25 bp, SARS Virus
ggtcacgttttatacagtgttaact

SEQ ID NO: 207827 - DNA, 25 bp, SARS Virus
gtcacgttttactcagtgttaactc

SEQ ID NO: 207828 - DNA, 25 bp, SARS Virus
tcacgttttacatagtgttaactct

SEQ ID NO: 207829 - DNA, 25 bp, SARS Virus
cacgttttacactgtgttaactctg

SEQ ID NO: 207830 - DNA, 25 bp, SARS Virus
acgttttacacattgttaactctgt

SEQ ID NO: 207831 - DNA, 25 bp, SARS Virus
cgttttacacagtgttaactctgtt

SEQ ID NO: 207832 - DNA, 25 bp, SARS Virus
gttttacacagttttaactctgtta

SEQ ID NO: 207833 - DNA, 25 bp, SARS Virus
ttttacacagtgttaactctgttaa

SEQ ID NO: 207834 - DNA, 25 bp, SARS Virus
tttacacagtgttaactctgttaag

SEQ ID NO: 207835 - DNA, 25 bp, SARS Virus
ttacacagtgtttactctgttaagg

SEQ ID NO: 207836 - DNA, 25 bp, SARS Virus
tacacagtgttatctctgttaaggt

SEQ ID NO: 207837 - DNA, 25 bp, SARS Virus
acacagtgttaattctgttaaggtt

SEQ ID NO: 207838 - DNA, 25 bp, SARS Virus
cacagtgttaactctgttaaggtta

SEQ ID NO: 207839 - DNA, 25 bp, SARS Virus
acagtgttaactttgttaaggttaa

SEQ ID NO: 207840 - DNA, 25 bp, SARS Virus
cagtgttaactctgttaaggttaac

SEQ ID NO: 207841 - DNA, 25 bp, SARS Virus
agtgttaactcttttaaggttaaca

SEQ ID NO: 207842 - DNA, 25 bp, SARS Virus
gtgttaactctgttaaggttaacac

SEQ ID NO: 207843 - DNA, 25 bp, SARS Virus
tgttaactctgttaaggttaacact

SEQ ID NO: 207844 - DNA, 25 bp, SARS Virus
gttaactctgtttaggttaacactc

SEQ ID NO: 207845 - DNA, 25 bp, SARS Virus
ttaactctgttatggttaacactca

SEQ ID NO: 207846 - DNA, 25 bp, SARS Virus
taactctgttaatgttaacactcag

SEQ ID NO: 207847 - DNA, 25 bp, SARS Virus
aactctgttaagtttaacactcaga

SEQ ID NO: 207848 - DNA, 25 bp, SARS Virus
actctgttaaggttaacactcagaa

SEQ ID NO: 207849 - DNA, 25 bp, SARS Virus
ctctgttaaggttaacactcagaac

SEQ ID NO: 207850 - DNA, 25 bp, SARS Virus
tctgttaaggtttacactcagaacg

SEQ ID NO: 207851 - DNA, 25 bp, SARS Virus
ctgttaaggttatcactcagaacgt

SEQ ID NO: 207852 - DNA, 25 bp, SARS Virus
tgttaaggttaatactcagaacgtc

SEQ ID NO: 207853 - DNA, 25 bp, SARS Virus
gttaaggttaactctcagaacgtct

SEQ ID NO: 207854 - DNA, 25 bp, SARS Virus
ttaaggttaacattcagaacgtctt

SEQ ID NO: 207855 - DNA, 25 bp, SARS Virus
taaggttaacactcagaacgtcttc

SEQ ID NO: 207856 - DNA, 25 bp, SARS Virus
aaggttaacacttagaacgtcttcg

SEQ ID NO: 207857 - DNA, 25 bp, SARS Virus
aggttaacactctgaacgtcttcgg

SEQ ID NO: 207858 - DNA, 25 bp, SARS Virus
ggttaacactcataacgtcttcggt

SEQ ID NO: 207859 - DNA, 25 bp, SARS Virus
gttaacactcagtacgtcttcggtg

SEQ ID NO: 207860 - DNA, 25 bp, SARS Virus
ttaacactcagatcgtcttcggtgc

SEQ ID NO: 207861 - DNA, 25 bp, SARS Virus
taacactcagaatgtcttcggtgcc

SEQ ID NO: 207862 - DNA, 25 bp, SARS Virus
aacactcagaacttcttcggtgccg

SEQ ID NO: 207863 - DNA, 25 bp, SARS Virus
acactcagaacgtcttcggtgccgg

SEQ ID NO: 207864 - DNA, 25 bp, SARS Virus
cactcagaacgttttcggtgccgga

SEQ ID NO: 207865 - DNA, 25 bp, SARS Virus
actcagaacgtcttcggtgccggag

SEQ ID NO: 207866 - DNA, 25 bp, SARS Virus
ctcagaacgtcttcggtgccggagg

SEQ ID NO: 207867 - DNA, 25 bp, SARS Virus
tcagaacgtctttggtgccggaggt

SEQ ID NO: 207868 - DNA, 25 bp, SARS Virus
cagaacgtcttctgtgccggaggta

SEQ ID NO: 207869 - DNA, 25 bp, SARS Virus
agaacgtcttcgttgccggaggtaa

SEQ ID NO: 207870 - DNA, 25 bp, SARS Virus
gaacgtcttcggtgccggaggtaaa

SEQ ID NO: 207871 - DNA, 25 bp, SARS Virus
aacgtcttcggttccggaggtaaac

SEQ ID NO: 207872 - DNA, 25 bp, SARS Virus
acgtcttcggtgtcggaggtaaacg

SEQ ID NO: 207873 - DNA, 25 bp, SARS Virus
cgtcttcggtgctggaggtaaacgt

SEQ ID NO: 207874 - DNA, 25 bp, SARS Virus
gtcttcggtgcctgaggtaaacgta

SEQ ID NO: 207875 - DNA, 25 bp, SARS Virus
tcttcggtgccgtaggtaaacgtat

SEQ ID NO: 207876 - DNA, 25 bp, SARS Virus
cttcggtgccggtggtaaacgtatc

SEQ ID NO: 207877 - DNA, 25 bp, SARS Virus
ttcggtgccggatgtaaacgtatct

SEQ ID NO: 207878 - DNA, 25 bp, SARS Virus
tcggtgccggagttaaacgtatctg

SEQ ID NO: 207879 - DNA, 25 bp, SARS Virus
cggtgccggaggtaaacgtatctgt

SEQ ID NO: 207880 - DNA, 25 bp, SARS Virus
ggtgccggaggttaacgtatctgta

SEQ ID NO: 207881 - DNA, 25 bp, SARS Virus
gtgccggaggtatacgtatctgtat

SEQ ID NO: 207882 - DNA, 25 bp, SARS Virus
tgccggaggtaatcgtatctgtatc

SEQ ID NO: 207883 - DNA, 25 bp, SARS Virus
gccggaggtaaatgtatctgtatct

SEQ ID NO: 207884 - DNA, 25 bp, SARS Virus
ccggaggtaaacttatctgtatctt

SEQ ID NO: 207885 - DNA, 25 bp, SARS Virus
cggaggtaaacgtatctgtatcttt

SEQ ID NO: 207886 - DNA, 25 bp, SARS Virus
ggaggtaaacgtttctgtatctttc

SEQ ID NO: 207887 - DNA, 25 bp, SARS Virus
gaggtaaacgtatctgtatctttct

SEQ ID NO: 207888 - DNA, 25 bp, SARS Virus
aggtaaacgtatttgtatctttcta

SEQ ID NO: 207889 - DNA, 25 bp, SARS Virus
ggtaaacgtatctgtatctttctag

SEQ ID NO: 207890 - DNA, 25 bp, SARS Virus
gtaaacgtatctttatctttctaga

SEQ ID NO: 207891 - DNA, 25 bp, SARS Virus
taaacgtatctgtatctttctagag

SEQ ID NO: 207892 - DNA, 25 bp, SARS Virus
aaacgtatctgtttctttctagaga

SEQ ID NO: 207893 - DNA, 25 bp, SARS Virus
aacgtatctgtatctttctagagaa

SEQ ID NO: 207894 - DNA, 25 bp, SARS Virus
acgtatctgtatttttctagagaag

SEQ ID NO: 207895 - DNA, 25 bp, SARS Virus
cgtatctgtatctttctagagaagt

SEQ ID NO: 207896 - DNA, 25 bp, SARS Virus
gtatctgtatctttctagagaagta

SEQ ID NO: 207897 - DNA, 25 bp, SARS Virus
tatctgtatctttctagagaagtac

SEQ ID NO: 207898 - DNA, 25 bp, SARS Virus
atctgtatctttttagagaagtacg

SEQ ID NO: 207899 - DNA, 25 bp, SARS Virus
tctgtatctttctagagaagtacgg

SEQ ID NO: 207900 - DNA, 25 bp, SARS Virus
ctgtatctttcttgagaagtacggt

SEQ ID NO: 207901 - DNA, 25 bp, SARS Virus
tgtatctttctatagaagtacggta

SEQ ID NO: 207902 - DNA, 25 bp, SARS Virus
gtatctttctagtgaagtacggtaa

SEQ ID NO: 207903 - DNA, 25 bp, SARS Virus
tatctttctagataagtacggtaat

SEQ ID NO: 207904 - DNA, 25 bp, SARS Virus
atctttctagagtagtacggtaatt

SEQ ID NO: 207905 - DNA, 25 bp, SARS Virus
tctttctagagatgtacggtaattg

SEQ ID NO: 207906 - DNA, 25 bp, SARS Virus
ctttctagagaattacggtaattgt

SEQ ID NO: 207907 - DNA, 25 bp, SARS Virus
tttctagagaagtacggtaattgtt

SEQ ID NO: 207908 - DNA, 25 bp, SARS Virus
ttctagagaagttcggtaattgtta

SEQ ID NO: 207909 - DNA, 25 bp, SARS Virus
tctagagaagtatggtaattgttat

SEQ ID NO: 207910 - DNA, 25 bp, SARS Virus
ctagagaagtactgtaattgttatc

SEQ ID NO: 207911 - DNA, 25 bp, SARS Virus
tagagaagtacgttaattgttatca

SEQ ID NO: 207912 - DNA, 25 bp, SARS Virus
agagaagtacggtaattgttatcaa

SEQ ID NO: 207913 - DNA, 25 bp, SARS Virus
gagaagtacggttattgttatcaac

SEQ ID NO: 207914 - DNA, 25 bp, SARS Virus
agaagtacggtatttgttatcaaca

SEQ ID NO: 207915 - DNA, 25 bp, SARS Virus
gaagtacggtaattgttatcaacat

SEQ ID NO: 207916 - DNA, 25 bp, SARS Virus
aagtacggtaattgttatcaacatg

SEQ ID NO: 207917 - DNA, 25 bp, SARS Virus
agtacggtaatttttatcaacatgt

SEQ ID NO: 207918 - DNA, 25 bp, SARS Virus
gtacggtaattgttatcaacatgtg

SEQ ID NO: 207919 - DNA, 25 bp, SARS Virus
tacggtaattgttatcaacatgtga

SEQ ID NO: 207920 - DNA, 25 bp, SARS Virus
acggtaattgttttcaacatgtgag

SEQ ID NO: 207921 - DNA, 25 bp, SARS Virus
cggtaattgttaacaacatgtgagt

SEQ ID NO: 207922 - DNA, 25 bp, SARS Virus
ggtaattgttataaacatgtgagtt

SEQ ID NO: 207923 - DNA, 25 bp, SARS Virus
gtaattgttatcaacatgtgagttg

SEQ ID NO: 207924 - DNA, 25 bp, SARS Virus
taattgttatcaacatgtgagttgc

SEQ ID NO: 207925 - DNA, 25 bp, SARS Virus
aattgttatcaaaatgtgagttgcg

SEQ ID NO: 207926 - DNA, 25 bp, SARS Virus
attgttatcaacatgtgagttgcgc

SEQ ID NO: 207927 - DNA, 25 bp, SARS Virus
ttgttatcaacaagtgagttgcgca

SEQ ID NO: 207928 - DNA, 25 bp, SARS Virus
tgttatcaacatatgagttgcgcac

SEQ ID NO: 207929 - DNA, 25 bp, SARS Virus
gttatcaacatgagagttgcgcaca

SEQ ID NO: 207930 - DNA, 25 bp, SARS Virus
ttatcaacatgtaagttgcgcacac

SEQ ID NO: 207931 - DNA, 25 bp, SARS Virus
tatcaacatgtgagttgcgcacacc

SEQ ID NO: 207932 - DNA, 25 bp, SARS Virus
atcaacatgtgaattgcgcacaccg

SEQ ID NO: 207933 - DNA, 25 bp, SARS Virus
tcaacatgtgagatgcgcacaccgt

SEQ ID NO: 207934 - DNA, 25 bp, SARS Virus
caacatgtgagtagcgcacaccgtg

SEQ ID NO: 207935 - DNA, 25 bp, SARS Virus
aacatgtgagttacgcacaccgtgc

SEQ ID NO: 207936 - DNA, 25 bp, SARS Virus
acatgtgagttgagcacaccgtgct

SEQ ID NO: 207937 - DNA, 25 bp, SARS Virus
catgtgagttgcacacaccgtgcta

SEQ ID NO: 207938 - DNA, 25 bp, SARS Virus
atgtgagttgcgaacaccgtgctaa

SEQ ID NO: 207939 - DNA, 25 bp, SARS Virus
tgtgagttgcgcacaccgtgctaac

SEQ ID NO: 207940 - DNA, 25 bp, SARS Virus
gtgagttgcgcaaaccgtgctaacg

SEQ ID NO: 207941 - DNA, 25 bp, SARS Virus
tgagttgcgcacaccgtgctaacgc

SEQ ID NO: 207942 - DNA, 25 bp, SARS Virus
gagttgcgcacaacgtgctaacgcg

SEQ ID NO: 207943 - DNA, 25 bp, SARS Virus
agttgcgcacacagtgctaacgcga

SEQ ID NO: 207944 - DNA, 25 bp, SARS Virus
gttgcgcacaccatgctaacgcgaa

SEQ ID NO: 207945 - DNA, 25 bp, SARS Virus
ttgcgcacaccgagctaacgcgaat

SEQ ID NO: 207946 - DNA, 25 bp, SARS Virus
tgcgcacaccgtactaacgcgaata

SEQ ID NO: 207947 - DNA, 25 bp, SARS Virus
gcgcacaccgtgataacgcgaatat

SEQ ID NO: 207948 - DNA, 25 bp, SARS Virus
cgcacaccgtgcaaacgcgaatatc

SEQ ID NO: 207949 - DNA, 25 bp, SARS Virus
gcacaccgtgctaacgcgaatatcg

SEQ ID NO: 207950 - DNA, 25 bp, SARS Virus
cacaccgtgctaacgcgaatatcgt

SEQ ID NO: 207951 - DNA, 25 bp, SARS Virus
acaccgtgctaaagcgaatatcgtg

SEQ ID NO: 207952 - DNA, 25 bp, SARS Virus
caccgtgctaacacgaatatcgtgt

SEQ ID NO: 207953 - DNA, 25 bp, SARS Virus
accgtgctaacgagaatatcgtgta

SEQ ID NO: 207954 - DNA, 25 bp, SARS Virus
ccgtgctaacgcaaatatcgtgtag

SEQ ID NO: 207955 - DNA, 25 bp, SARS Virus
cgtgctaacgcgaatatcgtgtagt

SEQ ID NO: 207956 - DNA, 25 bp, SARS Virus
gtgctaacgcgaatatcgtgtagta

SEQ ID NO: 207957 - DNA, 25 bp, SARS Virus
tgctaacgcgaaaatcgtgtagtac

SEQ ID NO: 207958 - DNA, 25 bp, SARS Virus
gctaacgcgaatatcgtgtagtacg

SEQ ID NO: 207959 - DNA, 25 bp, SARS Virus
ctaacgcgaataacgtgtagtacgt

SEQ ID NO: 207960 - DNA, 25 bp, SARS Virus
taacgcgaatatagtgtagtacgtt

SEQ ID NO: 207961 - DNA, 25 bp, SARS Virus
aacgcgaatatcatgtagtacgttc

SEQ ID NO: 207962 - DNA, 25 bp, SARS Virus
acgcgaatatcgagtagtacgttca

SEQ ID NO: 207963 - DNA, 25 bp, SARS Virus
cgcgaatatcgtatagtacgttcag

SEQ ID NO: 207964 - DNA, 25 bp, SARS Virus
gcgaatatcgtgaagtacgttcagc

SEQ ID NO: 207965 - DNA, 25 bp, SARS Virus
cgaatatcgtgtagtacgttcagct

SEQ ID NO: 207966 - DNA, 25 bp, SARS Virus
gaatatcgtgtaatacgttcagctt

SEQ ID NO: 207967 - DNA, 25 bp, SARS Virus
aatatcgtgtagaacgttcagcttc

SEQ ID NO: 207968 - DNA, 25 bp, SARS Virus
atatcgtgtagtacgttcagcttct

SEQ ID NO: 207969 - DNA, 25 bp, SARS Virus
tatcgtgtagtaagttcagcttctc

SEQ ID NO: 207970 - DNA, 25 bp, SARS Virus
atcgtgtagtacattcagcttctcc

SEQ ID NO: 207971 - DNA, 25 bp, SARS Virus
tcgtgtagtacgatcagcttctcca

SEQ ID NO: 207972 - DNA, 25 bp, SARS Virus
cgtgtagtacgtacagcttctccac

SEQ ID NO: 207973 - DNA, 25 bp, SARS Virus
gtgtagtacgttaagcttctccacg

SEQ ID NO: 207974 - DNA, 25 bp, SARS Virus
tgtagtacgttcagcttctccacgt

SEQ ID NO: 207975 - DNA, 25 bp, SARS Virus
gtagtacgttcaacttctccacgtt

SEQ ID NO: 207976 - DNA, 25 bp, SARS Virus
tagtacgttcagattctccacgttg

SEQ ID NO: 207977 - DNA, 25 bp, SARS Virus
agtacgttcagcatctccacgttgg

SEQ ID NO: 207978 - DNA, 25 bp, SARS Virus
gtacgttcagctactccacgttggt

SEQ ID NO: 207979 - DNA, 25 bp, SARS Virus
tacgttcagcttatccacgttggta

SEQ ID NO: 207980 - DNA, 25 bp, SARS Virus
acgttcagcttcaccacgttggtag

SEQ ID NO: 207981 - DNA, 25 bp, SARS Virus
cgttcagcttctacacgttggtagg

SEQ ID NO: 207982 - DNA, 25 bp, SARS Virus
gttcagcttctcaacgttggtaggt

SEQ ID NO: 207983 - DNA, 25 bp, SARS Virus
ttcagcttctccacgttggtaggta

SEQ ID NO: 207984 - DNA, 25 bp, SARS Virus
tcagcttctccaagttggtaggtac

SEQ ID NO: 207985 - DNA, 25 bp, SARS Virus
cagcttctccacattggtaggtact

SEQ ID NO: 207986 - DNA, 25 bp, SARS Virus
agcttctccacgatggtaggtacta

SEQ ID NO: 207987 - DNA, 25 bp, SARS Virus
gcttctccacgtaggtaggtactat

SEQ ID NO: 207988 - DNA, 25 bp, SARS Virus
cttctccacgttagtaggtactata

SEQ ID NO: 207989 - DNA, 25 bp, SARS Virus
ttctccacgttgataggtactatac

SEQ ID NO: 207990 - DNA, 25 bp, SARS Virus
tctccacgttggaaggtactatact

SEQ ID NO: 207991 - DNA, 25 bp, SARS Virus
ctccacgttggtaggtactatactt

SEQ ID NO: 207992 - DNA, 25 bp, SARS Virus
tccacgttggtaagtactatacttg

SEQ ID NO: 207993 - DNA, 25 bp, SARS Virus
ccacgttggtagatactatacttgt

SEQ ID NO: 207994 - DNA, 25 bp, SARS Virus
cacgttggtaggaactatacttgta

SEQ ID NO: 207995 - DNA, 25 bp, SARS Virus
acgttggtaggtactatacttgtat

SEQ ID NO: 207996 - DNA, 25 bp, SARS Virus
cgttggtaggtaatatacttgtatc

SEQ ID NO: 207997 - DNA, 25 bp, SARS Virus
gttggtaggtacaatacttgtatcg

SEQ ID NO: 207998 - DNA, 25 bp, SARS Virus
ttggtaggtactatacttgtatcga

SEQ ID NO: 207999 - DNA, 25 bp, SARS Virus
tggtaggtactaaacttgtatcgag

SEQ ID NO: 208000 - DNA, 25 bp, SARS Virus
ggtaggtactatacttgtatcgaga

SEQ ID NO: 208001 - DNA, 25 bp, SARS Virus
gtaggtactataattgtatcgagaa

SEQ ID NO: 208002 - DNA, 25 bp, SARS Virus
taggtactatacatgtatcgagaag

SEQ ID NO: 208003 - DNA, 25 bp, SARS Virus
aggtactatactagtatcgagaagg

SEQ ID NO: 208004 - DNA, 25 bp, SARS Virus
ggtactatacttatatcgagaaggt

SEQ ID NO: 208005 - DNA, 25 bp, SARS Virus
gtactatacttgaatcgagaaggta

SEQ ID NO: 208006 - DNA, 25 bp, SARS Virus
tactatacttgtatcgagaaggtat

SEQ ID NO: 208007 - DNA, 25 bp, SARS Virus
actatacttgtaacgagaaggtata

SEQ ID NO: 208008 - DNA, 25 bp, SARS Virus
ctatacttgtatagagaaggtatac

SEQ ID NO: 208009 - DNA, 25 bp, SARS Virus
tatacttgtatcaagaaggtataca

SEQ ID NO: 208010 - DNA, 25 bp, SARS Virus
atacttgtatcgagaaggtatacat

SEQ ID NO: 208011 - DNA, 25 bp, SARS Virus
tacttgtatcgaaaaggtatacatc

SEQ ID NO: 208012 - DNA, 25 bp, SARS Virus
acttgtatcgagaaggtatacatca

SEQ ID NO: 208013 - DNA, 25 bp, SARS Virus
cttgtatcgagaaggtatacatcat

SEQ ID NO: 208014 - DNA, 25 bp, SARS Virus
ttgtatcgagaaagtatacatcatc

SEQ ID NO: 208015 - DNA, 25 bp, SARS Virus
tgtatcgagaagatatacatcatct

SEQ ID NO: 208016 - DNA, 25 bp, SARS Virus
gtatcgagaaggaatacatcatctt

SEQ ID NO: 208017 - DNA, 25 bp, SARS Virus
tatcgagaaggtatacatcatcttt

SEQ ID NO: 208018 - DNA, 25 bp, SARS Virus
atcgagaaggtaaacatcatctttc

SEQ ID NO: 208019 - DNA, 25 bp, SARS Virus
tcgagaaggtatacatcatctttct

SEQ ID NO: 208020 - DNA, 25 bp, SARS Virus
cgagaaggtataaatcatctttctt

SEQ ID NO: 208021 - DNA, 25 bp, SARS Virus
gagaaggtatacatcatctttcttc

SEQ ID NO: 208022 - DNA, 25 bp, SARS Virus
agaaggtatacaacatctttcttcg

SEQ ID NO: 208023 - DNA, 25 bp, SARS Virus
gaaggtatacataatctttcttcgt

SEQ ID NO: 208024 - DNA, 25 bp, SARS Virus
aaggtatacatcatctttcttcgtt

SEQ ID NO: 208025 - DNA, 25 bp, SARS Virus
aggtatacatcaactttcttcgttt

SEQ ID NO: 208026 - DNA, 25 bp, SARS Virus
ggtatacatcatatttcttcgtttc

SEQ ID NO: 208027 - DNA, 25 bp, SARS Virus
gtatacatcatcattcttcgtttct

SEQ ID NO: 208028 - DNA, 25 bp, SARS Virus
tatacatcatctatcttcgtttctt

SEQ ID NO: 208029 - DNA, 25 bp, SARS Virus
atacatcatcttacttcgtttcttc

SEQ ID NO: 208030 - DNA, 25 bp, SARS Virus
tacatcatctttattcgtttcttct

SEQ ID NO: 208031 - DNA, 25 bp, SARS Virus
acatcatctttcatcgtttcttcta

SEQ ID NO: 208032 - DNA, 25 bp, SARS Virus
catcatctttctacgtttcttctac

SEQ ID NO: 208033 - DNA, 25 bp, SARS Virus
atcatctttcttagtttcttctaca

SEQ ID NO: 208034 - DNA, 25 bp, SARS Virus
tcatctttcttcatttcttctacat

SEQ ID NO: 208035 - DNA, 25 bp, SARS Virus
catctttcttcgattcttctacatg

SEQ ID NO: 208036 - DNA, 25 bp, SARS Virus
atctttcttcgtatcttctacatgt

SEQ ID NO: 208037 - DNA, 25 bp, SARS Virus
tctttcttcgttacttctacatgta

SEQ ID NO: 208038 - DNA, 25 bp, SARS Virus
ctttcttcgtttattctacatgtag

SEQ ID NO: 208039 - DNA, 25 bp, SARS Virus
tttcttcgtttcatctacatgtagg

SEQ ID NO: 208040 - DNA, 25 bp, SARS Virus
ttcttcgtttctactacatgtagga

SEQ ID NO: 208041 - DNA, 25 bp, SARS Virus
tcttcgtttcttatacatgtaggat

SEQ ID NO: 208042 - DNA, 25 bp, SARS Virus
cttcgtttcttcaacatgtaggatt

SEQ ID NO: 208043 - DNA, 25 bp, SARS Virus
ttcgtttcttctacatgtaggattg

SEQ ID NO: 208044 - DNA, 25 bp, SARS Virus
tcgtttcttctaaatgtaggattgg

SEQ ID NO: 208045 - DNA, 25 bp, SARS Virus
cgtttcttctacatgtaggattggt

SEQ ID NO: 208046 - DNA, 25 bp, SARS Virus
gtttcttctacaagtaggattggta

SEQ ID NO: 208047 - DNA, 25 bp, SARS Virus
tttcttctacatataggattggtaa

SEQ ID NO: 208048 - DNA, 25 bp, SARS Virus
ttcttctacatgaaggattggtaac

SEQ ID NO: 208049 - DNA, 25 bp, SARS Virus
tcttctacatgtaggattggtaacg

SEQ ID NO: 208050 - DNA, 25 bp, SARS Virus
cttctacatgtaagattggtaacgt

SEQ ID NO: 208051 - DNA, 25 bp, SARS Virus
ttctacatgtagaattggtaacgtc

SEQ ID NO: 208052 - DNA, 25 bp, SARS Virus
tctacatgtaggattggtaacgtct

SEQ ID NO: 208053 - DNA, 25 bp, SARS Virus
ctacatgtaggaatggtaacgtctt

SEQ ID NO: 208054 - DNA, 25 bp, SARS Virus
tacatgtaggataggtaacgtcttt

SEQ ID NO: 208055 - DNA, 25 bp, SARS Virus
acatgtaggattagtaacgtctttg

SEQ ID NO: 208056 - DNA, 25 bp, SARS Virus
catgtaggattgataacgtctttgc

SEQ ID NO: 208057 - DNA, 25 bp, SARS Virus
atgtaggattggaaacgtctttgcc

SEQ ID NO: 208058 - DNA, 25 bp, SARS Virus
tgtaggattggtaacgtctttgccc

SEQ ID NO: 208059 - DNA, 25 bp, SARS Virus
gtaggattggtaacgtctttgccca

SEQ ID NO: 208060 - DNA, 25 bp, SARS Virus
taggattggtaaagtctttgcccac

SEQ ID NO: 208061 - DNA, 25 bp, SARS Virus
aggattggtaacatctttgcccacg

SEQ ID NO: 208062 - DNA, 25 bp, SARS Virus
ggattggtaacgactttgcccacgg

SEQ ID NO: 208063 - DNA, 25 bp, SARS Virus
gattggtaacgtatttgcccacggt

SEQ ID NO: 208064 - DNA, 25 bp, SARS Virus
attggtaacgtcattgcccacggta

SEQ ID NO: 208065 - DNA, 25 bp, SARS Virus
ttggtaacgtctatgcccacggtaa

SEQ ID NO: 208066 - DNA, 25 bp, SARS Virus
tggtaacgtcttagcccacggtaaa

SEQ ID NO: 208067 - DNA, 25 bp, SARS Virus
ggtaacgtctttacccacggtaaac

SEQ ID NO: 208068 - DNA, 25 bp, SARS Virus
gtaacgtctttgaccacggtaaaca

SEQ ID NO: 208069 - DNA, 25 bp, SARS Virus
taacgtctttgcacacggtaaacat

SEQ ID NO: 208070 - DNA, 25 bp, SARS Virus
aacgtctttgccaacggtaaacatg

SEQ ID NO: 208071 - DNA, 25 bp, SARS Virus
acgtctttgcccacggtaaacatgt

SEQ ID NO: 208072 - DNA, 25 bp, SARS Virus
cgtctttgcccaaggtaaacatgtt

SEQ ID NO: 208073 - DNA, 25 bp, SARS Virus
gtctttgcccacagtaaacatgtta

SEQ ID NO: 208074 - DNA, 25 bp, SARS Virus
tctttgcccacgataaacatgttat

SEQ ID NO: 208075 - DNA, 25 bp, SARS Virus
ctttgcccacggaaaacatgttatg

SEQ ID NO: 208076 - DNA, 25 bp, SARS Virus
tttgcccacggtaaacatgttatga

SEQ ID NO: 208077 - DNA, 25 bp, SARS Virus
ttgcccacggtaaacatgttatgat

SEQ ID NO: 208078 - DNA, 25 bp, SARS Virus
tgcccacggtaaacatgttatgatt

SEQ ID NO: 208079 - DNA, 25 bp, SARS Virus
gcccacggtaaaaatgttatgatta

SEQ ID NO: 208080 - DNA, 25 bp, SARS Virus
cccacggtaaacatgttatgattac

SEQ ID NO: 208081 - DNA, 25 bp, SARS Virus
ccacggtaaacaagttatgattact

SEQ ID NO: 208082 - DNA, 25 bp, SARS Virus
cacggtaaacatattatgattacta

SEQ ID NO: 208083 - DNA, 25 bp, SARS Virus
acggtaaacatgatatgattactat

SEQ ID NO: 208084 - DNA, 25 bp, SARS Virus
cggtaaacatgtaatgattactatt

SEQ ID NO: 208085 - DNA, 25 bp, SARS Virus
ggtaaacatgttatgattactattt

SEQ ID NO: 208086 - DNA, 25 bp, SARS Virus
gtaaacatgttaagattactatttg

SEQ ID NO: 208087 - DNA, 25 bp, SARS Virus
taaacatgttataattactatttgg

SEQ ID NO: 208088 - DNA, 25 bp, SARS Virus
aaacatgttatgattactatttggt

SEQ ID NO: 208089 - DNA, 25 bp, SARS Virus
aacatgttatgaatactatttggtg

SEQ ID NO: 208090 - DNA, 25 bp, SARS Virus
acatgttatgataactatttggtgt

SEQ ID NO: 208091 - DNA, 25 bp, SARS Virus
catgttatgattactatttggtgta

SEQ ID NO: 208092 - DNA, 25 bp, SARS Virus
atgttatgattaatatttggtgtac

SEQ ID NO: 208093 - DNA, 25 bp, SARS Virus
tgttatgattacaatttggtgtact

SEQ ID NO: 208094 - DNA, 25 bp, SARS Virus
gttatgattactatttggtgtactc

SEQ ID NO: 208095 - DNA, 25 bp, SARS Virus
ttatgattactaattggtgtactcg

SEQ ID NO: 208096 - DNA, 25 bp, SARS Virus
tatgattactatatggtgtactcgg

SEQ ID NO: 208097 - DNA, 25 bp, SARS Virus
atgattactattaggtgtactcggt

SEQ ID NO: 208098 - DNA, 25 bp, SARS Virus
tgattactatttagtgtactcggtt

SEQ ID NO: 208099 - DNA, 25 bp, SARS Virus
gattactatttgatgtactcggttc

SEQ ID NO: 208100 - DNA, 25 bp, SARS Virus
attactatttggagtactcggttct

SEQ ID NO: 208101 - DNA, 25 bp, SARS Virus
ttactatttggtatactcggttctt

SEQ ID NO: 208102 - DNA, 25 bp, SARS Virus
tactatttggtgaactcggttctta

SEQ ID NO: 208103 - DNA, 25 bp, SARS Virus
actatttggtgtactcggttcttaa

SEQ ID NO: 208104 - DNA, 25 bp, SARS Virus
ctatttggtgtaatcggttcttaac

SEQ ID NO: 208105 - DNA, 25 bp, SARS Virus
tatttggtgtacacggttcttaacg

SEQ ID NO: 208106 - DNA, 25 bp, SARS Virus
atttggtgtactaggttcttaacga

SEQ ID NO: 208107 - DNA, 25 bp, SARS Virus
tttggtgtactcagttcttaacgac

SEQ ID NO: 208108 - DNA, 25 bp, SARS Virus
ttggtgtactcgattcttaacgact

SEQ ID NO: 208109 - DNA, 25 bp, SARS Virus
tggtgtactcggatcttaacgacta

SEQ ID NO: 208110 - DNA, 25 bp, SARS Virus
ggtgtactcggtacttaacgactac

SEQ ID NO: 208111 - DNA, 25 bp, SARS Virus
gtgtactcggttattaacgactact

SEQ ID NO: 208112 - DNA, 25 bp, SARS Virus
tgtactcggttcataacgactactt

SEQ ID NO: 208113 - DNA, 25 bp, SARS Virus
gtactcggttctaaacgactacttt

SEQ ID NO: 208114 - DNA, 25 bp, SARS Virus
tactcggttcttaacgactacttta

SEQ ID NO: 208115 - DNA, 25 bp, SARS Virus
actcggttcttaacgactactttac

SEQ ID NO: 208116 - DNA, 25 bp, SARS Virus
ctcggttcttaaagactactttact

SEQ ID NO: 208117 - DNA, 25 bp, SARS Virus
tcggttcttaacaactactttactg

SEQ ID NO: 208118 - DNA, 25 bp, SARS Virus
cggttcttaacgactactttactga

SEQ ID NO: 208119 - DNA, 25 bp, SARS Virus
ggttcttaacgaatactttactgat

SEQ ID NO: 208120 - DNA, 25 bp, SARS Virus
gttcttaacgacaactttactgatc

SEQ ID NO: 208121 - DNA, 25 bp, SARS Virus
ttcttaacgactactttactgatcg

SEQ ID NO: 208122 - DNA, 25 bp, SARS Virus
tcttaacgactaatttactgatcgt

SEQ ID NO: 208123 - DNA, 25 bp, SARS Virus
cttaacgactacattactgatcgtt

SEQ ID NO: 208124 - DNA, 25 bp, SARS Virus
ttaacgactactatactgatcgttt

SEQ ID NO: 208125 - DNA, 25 bp, SARS Virus
taacgactacttaactgatcgtttt

SEQ ID NO: 208126 - DNA, 25 bp, SARS Virus
aacgactactttactgatcgtttta

SEQ ID NO: 208127 - DNA, 25 bp, SARS Virus
acgactactttaatgatcgttttat

SEQ ID NO: 208128 - DNA, 25 bp, SARS Virus
cgactactttacagatcgttttatc

SEQ ID NO: 208129 - DNA, 25 bp, SARS Virus
gactactttactaatcgttttatcg

SEQ ID NO: 208130 - DNA, 25 bp, SARS Virus
actactttactgatcgttttatcgg

SEQ ID NO: 208131 - DNA, 25 bp, SARS Virus
ctactttactgaacgttttatcggt

SEQ ID NO: 208132 - DNA, 25 bp, SARS Virus
tactttactgatagttttatcggtt

SEQ ID NO: 208133 - DNA, 25 bp, SARS Virus
actttactgatcattttatcggttt

SEQ ID NO: 208134 - DNA, 25 bp, SARS Virus
ctttactgatcgatttatcggtttc

SEQ ID NO: 208135 - DNA, 25 bp, SARS Virus
tttactgatcgtattatcggtttct

SEQ ID NO: 208136 - DNA, 25 bp, SARS Virus
ttactgatcgttatatcggtttctt

SEQ ID NO: 208137 - DNA, 25 bp, SARS Virus
tactgatcgtttaatcggtttcttg

SEQ ID NO: 208138 - DNA, 25 bp, SARS Virus
actgatcgttttatcggtttcttgt

SEQ ID NO: 208139 - DNA, 25 bp, SARS Virus
ctgatcgttttaacggtttcttgtg

SEQ ID NO: 208140 - DNA, 25 bp, SARS Virus
tgatcgttttataggtttcttgtgg

SEQ ID NO: 208141 - DNA, 25 bp, SARS Virus
gatcgttttatcagtttcttgtgga

SEQ ID NO: 208142 - DNA, 25 bp, SARS Virus
atcgttttatcgatttcttgtggac

SEQ ID NO: 208143 - DNA, 25 bp, SARS Virus
tcgttttatcggattcttgtggacg

SEQ ID NO: 208144 - DNA, 25 bp, SARS Virus
cgttttatcggtatcttgtggacgt

SEQ ID NO: 208145 - DNA, 25 bp, SARS Virus
gttttatcggttacttgtggacgta

SEQ ID NO: 208146 - DNA, 25 bp, SARS Virus
ttttatcggtttattgtggacgtaa

SEQ ID NO: 208147 - DNA, 25 bp, SARS Virus
tttatcggtttcatgtggacgtaat

SEQ ID NO: 208148 - DNA, 25 bp, SARS Virus
ttatcggtttctagtggacgtaata

SEQ ID NO: 208149 - DNA, 25 bp, SARS Virus
tatcggtttcttatggacgtaatat

SEQ ID NO: 208150 - DNA, 25 bp, SARS Virus
atcggtttcttgaggacgtaatatc

SEQ ID NO: 208151 - DNA, 25 bp, SARS Virus
tcggtttcttgtagacgtaatatcg

SEQ ID NO: 208152 - DNA, 25 bp, SARS Virus
cggtttcttgtgaacgtaatatcga

SEQ ID NO: 208153 - DNA, 25 bp, SARS Virus
ggtttcttgtggacgtaatatcgac

SEQ ID NO: 208154 - DNA, 25 bp, SARS Virus
gtttcttgtggaagtaatatcgact

SEQ ID NO: 208155 - DNA, 25 bp, SARS Virus
tttcttgtggacataatatcgactt

SEQ ID NO: 208156 - DNA, 25 bp, SARS Virus
ttcttgtggacgaaatatcgacttt

SEQ ID NO: 208157 - DNA, 25 bp, SARS Virus
tcttgtggacgtaatatcgactttc

SEQ ID NO: 208158 - DNA, 25 bp, SARS Virus
cttgtggacgtaatatcgactttct

SEQ ID NO: 208159 - DNA, 25 bp, SARS Virus
ttgtggacgtaaaatcgactttctg

SEQ ID NO: 208160 - DNA, 25 bp, SARS Virus
tgtggacgtaatatcgactttctgg

SEQ ID NO: 208161 - DNA, 25 bp, SARS Virus
gtggacgtaataacgactttctgga

SEQ ID NO: 208162 - DNA, 25 bp, SARS Virus
tggacgtaatatagactttctggat

SEQ ID NO: 208163 - DNA, 25 bp, SARS Virus
ggacgtaatatcaactttctggatt

SEQ ID NO: 208164 - DNA, 25 bp, SARS Virus
gacgtaatatcgactttctggatta

SEQ ID NO: 208165 - DNA, 25 bp, SARS Virus
acgtaatatcgaatttctggattat

SEQ ID NO: 208166 - DNA, 25 bp, SARS Virus
cgtaatatcgacattctggattatt

SEQ ID NO: 208167 - DNA, 25 bp, SARS Virus
gtaatatcgactatctggattattt

SEQ ID NO: 208168 - DNA, 25 bp, SARS Virus
taatatcgacttactggattattta

SEQ ID NO: 208169 - DNA, 25 bp, SARS Virus
aatatcgactttatggattatttat

SEQ ID NO: 208170 - DNA, 25 bp, SARS Virus
atatcgactttcaggattatttatt

SEQ ID NO: 208171 - DNA, 25 bp, SARS Virus
tatcgactttctagattatttattt

SEQ ID NO: 208172 - DNA, 25 bp, SARS Virus
atcgactttctgaattatttatttt

SEQ ID NO: 208173 - DNA, 25 bp, SARS Virus
tcgactttctggattatttattttc

SEQ ID NO: 208174 - DNA, 25 bp, SARS Virus
cgactttctggaatatttattttct

SEQ ID NO: 208175 - DNA, 25 bp, SARS Virus
gactttctggataatttattttctt

SEQ ID NO: 208176 - DNA, 25 bp, SARS Virus
actttctggattatttattttctta

SEQ ID NO: 208177 - DNA, 25 bp, SARS Virus
ctttctggattaattattttcttaa

SEQ ID NO: 208178 - DNA, 25 bp, SARS Virus
tttctggattatatattttcttaaa

SEQ ID NO: 208179 - DNA, 25 bp, SARS Virus
ttctggattattaattttcttaaaa

SEQ ID NO: 208180 - DNA, 25 bp, SARS Virus
tctggattatttattttcttaaaac

SEQ ID NO: 208181 - DNA, 25 bp, SARS Virus
ctggattatttaatttcttaaaaca

SEQ ID NO: 208182 - DNA, 25 bp, SARS Virus
tggattatttatattcttaaaacac

SEQ ID NO: 208183 - DNA, 25 bp, SARS Virus
ggattatttattatcttaaaacact

SEQ ID NO: 208184 - DNA, 25 bp, SARS Virus
gattatttatttacttaaaacactt

SEQ ID NO: 208185 - DNA, 25 bp, SARS Virus
attatttattttattaaaacacttg

SEQ ID NO: 208186 - DNA, 25 bp, SARS Virus
ttatttattttcataaaacacttgt

SEQ ID NO: 208187 - DNA, 25 bp, SARS Virus
tatttattttctaaaaacacttgtt

SEQ ID NO: 208188 - DNA, 25 bp, SARS Virus
atttattttcttaaaacacttgttg

SEQ ID NO: 208189 - DNA, 25 bp, SARS Virus
tttattttcttaaaacacttgttgt

SEQ ID NO: 208190 - DNA, 25 bp, SARS Virus
ttattttcttaaaacacttgttgta

SEQ ID NO: 208191 - DNA, 25 bp, SARS Virus
tattttcttaaaacacttgttgtat

SEQ ID NO: 208192 - DNA, 25 bp, SARS Virus
attttcttaaaaaacttgttgtata

SEQ ID NO: 208193 - DNA, 25 bp, SARS Virus
ttttcttaaaacacttgttgtatat

SEQ ID NO: 208194 - DNA, 25 bp, SARS Virus
tttcttaaaacaattgttgtatata

SEQ ID NO: 208195 - DNA, 25 bp, SARS Virus
ttcttaaaacacatgttgtatatac

SEQ ID NO: 208196 - DNA, 25 bp, SARS Virus
tcttaaaacactagttgtatatacg

SEQ ID NO: 208197 - DNA, 25 bp, SARS Virus
cttaaaacacttattgtatatacgg

SEQ ID NO: 208198 - DNA, 25 bp, SARS Virus
ttaaaacacttgatgtatatacggt

SEQ ID NO: 208199 - DNA, 25 bp, SARS Virus
taaaacacttgtagtatatacggtt

SEQ ID NO: 208200 - DNA, 25 bp, SARS Virus
aaaacacttgttatatatacggttt

SEQ ID NO: 208201 - DNA, 25 bp, SARS Virus
aaacacttgttgaatatacggtttt

SEQ ID NO: 208202 - DNA, 25 bp, SARS Virus
aacacttgttgtatatacggttttg

SEQ ID NO: 208203 - DNA, 25 bp, SARS Virus
acacttgttgtaaatacggttttgg

SEQ ID NO: 208204 - DNA, 25 bp, SARS Virus
cacttgttgtatatacggttttggg

SEQ ID NO: 208205 - DNA, 25 bp, SARS Virus
acttgttgtataaacggttttgggt

SEQ ID NO: 208206 - DNA, 25 bp, SARS Virus
cttgttgtatatacggttttgggtg

SEQ ID NO: 208207 - DNA, 25 bp, SARS Virus
ttgttgtatataaggttttgggtga

SEQ ID NO: 208208 - DNA, 25 bp, SARS Virus
tgttgtatatacagttttgggtgag

SEQ ID NO: 208209 - DNA, 25 bp, SARS Virus
gttgtatatacgattttgggtgagt

SEQ ID NO: 208210 - DNA, 25 bp, SARS Virus
ttgtatatacggatttgggtgagtc

SEQ ID NO: 208211 - DNA, 25 bp, SARS Virus
tgtatatacggtattgggtgagtcg

SEQ ID NO: 208212 - DNA, 25 bp, SARS Virus
gtatatacggttatgggtgagtcgc

SEQ ID NO: 208213 - DNA, 25 bp, SARS Virus
tatatacggtttagggtgagtcgcc

SEQ ID NO: 208214 - DNA, 25 bp, SARS Virus
atatacggttttaggtgagtcgccg

SEQ ID NO: 208215 - DNA, 25 bp, SARS Virus
tatacggttttgagtgagtcgccgg

SEQ ID NO: 208216 - DNA, 25 bp, SARS Virus
atacggttttggatgagtcgccggt

SEQ ID NO: 208217 - DNA, 25 bp, SARS Virus
tacggttttgggagagtcgccggtc

SEQ ID NO: 208218 - DNA, 25 bp, SARS Virus
acggttttgggtaagtcgccggtct

SEQ ID NO: 208219 - DNA, 25 bp, SARS Virus
cggttttgggtgagtcgccggtctg

SEQ ID NO: 208220 - DNA, 25 bp, SARS Virus
ggttttgggtgaatcgccggtctgg

SEQ ID NO: 208221 - DNA, 25 bp, SARS Virus
gttttgggtgagacgccggtctgga

SEQ ID NO: 208222 - DNA, 25 bp, SARS Virus
ttttgggtgagtagccggtctggat

SEQ ID NO: 208223 - DNA, 25 bp, SARS Virus
tttgggtgagtcaccggtctggatt

SEQ ID NO: 208224 - DNA, 25 bp, SARS Virus
ttgggtgagtcgacggtctggattt

SEQ ID NO: 208225 - DNA, 25 bp, SARS Virus
tgggtgagtcgcaggtctggatttt

SEQ ID NO: 208226 - DNA, 25 bp, SARS Virus
gggtgagtcgccagtctggatttta

SEQ ID NO: 208227 - DNA, 25 bp, SARS Virus
ggtgagtcgccgatctggattttaa

SEQ ID NO: 208228 - DNA, 25 bp, SARS Virus
gtgagtcgccggactggattttaac

SEQ ID NO: 208229 - DNA, 25 bp, SARS Virus
tgagtcgccggtatggattttaaca

SEQ ID NO: 208230 - DNA, 25 bp, SARS Virus
gagtcgccggtcaggattttaacag

SEQ ID NO: 208231 - DNA, 25 bp, SARS Virus
agtcgccggtctagattttaacagt

SEQ ID NO: 208232 - DNA, 25 bp, SARS Virus
gtcgccggtctgaattttaacagtt

SEQ ID NO: 208233 - DNA, 25 bp, SARS Virus
tcgccggtctggattttaacagttc

SEQ ID NO: 208234 - DNA, 25 bp, SARS Virus
cgccggtctggaatttaacagttca

SEQ ID NO: 208235 - DNA, 25 bp, SARS Virus
gccggtctggatattaacagttcag

SEQ ID NO: 208236 - DNA, 25 bp, SARS Virus
ccggtctggattataacagttcaga

SEQ ID NO: 208237 - DNA, 25 bp, SARS Virus
cggtctggatttaaacagttcagat

SEQ ID NO: 208238 - DNA, 25 bp, SARS Virus
ggtctggattttaacagttcagatc

SEQ ID NO: 208239 - DNA, 25 bp, SARS Virus
gtctggattttaacagttcagatcg

SEQ ID NO: 208240 - DNA, 25 bp, SARS Virus
tctggattttaaaagttcagatcga

SEQ ID NO: 208241 - DNA, 25 bp, SARS Virus
ctggattttaacagttcagatcgaa

SEQ ID NO: 208242 - DNA, 25 bp, SARS Virus
tggattttaacaattcagatcgaac

SEQ ID NO: 208243 - DNA, 25 bp, SARS Virus
ggattttaacagatcagatcgaaca

SEQ ID NO: 208244 - DNA, 25 bp, SARS Virus
gattttaacagtacagatcgaacat

SEQ ID NO: 208245 - DNA, 25 bp, SARS Virus
attttaacagttaagatcgaacatg

SEQ ID NO: 208246 - DNA, 25 bp, SARS Virus
ttttaacagttcagatcgaacatgc

SEQ ID NO: 208247 - DNA, 25 bp, SARS Virus
tttaacagttcaaatcgaacatgct

SEQ ID NO: 208248 - DNA, 25 bp, SARS Virus
ttaacagttcagatcgaacatgcta

SEQ ID NO: 208249 - DNA, 25 bp, SARS Virus
taacagttcagaacgaacatgctac

SEQ ID NO: 208250 - DNA, 25 bp, SARS Virus
aacagttcagatagaacatgctact

SEQ ID NO: 208251 - DNA, 25 bp, SARS Virus
acagttcagatcaaacatgctactt

SEQ ID NO: 208252 - DNA, 25 bp, SARS Virus
cagttcagatcgaacatgctacttt

SEQ ID NO: 208253 - DNA, 25 bp, SARS Virus
agttcagatcgaacatgctacttta

SEQ ID NO: 208254 - DNA, 25 bp, SARS Virus
gttcagatcgaaaatgctactttag

SEQ ID NO: 208255 - DNA, 25 bp, SARS Virus
ttcagatcgaacatgctactttagc

SEQ ID NO: 208256 - DNA, 25 bp, SARS Virus
tcagatcgaacaagctactttagca

SEQ ID NO: 208257 - DNA, 25 bp, SARS Virus
cagatcgaacatactactttagcag

SEQ ID NO: 208258 - DNA, 25 bp, SARS Virus
agatcgaacatgatactttagcagt

SEQ ID NO: 208259 - DNA, 25 bp, SARS Virus
gatcgaacatgcaactttagcagtg

SEQ ID NO: 208260 - DNA, 25 bp, SARS Virus
atcgaacatgctactttagcagtgg

SEQ ID NO: 208261 - DNA, 25 bp, SARS Virus
tcgaacatgctaatttagcagtgga

SEQ ID NO: 208262 - DNA, 25 bp, SARS Virus
cgaacatgctacattagcagtggac

SEQ ID NO: 208263 - DNA, 25 bp, SARS Virus
gaacatgctactatagcagtggact

SEQ ID NO: 208264 - DNA, 25 bp, SARS Virus
aacatgctacttaagcagtggactt

SEQ ID NO: 208265 - DNA, 25 bp, SARS Virus
acatgctactttagcagtggactta

SEQ ID NO: 208266 - DNA, 25 bp, SARS Virus
catgctactttaacagtggacttac

SEQ ID NO: 208267 - DNA, 25 bp, SARS Virus
atgctactttagaagtggacttacc

SEQ ID NO: 208268 - DNA, 25 bp, SARS Virus
tgctactttagcagtggacttacca

SEQ ID NO: 208269 - DNA, 25 bp, SARS Virus
gctactttagcaatggacttaccaa

SEQ ID NO: 208270 - DNA, 25 bp, SARS Virus
ctactttagcagaggacttaccaaa

SEQ ID NO: 208271 - DNA, 25 bp, SARS Virus
tactttagcagtagacttaccaaag

SEQ ID NO: 208272 - DNA, 25 bp, SARS Virus
actttagcagtgaacttaccaaagt

SEQ ID NO: 208273 - DNA, 25 bp, SARS Virus
ctttagcagtggacttaccaaagtt

SEQ ID NO: 208274 - DNA, 25 bp, SARS Virus
tttagcagtggaattaccaaagttc

SEQ ID NO: 208275 - DNA, 25 bp, SARS Virus
ttagcagtggacataccaaagttct

SEQ ID NO: 208276 - DNA, 25 bp, SARS Virus
tagcagtggactaaccaaagttctc

SEQ ID NO: 208277 - DNA, 25 bp, SARS Virus
agcagtggacttaccaaagttctcg

SEQ ID NO: 208278 - DNA, 25 bp, SARS Virus
gcagtggacttaacaaagttctcga

SEQ ID NO: 208279 - DNA, 25 bp, SARS Virus
cagtggacttacaaaagttctcgac

SEQ ID NO: 208280 - DNA, 25 bp, SARS Virus
agtggacttaccaaagttctcgacc

SEQ ID NO: 208281 - DNA, 25 bp, SARS Virus
gtggacttaccaaagttctcgacct

SEQ ID NO: 208282 - DNA, 25 bp, SARS Virus
tggacttaccaaagttctcgaccta

SEQ ID NO: 208283 - DNA, 25 bp, SARS Virus
ggacttaccaaaattctcgacctat

SEQ ID NO: 208284 - DNA, 25 bp, SARS Virus
gacttaccaaagatctcgacctatt

SEQ ID NO: 208285 - DNA, 25 bp, SARS Virus
acttaccaaagtactcgacctattc

SEQ ID NO: 208286 - DNA, 25 bp, SARS Virus
cttaccaaagttatcgacctattct

SEQ ID NO: 208287 - DNA, 25 bp, SARS Virus
ttaccaaagttcacgacctattctt

SEQ ID NO: 208288 - DNA, 25 bp, SARS Virus
taccaaagttctagacctattctta

SEQ ID NO: 208289 - DNA, 25 bp, SARS Virus
accaaagttctcaacctattcttag

SEQ ID NO: 208290 - DNA, 25 bp, SARS Virus
ccaaagttctcgacctattcttagt

SEQ ID NO: 208291 - DNA, 25 bp, SARS Virus
caaagttctcgaactattcttagtt

SEQ ID NO: 208292 - DNA, 25 bp, SARS Virus
aaagttctcgacatattcttagttc

SEQ ID NO: 208293 - DNA, 25 bp, SARS Virus
aagttctcgaccaattcttagttcc

SEQ ID NO: 208294 - DNA, 25 bp, SARS Virus
agttctcgacctattcttagttccc

SEQ ID NO: 208295 - DNA, 25 bp, SARS Virus
gttctcgacctaatcttagttccct

SEQ ID NO: 208296 - DNA, 25 bp, SARS Virus
ttctcgacctatacttagttccctc

SEQ ID NO: 208297 - DNA, 25 bp, SARS Virus
tctcgacctattattagttccctca

SEQ ID NO: 208298 - DNA, 25 bp, SARS Virus
ctcgacctattcatagttccctcag

SEQ ID NO: 208299 - DNA, 25 bp, SARS Virus
tcgacctattctaagttccctcaga

SEQ ID NO: 208300 - DNA, 25 bp, SARS Virus
cgacctattcttagttccctcagat

SEQ ID NO: 208301 - DNA, 25 bp, SARS Virus
gacctattcttaattccctcagatt

SEQ ID NO: 208302 - DNA, 25 bp, SARS Virus
acctattcttagatccctcagatta

SEQ ID NO: 208303 - DNA, 25 bp, SARS Virus
cctattcttagtaccctcagattag

SEQ ID NO: 208304 - DNA, 25 bp, SARS Virus
ctattcttagttacctcagattagg

SEQ ID NO: 208305 - DNA, 25 bp, SARS Virus
tattcttagttcactcagattaggt

SEQ ID NO: 208306 - DNA, 25 bp, SARS Virus
attcttagttccatcagattaggtg

SEQ ID NO: 208307 - DNA, 25 bp, SARS Virus
ttcttagttcccacagattaggtga

SEQ ID NO: 208308 - DNA, 25 bp, SARS Virus
tcttagttccctaagattaggtgaa

SEQ ID NO: 208309 - DNA, 25 bp, SARS Virus
cttagttccctcagattaggtgaat

SEQ ID NO: 208310 - DNA, 25 bp, SARS Virus
ttagttccctcaaattaggtgaatt

SEQ ID NO: 208311 - DNA, 25 bp, SARS Virus
tagttccctcagattaggtgaattt

SEQ ID NO: 208312 - DNA, 25 bp, SARS Virus
agttccctcagaataggtgaatttg

SEQ ID NO: 208313 - DNA, 25 bp, SARS Virus
gttccctcagataaggtgaatttgt

SEQ ID NO: 208314 - DNA, 25 bp, SARS Virus
ttccctcagattaggtgaatttgtt

SEQ ID NO: 208315 - DNA, 25 bp, SARS Virus
tccctcagattaagtgaatttgttt

SEQ ID NO: 208316 - DNA, 25 bp, SARS Virus
ccctcagattagatgaatttgttta

SEQ ID NO: 208317 - DNA, 25 bp, SARS Virus
cctcagattaggagaatttgtttac

SEQ ID NO: 208318 - DNA, 25 bp, SARS Virus
ctcagattaggtaaatttgtttacg

SEQ ID NO: 208319 - DNA, 25 bp, SARS Virus
tcagattaggtgaatttgtttacga

SEQ ID NO: 208320 - DNA, 25 bp, SARS Virus
cagattaggtgaatttgtttacgac

SEQ ID NO: 208321 - DNA, 25 bp, SARS Virus
agattaggtgaaattgtttacgacg

SEQ ID NO: 208322 - DNA, 25 bp, SARS Virus
gattaggtgaatatgtttacgacgt

SEQ ID NO: 208323 - DNA, 25 bp, SARS Virus
attaggtgaattagtttacgacgtt

SEQ ID NO: 208324 - DNA, 25 bp, SARS Virus
ttaggtgaatttatttacgacgttc

SEQ ID NO: 208325 - DNA, 25 bp, SARS Virus
taggtgaatttgattacgacgttcc

SEQ ID NO: 208326 - DNA, 25 bp, SARS Virus
aggtgaatttgtatacgacgttcct

SEQ ID NO: 208327 - DNA, 25 bp, SARS Virus
ggtgaatttgttaacgacgttcctt

SEQ ID NO: 208328 - DNA, 25 bp, SARS Virus
gtgaatttgtttacgacgttccttt

SEQ ID NO: 208329 - DNA, 25 bp, SARS Virus
tgaatttgtttaagacgttcctttt

SEQ ID NO: 208330 - DNA, 25 bp, SARS Virus
gaatttgtttacaacgttccttttc

SEQ ID NO: 208331 - DNA, 25 bp, SARS Virus
aatttgtttacgacgttccttttct

SEQ ID NO: 208332 - DNA, 25 bp, SARS Virus
atttgtttacgaagttccttttctt

SEQ ID NO: 208333 - DNA, 25 bp, SARS Virus
tttgtttacgacattccttttcttg

SEQ ID NO: 208334 - DNA, 25 bp, SARS Virus
ttgtttacgacgatccttttcttgg

SEQ ID NO: 208335 - DNA, 25 bp, SARS Virus
tgtttacgacgtaccttttcttgga

SEQ ID NO: 208336 - DNA, 25 bp, SARS Virus
gtttacgacgttacttttcttggaa

SEQ ID NO: 208337 - DNA, 25 bp, SARS Virus
tttacgacgttcattttcttggaag

SEQ ID NO: 208338 - DNA, 25 bp, SARS Virus
ttacgacgttccatttcttggaagt

SEQ ID NO: 208339 - DNA, 25 bp, SARS Virus
tacgacgttcctattcttggaagtg

SEQ ID NO: 208340 - DNA, 25 bp, SARS Virus
acgacgttccttatcttggaagtgt

SEQ ID NO: 208341 - DNA, 25 bp, SARS Virus
cgacgttcctttacttggaagtgtc

SEQ ID NO: 208342 - DNA, 25 bp, SARS Virus
gacgttccttttattggaagtgtct

SEQ ID NO: 208343 - DNA, 25 bp, SARS Virus
acgttccttttcatggaagtgtctt

SEQ ID NO: 208344 - DNA, 25 bp, SARS Virus
cgttccttttctaggaagtgtcttt

SEQ ID NO: 208345 - DNA, 25 bp, SARS Virus
gttccttttcttagaagtgtcttta

SEQ ID NO: 208346 - DNA, 25 bp, SARS Virus
ttccttttcttgaaagtgtctttag

SEQ ID NO: 208347 - DNA, 25 bp, SARS Virus
tccttttcttggaagtgtctttagg

SEQ ID NO: 208348 - DNA, 25 bp, SARS Virus
ccttttcttggaagtgtctttaggt

SEQ ID NO: 208349 - DNA, 25 bp, SARS Virus
cttttcttggaaatgtctttaggta

SEQ ID NO: 208350 - DNA, 25 bp, SARS Virus
ttttcttggaagagtctttaggtat

SEQ ID NO: 208351 - DNA, 25 bp, SARS Virus
tttcttggaagtatctttaggtatc

SEQ ID NO: 208352 - DNA, 25 bp, SARS Virus
ttcttggaagtgactttaggtatca

SEQ ID NO: 208353 - DNA, 25 bp, SARS Virus
tcttggaagtgtatttaggtatcat

SEQ ID NO: 208354 - DNA, 25 bp, SARS Virus
cttggaagtgtcattaggtatcatc

SEQ ID NO: 208355 - DNA, 25 bp, SARS Virus
ttggaagtgtctataggtatcatca

SEQ ID NO: 208356 - DNA, 25 bp, SARS Virus
tggaagtgtcttaaggtatcatcat

SEQ ID NO: 208357 - DNA, 25 bp, SARS Virus
ggaagtgtctttaggtatcatcatt

SEQ ID NO: 208358 - DNA, 25 bp, SARS Virus
gaagtgtctttaagtatcatcattg

SEQ ID NO: 208359 - DNA, 25 bp, SARS Virus
aagtgtctttagatatcatcattgc

SEQ ID NO: 208360 - DNA, 25 bp, SARS Virus
agtgtctttaggaatcatcattgca

SEQ ID NO: 208361 - DNA, 25 bp, SARS Virus
gtgtctttaggtatcatcattgcaa

SEQ ID NO: 208362 - DNA, 25 bp, SARS Virus
tgtctttaggtaacatcattgcaat

SEQ ID NO: 208363 - DNA, 25 bp, SARS Virus
gtctttaggtataatcattgcaatc

SEQ ID NO: 208364 - DNA, 25 bp, SARS Virus
tctttaggtatcatcattgcaatct

SEQ ID NO: 208365 - DNA, 25 bp, SARS Virus
ctttaggtatcaacattgcaatctg

SEQ ID NO: 208366 - DNA, 25 bp, SARS Virus
tttaggtatcataattgcaatctgc

SEQ ID NO: 208367 - DNA, 25 bp, SARS Virus
ttaggtatcatcattgcaatctgct

SEQ ID NO: 208368 - DNA, 25 bp, SARS Virus
taggtatcatcaatgcaatctgctt

SEQ ID NO: 208369 - DNA, 25 bp, SARS Virus
aggtatcatcatagcaatctgctta

SEQ ID NO: 208370 - DNA, 25 bp, SARS Virus
ggtatcatcattacaatctgcttaa

SEQ ID NO: 208371 - DNA, 25 bp, SARS Virus
gtatcatcattgaaatctgcttaat

SEQ ID NO: 208372 - DNA, 25 bp, SARS Virus
tatcatcattgcaatctgcttaatt

SEQ ID NO: 208373 - DNA, 25 bp, SARS Virus
atcatcattgcaatctgcttaattc

SEQ ID NO: 208374 - DNA, 25 bp, SARS Virus
tcatcattgcaaactgcttaattct

SEQ ID NO: 208375 - DNA, 25 bp, SARS Virus
catcattgcaatatgcttaattcta

SEQ ID NO: 208376 - DNA, 25 bp, SARS Virus
atcattgcaatcagcttaattctat

SEQ ID NO: 208377 - DNA, 25 bp, SARS Virus
tcattgcaatctacttaattctatg

SEQ ID NO: 208378 - DNA, 25 bp, SARS Virus
cattgcaatctgattaattctatgt

SEQ ID NO: 208379 - DNA, 25 bp, SARS Virus
attgcaatctgcataattctatgtt

SEQ ID NO: 208380 - DNA, 25 bp, SARS Virus
ttgcaatctgctaaattctatgtta

SEQ ID NO: 208381 - DNA, 25 bp, SARS Virus
tgcaatctgcttaattctatgttaa

SEQ ID NO: 208382 - DNA, 25 bp, SARS Virus
gcaatctgcttaattctatgttaag

SEQ ID NO: 208383 - DNA, 25 bp, SARS Virus
caatctgcttaaatctatgttaaga

SEQ ID NO: 208384 - DNA, 25 bp, SARS Virus
aatctgcttaatactatgttaagag

SEQ ID NO: 208385 - DNA, 25 bp, SARS Virus
atctgcttaattatatgttaagaga

SEQ ID NO: 208386 - DNA, 25 bp, SARS Virus
tctgcttaattcaatgttaagagat

SEQ ID NO: 208387 - DNA, 25 bp, SARS Virus
ctgcttaattctatgttaagagatt

SEQ ID NO: 208388 - DNA, 25 bp, SARS Virus
tgcttaattctaagttaagagattg

SEQ ID NO: 208389 - DNA, 25 bp, SARS Virus
gcttaattctatattaagagattgc

SEQ ID NO: 208390 - DNA, 25 bp, SARS Virus
cttaattctatgataagagattgcg

SEQ ID NO: 208391 - DNA, 25 bp, SARS Virus
ttaattctatgtaaagagattgcgg

SEQ ID NO: 208392 - DNA, 25 bp, SARS Virus
taattctatgttaagagattgcggt

SEQ ID NO: 208393 - DNA, 25 bp, SARS Virus
aattctatgttaagagattgcggta

SEQ ID NO: 208394 - DNA, 25 bp, SARS Virus
attctatgttaaaagattgcggtaa

SEQ ID NO: 208395 - DNA, 25 bp, SARS Virus
ttctatgttaagagattgcggtaat

SEQ ID NO: 208396 - DNA, 25 bp, SARS Virus
tctatgttaagaaattgcggtaatg

SEQ ID NO: 208397 - DNA, 25 bp, SARS Virus
ctatgttaagagattgcggtaatgt

SEQ ID NO: 208398 - DNA, 25 bp, SARS Virus
tatgttaagagaatgcggtaatgtt

SEQ ID NO: 208399 - DNA, 25 bp, SARS Virus
atgttaagagatagcggtaatgtta

SEQ ID NO: 208400 - DNA, 25 bp, SARS Virus
tgttaagagattacggtaatgttat

SEQ ID NO: 208401 - DNA, 25 bp, SARS Virus
gttaagagattgaggtaatgttatt

SEQ ID NO: 208402 - DNA, 25 bp, SARS Virus
ttaagagattgcagtaatgttattc

SEQ ID NO: 208403 - DNA, 25 bp, SARS Virus
taagagattgcgataatgttattct

SEQ ID NO: 208404 - DNA, 25 bp, SARS Virus
aagagattgcggaaatgttattctt

SEQ ID NO: 208405 - DNA, 25 bp, SARS Virus
agagattgcggtaatgttattcttc

SEQ ID NO: 208406 - DNA, 25 bp, SARS Virus
gagattgcggtaatgttattcttcc

SEQ ID NO: 208407 - DNA, 25 bp, SARS Virus
agattgcggtaaagttattcttcct

SEQ ID NO: 208408 - DNA, 25 bp, SARS Virus
gattgcggtaatattattcttcctc

SEQ ID NO: 208409 - DNA, 25 bp, SARS Virus
cggtaattgttaccaacatgtgagt

SEQ ID NO: 208410 - DNA, 25 bp, SARS Virus
ggtaattgttatcaacatgtgagtt

SEQ ID NO: 208411 - DNA, 25 bp, SARS Virus
gtaattgttatccacatgtgagttg

SEQ ID NO: 208412 - DNA, 25 bp, SARS Virus
taattgttatcaccatgtgagttgc

SEQ ID NO: 208413 - DNA, 25 bp, SARS Virus
aattgttatcaacatgtgagttgcg

SEQ ID NO: 208414 - DNA, 25 bp, SARS Virus
attgttatcaacctgtgagttgcgc

SEQ ID NO: 208415 - DNA, 25 bp, SARS Virus
ttgttatcaacacgtgagttgcgca

SEQ ID NO: 208416 - DNA, 25 bp, SARS Virus
tgttatcaacatctgagttgcgcac

SEQ ID NO: 208417 - DNA, 25 bp, SARS Virus
gttatcaacatgcgagttgcgcaca

SEQ ID NO: 208418 - DNA, 25 bp, SARS Virus
ttatcaacatgtcagttgcgcacac

SEQ ID NO: 208419 - DNA, 25 bp, SARS Virus
tatcaacatgtgcgttgcgcacacc

SEQ ID NO: 208420 - DNA, 25 bp, SARS Virus
atcaacatgtgacttgcgcacaccg

SEQ ID NO: 208421 - DNA, 25 bp, SARS Virus
tcaacatgtgagctgcgcacaccgt

SEQ ID NO: 208422 - DNA, 25 bp, SARS Virus
caacatgtgagtcgcgcacaccgtg

SEQ ID NO: 208423 - DNA, 25 bp, SARS Virus
aacatgtgagttccgcacaccgtgc

SEQ ID NO: 208424 - DNA, 25 bp, SARS Virus
acatgtgagttgcgcacaccgtgct

SEQ ID NO: 208425 - DNA, 25 bp, SARS Virus
catgtgagttgcccacaccgtgcta

SEQ ID NO: 208426 - DNA, 25 bp, SARS Virus
atgtgagttgcgcacaccgtgctaa

SEQ ID NO: 208427 - DNA, 25 bp, SARS Virus
tgtgagttgcgcccaccgtgctaac

SEQ ID NO: 208428 - DNA, 25 bp, SARS Virus
gtgagttgcgcacaccgtgctaacg

SEQ ID NO: 208429 - DNA, 25 bp, SARS Virus
tgagttgcgcaccccgtgctaacgc

SEQ ID NO: 208430 - DNA, 25 bp, SARS Virus
gagttgcgcacaccgtgctaacgcg

SEQ ID NO: 208431 - DNA, 25 bp, SARS Virus
agttgcgcacaccgtgctaacgcga

SEQ ID NO: 208432 - DNA, 25 bp, SARS Virus
gttgcgcacaccctgctaacgcgaa

SEQ ID NO: 208433 - DNA, 25 bp, SARS Virus
ttgcgcacaccgcgctaacgcgaat

SEQ ID NO: 208434 - DNA, 25 bp, SARS Virus
tgcgcacaccgtcctaacgcgaata

SEQ ID NO: 208435 - DNA, 25 bp, SARS Virus
gcgcacaccgtgctaacgcgaatat

SEQ ID NO: 208436 - DNA, 25 bp, SARS Virus
cgcacaccgtgccaacgcgaatatc

SEQ ID NO: 208437 - DNA, 25 bp, SARS Virus
gcacaccgtgctcacgcgaatatcg

SEQ ID NO: 208438 - DNA, 25 bp, SARS Virus
cacaccgtgctaccgcgaatatcgt

SEQ ID NO: 208439 - DNA, 25 bp, SARS Virus
acaccgtgctaacgcgaatatcgtg

SEQ ID NO: 208440 - DNA, 25 bp, SARS Virus
caccgtgctaacccgaatatcgtgt

SEQ ID NO: 208441 - DNA, 25 bp, SARS Virus
accgtgctaacgcgaatatcgtgta

SEQ ID NO: 208442 - DNA, 25 bp, SARS Virus
ccgtgctaacgccaatatcgtgtag

SEQ ID NO: 208443 - DNA, 25 bp, SARS Virus
cgtgctaacgcgcatatcgtgtagt

SEQ ID NO: 208444 - DNA, 25 bp, SARS Virus
gtgctaacgcgactatcgtgtagta

SEQ ID NO: 208445 - DNA, 25 bp, SARS Virus
tgctaacgcgaacatcgtgtagtac

SEQ ID NO: 208446 - DNA, 25 bp, SARS Virus
gctaacgcgaatctcgtgtagtacg

SEQ ID NO: 208447 - DNA, 25 bp, SARS Virus
ctaacgcgaataccgtgtagtacgt

SEQ ID NO: 208448 - DNA, 25 bp, SARS Virus
taacgcgaatatcgtgtagtacgtt

SEQ ID NO: 208449 - DNA, 25 bp, SARS Virus
aacgcgaatatcctgtagtacgttc

SEQ ID NO: 208450 - DNA, 25 bp, SARS Virus
acgcgaatatcgcgtagtacgttca

SEQ ID NO: 208451 - DNA, 25 bp, SARS Virus
cgcgaatatcgtctagtacgttcag

SEQ ID NO: 208452 - DNA, 25 bp, SARS Virus
gcgaatatcgtgcagtacgttcagc

SEQ ID NO: 208453 - DNA, 25 bp, SARS Virus
cgaatatcgtgtcgtacgttcagct

SEQ ID NO: 208454 - DNA, 25 bp, SARS Virus
gaatatcgtgtactacgttcagctt

SEQ ID NO: 208455 - DNA, 25 bp, SARS Virus
aatatcgtgtagcacgttcagcttc

SEQ ID NO: 208456 - DNA, 25 bp, SARS Virus
atatcgtgtagtccgttcagcttct

SEQ ID NO: 208457 - DNA, 25 bp, SARS Virus
tatcgtgtagtacgttcagcttctc

SEQ ID NO: 208458 - DNA, 25 bp, SARS Virus
atcgtgtagtaccttcagcttctcc

SEQ ID NO: 208459 - DNA, 25 bp, SARS Virus
tcgtgtagtacgctcagcttctcca

SEQ ID NO: 208460 - DNA, 25 bp, SARS Virus
cgtgtagtacgtccagcttctccac

SEQ ID NO: 208461 - DNA, 25 bp, SARS Virus
gtgtagtacgttcagcttctccacg

SEQ ID NO: 208462 - DNA, 25 bp, SARS Virus
tgtagtacgttccgcttctccacgt

SEQ ID NO: 208463 - DNA, 25 bp, SARS Virus
gtagtacgttcaccttctccacgtt

SEQ ID NO: 208464 - DNA, 25 bp, SARS Virus
tagtacgttcagcttctccacgttg

SEQ ID NO: 208465 - DNA, 25 bp, SARS Virus
agtacgttcagcctctccacgttgg

SEQ ID NO: 208466 - DNA, 25 bp, SARS Virus
gtacgttcagctcctccacgttggt

SEQ ID NO: 208467 - DNA, 25 bp, SARS Virus
tacgttcagcttctccacgttggta

SEQ ID NO: 208468 - DNA, 25 bp, SARS Virus
acgttcagcttccccacgttggtag

SEQ ID NO: 208469 - DNA, 25 bp, SARS Virus
cgttcagcttctccacgttggtagg

SEQ ID NO: 208470 - DNA, 25 bp, SARS Virus
gttcagcttctccacgttggtaggt

SEQ ID NO: 208471 - DNA, 25 bp, SARS Virus
ttcagcttctccccgttggtaggta

SEQ ID NO: 208472 - DNA, 25 bp, SARS Virus
tcagcttctccacgttggtaggtac

SEQ ID NO: 208473 - DNA, 25 bp, SARS Virus
cagcttctccaccttggtaggtact

SEQ ID NO: 208474 - DNA, 25 bp, SARS Virus
agcttctccacgctggtaggtacta

SEQ ID NO: 208475 - DNA, 25 bp, SARS Virus
gcttctccacgtcggtaggtactat

SEQ ID NO: 208476 - DNA, 25 bp, SARS Virus
cttctccacgttcgtaggtactata

SEQ ID NO: 208477 - DNA, 25 bp, SARS Virus
ttctccacgttgctaggtactatac

SEQ ID NO: 208478 - DNA, 25 bp, SARS Virus
tctccacgttggcaggtactatact

SEQ ID NO: 208479 - DNA, 25 bp, SARS Virus
ctccacgttggtcggtactatactt

SEQ ID NO: 208480 - DNA, 25 bp, SARS Virus
tccacgttggtacgtactatacttg

SEQ ID NO: 208481 - DNA, 25 bp, SARS Virus
ccacgttggtagctactatacttgt

SEQ ID NO: 208482 - DNA, 25 bp, SARS Virus
cacgttggtaggcactatacttgta

SEQ ID NO: 208483 - DNA, 25 bp, SARS Virus
acgttggtaggtcctatacttgtat

SEQ ID NO: 208484 - DNA, 25 bp, SARS Virus
cgttggtaggtactatacttgtatc

SEQ ID NO: 208485 - DNA, 25 bp, SARS Virus
gttggtaggtaccatacttgtatcg

SEQ ID NO: 208486 - DNA, 25 bp, SARS Virus
ttggtaggtactctacttgtatcga

SEQ ID NO: 208487 - DNA, 25 bp, SARS Virus
tggtaggtactacacttgtatcgag

SEQ ID NO: 208488 - DNA, 25 bp, SARS Virus
ggtaggtactatccttgtatcgaga

SEQ ID NO: 208489 - DNA, 25 bp, SARS Virus
gtaggtactatacttgtatcgagaa

SEQ ID NO: 208490 - DNA, 25 bp, SARS Virus
taggtactatacctgtatcgagaag

SEQ ID NO: 208491 - DNA, 25 bp, SARS Virus
aggtactatactcgtatcgagaagg

SEQ ID NO: 208492 - DNA, 25 bp, SARS Virus
ggtactatacttctatcgagaaggt

SEQ ID NO: 208493 - DNA, 25 bp, SARS Virus
gtactatacttgcatcgagaaggta

SEQ ID NO: 208494 - DNA, 25 bp, SARS Virus
tactatacttgtctcgagaaggtat

SEQ ID NO: 208495 - DNA, 25 bp, SARS Virus
actatacttgtaccgagaaggtata

SEQ ID NO: 208496 - DNA, 25 bp, SARS Virus
ctatacttgtatcgagaaggtatac

SEQ ID NO: 208497 - DNA, 25 bp, SARS Virus
tatacttgtatccagaaggtataca

SEQ ID NO: 208498 - DNA, 25 bp, SARS Virus
atacttgtatcgcgaaggtatacat

SEQ ID NO: 208499 - DNA, 25 bp, SARS Virus
tacttgtatcgacaaggtatacatc

SEQ ID NO: 208500 - DNA, 25 bp, SARS Virus
acttgtatcgagcaggtatacatca

SEQ ID NO: 208501 - DNA, 25 bp, SARS Virus
cttgtatcgagacggtatacatcat

SEQ ID NO: 208502 - DNA, 25 bp, SARS Virus
ttgtatcgagaacgtatacatcatc

SEQ ID NO: 208503 - DNA, 25 bp, SARS Virus
tgtatcgagaagctatacatcatct

SEQ ID NO: 208504 - DNA, 25 bp, SARS Virus
gtatcgagaaggcatacatcatctt

SEQ ID NO: 208505 - DNA, 25 bp, SARS Virus
tatcgagaaggtctacatcatcttt

SEQ ID NO: 208506 - DNA, 25 bp, SARS Virus
atcgagaaggtacacatcatctttc

SEQ ID NO: 208507 - DNA, 25 bp, SARS Virus
tcgagaaggtatccatcatctttct

SEQ ID NO: 208508 - DNA, 25 bp, SARS Virus
cgagaaggtatacatcatctttctt

SEQ ID NO: 208509 - DNA, 25 bp, SARS Virus
gagaaggtatacctcatctttcttc

SEQ ID NO: 208510 - DNA, 25 bp, SARS Virus
agaaggtatacaccatctttcttcg

SEQ ID NO: 208511 - DNA, 25 bp, SARS Virus
gaaggtatacatcatctttcttcgt

SEQ ID NO: 208512 - DNA, 25 bp, SARS Virus
aaggtatacatcctctttcttcgtt

SEQ ID NO: 208513 - DNA, 25 bp, SARS Virus
aggtatacatcacctttcttcgttt

SEQ ID NO: 208514 - DNA, 25 bp, SARS Virus
ggtatacatcatctttcttcgtttc

SEQ ID NO: 208515 - DNA, 25 bp, SARS Virus
gtatacatcatccttcttcgtttct

SEQ ID NO: 208516 - DNA, 25 bp, SARS Virus
tatacatcatctctcttcgtttctt

SEQ ID NO: 208517 - DNA, 25 bp, SARS Virus
atacatcatcttccttcgtttcttc

SEQ ID NO: 208518 - DNA, 25 bp, SARS Virus
tacatcatctttcttcgtttcttct

SEQ ID NO: 208519 - DNA, 25 bp, SARS Virus
acatcatctttcctcgtttcttcta

SEQ ID NO: 208520 - DNA, 25 bp, SARS Virus
catcatctttctccgtttcttctac

SEQ ID NO: 208521 - DNA, 25 bp, SARS Virus
atcatctttcttcgtttcttctaca

SEQ ID NO: 208522 - DNA, 25 bp, SARS Virus
tcatctttcttcctttcttctacat

SEQ ID NO: 208523 - DNA, 25 bp, SARS Virus
catctttcttcgcttcttctacatg

SEQ ID NO: 208524 - DNA, 25 bp, SARS Virus
atctttcttcgtctcttctacatgt

SEQ ID NO: 208525 - DNA, 25 bp, SARS Virus
tctttcttcgttccttctacatgta

SEQ ID NO: 208526 - DNA, 25 bp, SARS Virus
ctttcttcgtttcttctacatgtag

SEQ ID NO: 208527 - DNA, 25 bp, SARS Virus
tttcttcgtttcctctacatgtagg

SEQ ID NO: 208528 - DNA, 25 bp, SARS Virus
ttcttcgtttctcctacatgtagga

SEQ ID NO: 208529 - DNA, 25 bp, SARS Virus
tcttcgtttcttctacatgtaggat

SEQ ID NO: 208530 - DNA, 25 bp, SARS Virus
cttcgtttcttccacatgtaggatt

SEQ ID NO: 208531 - DNA, 25 bp, SARS Virus
ttcgtttcttctccatgtaggattg

SEQ ID NO: 208532 - DNA, 25 bp, SARS Virus
tcgtttcttctacatgtaggattgg

SEQ ID NO: 208533 - DNA, 25 bp, SARS Virus
cgtttcttctacctgtaggattggt

SEQ ID NO: 208534 - DNA, 25 bp, SARS Virus
gtttcttctacacgtaggattggta

SEQ ID NO: 208535 - DNA, 25 bp, SARS Virus
tttcttctacatctaggattggtaa

SEQ ID NO: 208536 - DNA, 25 bp, SARS Virus
ttcttctacatgcaggattggtaac

SEQ ID NO: 208537 - DNA, 25 bp, SARS Virus
tcttctacatgtcggattggtaacg

SEQ ID NO: 208538 - DNA, 25 bp, SARS Virus
cttctacatgtacgattggtaacgt

SEQ ID NO: 208539 - DNA, 25 bp, SARS Virus
ttctacatgtagcattggtaacgtc

SEQ ID NO: 208540 - DNA, 25 bp, SARS Virus
tctacatgtaggcttggtaacgtct

SEQ ID NO: 208541 - DNA, 25 bp, SARS Virus
ctacatgtaggactggtaacgtctt

SEQ ID NO: 208542 - DNA, 25 bp, SARS Virus
tacatgtaggatcggtaacgtcttt

SEQ ID NO: 208543 - DNA, 25 bp, SARS Virus
acatgtaggattcgtaacgtctttg

SEQ ID NO: 208544 - DNA, 25 bp, SARS Virus
catgtaggattgctaacgtctttgc

SEQ ID NO: 208545 - DNA, 25 bp, SARS Virus
atgtaggattggcaacgtctttgcc

SEQ ID NO: 208546 - DNA, 25 bp, SARS Virus
tgtaggattggtcacgtctttgccc

SEQ ID NO: 208547 - DNA, 25 bp, SARS Virus
gtaggattggtaccgtctttgccca

SEQ ID NO: 208548 - DNA, 25 bp, SARS Virus
taggattggtaacgtctttgcccac

SEQ ID NO: 208549 - DNA, 25 bp, SARS Virus
aggattggtaacctctttgcccacg

SEQ ID NO: 208550 - DNA, 25 bp, SARS Virus
ggattggtaacgcctttgcccacgg

SEQ ID NO: 208551 - DNA, 25 bp, SARS Virus
gattggtaacgtctttgcccacggt

SEQ ID NO: 208552 - DNA, 25 bp, SARS Virus
attggtaacgtccttgcccacggta

SEQ ID NO: 208553 - DNA, 25 bp, SARS Virus
ttggtaacgtctctgcccacggtaa

SEQ ID NO: 208554 - DNA, 25 bp, SARS Virus
tggtaacgtcttcgcccacggtaaa

SEQ ID NO: 208555 - DNA, 25 bp, SARS Virus
ggtaacgtctttccccacggtaaac

SEQ ID NO: 208556 - DNA, 25 bp, SARS Virus
gtaacgtctttgcccacggtaaaca

SEQ ID NO: 208557 - DNA, 25 bp, SARS Virus
taacgtctttgcccacggtaaacat

SEQ ID NO: 208558 - DNA, 25 bp, SARS Virus
aacgtctttgcccacggtaaacatg

SEQ ID NO: 208559 - DNA, 25 bp, SARS Virus
acgtctttgcccccggtaaacatgt

SEQ ID NO: 208560 - DNA, 25 bp, SARS Virus
cgtctttgcccacggtaaacatgtt

SEQ ID NO: 208561 - DNA, 25 bp, SARS Virus
gtctttgcccaccgtaaacatgtta

SEQ ID NO: 208562 - DNA, 25 bp, SARS Virus
tctttgcccacgctaaacatgttat

SEQ ID NO: 208563 - DNA, 25 bp, SARS Virus
ctttgcccacggcaaacatgttatg

SEQ ID NO: 208564 - DNA, 25 bp, SARS Virus
tttgcccacggtcaacatgttatga

SEQ ID NO: 208565 - DNA, 25 bp, SARS Virus
ttgcccacggtacacatgttatgat

SEQ ID NO: 208566 - DNA, 25 bp, SARS Virus
tgcccacggtaaccatgttatgatt

SEQ ID NO: 208567 - DNA, 25 bp, SARS Virus
gcccacggtaaacatgttatgatta

SEQ ID NO: 208568 - DNA, 25 bp, SARS Virus
cccacggtaaacctgttatgattac

SEQ ID NO: 208569 - DNA, 25 bp, SARS Virus
ccacggtaaacacgttatgattact

SEQ ID NO: 208570 - DNA, 25 bp, SARS Virus
cacggtaaacatcttatgattacta

SEQ ID NO: 208571 - DNA, 25 bp, SARS Virus
acggtaaacatgctatgattactat

SEQ ID NO: 208572 - DNA, 25 bp, SARS Virus
cggtaaacatgtcatgattactatt

SEQ ID NO: 208573 - DNA, 25 bp, SARS Virus
ggtaaacatgttctgattactattt

SEQ ID NO: 208574 - DNA, 25 bp, SARS Virus
gtaaacatgttacgattactatttg

SEQ ID NO: 208575 - DNA, 25 bp, SARS Virus
taaacatgttatcattactatttgg

SEQ ID NO: 208576 - DNA, 25 bp, SARS Virus
aaacatgttatgcttactatttggt

SEQ ID NO: 208577 - DNA, 25 bp, SARS Virus
aacatgttatgactactatttggtg

SEQ ID NO: 208578 - DNA, 25 bp, SARS Virus
acatgttatgatcactatttggtgt

SEQ ID NO: 208579 - DNA, 25 bp, SARS Virus
catgttatgattcctatttggtgta

SEQ ID NO: 208580 - DNA, 25 bp, SARS Virus
atgttatgattactatttggtgtac

SEQ ID NO: 208581 - DNA, 25 bp, SARS Virus
tgttatgattaccatttggtgtact

SEQ ID NO: 208582 - DNA, 25 bp, SARS Virus
gttatgattactctttggtgtactc

SEQ ID NO: 208583 - DNA, 25 bp, SARS Virus
ttatgattactacttggtgtactcg

SEQ ID NO: 208584 - DNA, 25 bp, SARS Virus
tatgattactatctggtgtactcgg

SEQ ID NO: 208585 - DNA, 25 bp, SARS Virus
atgattactattcggtgtactcggt

SEQ ID NO: 208586 - DNA, 25 bp, SARS Virus
tgattactatttcgtgtactcggtt

SEQ ID NO: 208587 - DNA, 25 bp, SARS Virus
gattactatttgctgtactcggttc

SEQ ID NO: 208588 - DNA, 25 bp, SARS Virus
attactatttggcgtactcggttct

SEQ ID NO: 208589 - DNA, 25 bp, SARS Virus
ttactatttggtctactcggttctt

SEQ ID NO: 208590 - DNA, 25 bp, SARS Virus
tactatttggtgcactcggttctta

SEQ ID NO: 208591 - DNA, 25 bp, SARS Virus
actatttggtgtcctcggttcttaa

SEQ ID NO: 208592 - DNA, 25 bp, SARS Virus
ctatttggtgtactcggttcttaac

SEQ ID NO: 208593 - DNA, 25 bp, SARS Virus
tatttggtgtacccggttcttaacg

SEQ ID NO: 208594 - DNA, 25 bp, SARS Virus
atttggtgtactcggttcttaacga

SEQ ID NO: 208595 - DNA, 25 bp, SARS Virus
tttggtgtactccgttcttaacgac

SEQ ID NO: 208596 - DNA, 25 bp, SARS Virus
ttggtgtactcgcttcttaacgact

SEQ ID NO: 208597 - DNA, 25 bp, SARS Virus
tggtgtactcggctcttaacgacta

SEQ ID NO: 208598 - DNA, 25 bp, SARS Virus
ggtgtactcggtccttaacgactac

SEQ ID NO: 208599 - DNA, 25 bp, SARS Virus
gtgtactcggttcttaacgactact

SEQ ID NO: 208600 - DNA, 25 bp, SARS Virus
tgtactcggttcctaacgactactt

SEQ ID NO: 208601 - DNA, 25 bp, SARS Virus
gtactcggttctcaacgactacttt

SEQ ID NO: 208602 - DNA, 25 bp, SARS Virus
tactcggttcttcacgactacttta

SEQ ID NO: 208603 - DNA, 25 bp, SARS Virus
actcggttcttaccgactactttac

SEQ ID NO: 208604 - DNA, 25 bp, SARS Virus
ctcggttcttaacgactactttact

SEQ ID NO: 208605 - DNA, 25 bp, SARS Virus
tcggttcttaaccactactttactg

SEQ ID NO: 208606 - DNA, 25 bp, SARS Virus
cggttcttaacgcctactttactga

SEQ ID NO: 208607 - DNA, 25 bp, SARS Virus
ggttcttaacgactactttactgat

SEQ ID NO: 208608 - DNA, 25 bp, SARS Virus
gttcttaacgaccactttactgatc

SEQ ID NO: 208609 - DNA, 25 bp, SARS Virus
ttcttaacgactcctttactgatcg

SEQ ID NO: 208610 - DNA, 25 bp, SARS Virus
tcttaacgactactttactgatcgt

SEQ ID NO: 208611 - DNA, 25 bp, SARS Virus
cttaacgactaccttactgatcgtt

SEQ ID NO: 208612 - DNA, 25 bp, SARS Virus
ttaacgactactctactgatcgttt

SEQ ID NO: 208613 - DNA, 25 bp, SARS Virus
taacgactacttcactgatcgtttt

SEQ ID NO: 208614 - DNA, 25 bp, SARS Virus
aacgactactttcctgatcgtttta

SEQ ID NO: 208615 - DNA, 25 bp, SARS Virus
acgactactttactgatcgttttat

SEQ ID NO: 208616 - DNA, 25 bp, SARS Virus
cgactactttaccgatcgttttatc

SEQ ID NO: 208617 - DNA, 25 bp, SARS Virus
gactactttactcatcgttttatcg

SEQ ID NO: 208618 - DNA, 25 bp, SARS Virus
actactttactgctcgttttatcgg

SEQ ID NO: 208619 - DNA, 25 bp, SARS Virus
ctactttactgaccgttttatcggt

SEQ ID NO: 208620 - DNA, 25 bp, SARS Virus
tactttactgatcgttttatcggtt

SEQ ID NO: 208621 - DNA, 25 bp, SARS Virus
actttactgatccttttatcggttt

SEQ ID NO: 208622 - DNA, 25 bp, SARS Virus
ctttactgatcgctttatcggtttc

SEQ ID NO: 208623 - DNA, 25 bp, SARS Virus
tttactgatcgtcttatcggtttct

SEQ ID NO: 208624 - DNA, 25 bp, SARS Virus
ttactgatcgttctatcggtttctt

SEQ ID NO: 208625 - DNA, 25 bp, SARS Virus
tactgatcgtttcatcggtttcttg

SEQ ID NO: 208626 - DNA, 25 bp, SARS Virus
actgatcgttttctcggtttcttgt

SEQ ID NO: 208627 - DNA, 25 bp, SARS Virus
ctgatcgttttaccggtttcttgtg

SEQ ID NO: 208628 - DNA, 25 bp, SARS Virus
tgatcgttttatcggtttcttgtgg

SEQ ID NO: 208629 - DNA, 25 bp, SARS Virus
gatcgttttatccgtttcttgtgga

SEQ ID NO: 208630 - DNA, 25 bp, SARS Virus
atcgttttatcgctttcttgtggac

SEQ ID NO: 208631 - DNA, 25 bp, SARS Virus
tcgttttatcggcttcttgtggacg

SEQ ID NO: 208632 - DNA, 25 bp, SARS Virus
cgttttatcggtctcttgtggacgt

SEQ ID NO: 208633 - DNA, 25 bp, SARS Virus
gttttatcggttccttgtggacgta

SEQ ID NO: 208634 - DNA, 25 bp, SARS Virus
ttttatcggtttcttgtggacgtaa

SEQ ID NO: 208635 - DNA, 25 bp, SARS Virus
tttatcggtttcctgtggacgtaat

SEQ ID NO: 208636 - DNA, 25 bp, SARS Virus
ttatcggtttctcgtggacgtaata

SEQ ID NO: 208637 - DNA, 25 bp, SARS Virus
tatcggtttcttctggacgtaatat

SEQ ID NO: 208638 - DNA, 25 bp, SARS Virus
atcggtttcttgcggacgtaatatc

SEQ ID NO: 208639 - DNA, 25 bp, SARS Virus
tcggtttcttgtcgacgtaatatcg

SEQ ID NO: 208640 - DNA, 25 bp, SARS Virus
cggtttcttgtgcacgtaatatcga

SEQ ID NO: 208641 - DNA, 25 bp, SARS Virus
ggtttcttgtggccgtaatatcgac

SEQ ID NO: 208642 - DNA, 25 bp, SARS Virus
gtttcttgtggacgtaatatcgact

SEQ ID NO: 208643 - DNA, 25 bp, SARS Virus
tttcttgtggacctaatatcgactt

SEQ ID NO: 208644 - DNA, 25 bp, SARS Virus
ttcttgtggacgcaatatcgacttt

SEQ ID NO: 208645 - DNA, 25 bp, SARS Virus
tcttgtggacgtcatatcgactttc

SEQ ID NO: 208646 - DNA, 25 bp, SARS Virus
cttgtggacgtactatcgactttct

SEQ ID NO: 208647 - DNA, 25 bp, SARS Virus
ttgtggacgtaacatcgactttctg

SEQ ID NO: 208648 - DNA, 25 bp, SARS Virus
tgtggacgtaatctcgactttctgg

SEQ ID NO: 208649 - DNA, 25 bp, SARS Virus
gtggacgtaataccgactttctgga

SEQ ID NO: 208650 - DNA, 25 bp, SARS Virus
tggacgtaatatcgactttctggat

SEQ ID NO: 208651 - DNA, 25 bp, SARS Virus
ggacgtaatatccactttctggatt

SEQ ID NO: 208652 - DNA, 25 bp, SARS Virus
gacgtaatatcgcctttctggatta

SEQ ID NO: 208653 - DNA, 25 bp, SARS Virus
acgtaatatcgactttctggattat

SEQ ID NO: 208654 - DNA, 25 bp, SARS Virus
cgtaatatcgaccttctggattatt

SEQ ID NO: 208655 - DNA, 25 bp, SARS Virus
gtaatatcgactctctggattattt

SEQ ID NO: 208656 - DNA, 25 bp, SARS Virus
taatatcgacttcctggattattta

SEQ ID NO: 208657 - DNA, 25 bp, SARS Virus
aatatcgactttctggattatttat

SEQ ID NO: 208658 - DNA, 25 bp, SARS Virus
atatcgactttccggattatttatt

SEQ ID NO: 208659 - DNA, 25 bp, SARS Virus
tatcgactttctcgattatttattt

SEQ ID NO: 208660 - DNA, 25 bp, SARS Virus
atcgactttctgcattatttatttt

SEQ ID NO: 208661 - DNA, 25 bp, SARS Virus
tcgactttctggcttatttattttc

SEQ ID NO: 208662 - DNA, 25 bp, SARS Virus
cgactttctggactatttattttct

SEQ ID NO: 208663 - DNA, 25 bp, SARS Virus
gactttctggatcatttattttctt

SEQ ID NO: 208664 - DNA, 25 bp, SARS Virus
actttctggattctttattttctta

SEQ ID NO: 208665 - DNA, 25 bp, SARS Virus
ctttctggattacttattttcttaa

SEQ ID NO: 208666 - DNA, 25 bp, SARS Virus
tttctggattatctattttcttaaa

SEQ ID NO: 208667 - DNA, 25 bp, SARS Virus
ttctggattattcattttcttaaaa

SEQ ID NO: 208668 - DNA, 25 bp, SARS Virus
tctggattatttcttttcttaaaac

SEQ ID NO: 208669 - DNA, 25 bp, SARS Virus
ctggattatttactttcttaaaaca

SEQ ID NO: 208670 - DNA, 25 bp, SARS Virus
tggattatttatcttcttaaaacac

SEQ ID NO: 208671 - DNA, 25 bp, SARS Virus
ggattatttattctcttaaaacact

SEQ ID NO: 208672 - DNA, 25 bp, SARS Virus
gattatttatttccttaaaacactt

SEQ ID NO: 208673 - DNA, 25 bp, SARS Virus
attatttattttcttaaaacacttg

SEQ ID NO: 208674 - DNA, 25 bp, SARS Virus
ttatttattttcctaaaacacttgt

SEQ ID NO: 208675 - DNA, 25 bp, SARS Virus
tatttattttctcaaaacacttgtt

SEQ ID NO: 208676 - DNA, 25 bp, SARS Virus
atttattttcttcaaacacttgttg

SEQ ID NO: 208677 - DNA, 25 bp, SARS Virus
tttattttcttacaacacttgttgt

SEQ ID NO: 208678 - DNA, 25 bp, SARS Virus
ttattttcttaacacacttgttgta

SEQ ID NO: 208679 - DNA, 25 bp, SARS Virus
tattttcttaaaccacttgttgtat

SEQ ID NO: 208680 - DNA, 25 bp, SARS Virus
attttcttaaaacacttgttgtata

SEQ ID NO: 208681 - DNA, 25 bp, SARS Virus
ttttcttaaaacccttgttgtatat

SEQ ID NO: 208682 - DNA, 25 bp, SARS Virus
tttcttaaaacacttgttgtatata

SEQ ID NO: 208683 - DNA, 25 bp, SARS Virus
ttcttaaaacacctgttgtatatac

SEQ ID NO: 208684 - DNA, 25 bp, SARS Virus
tcttaaaacactcgttgtatatacg

SEQ ID NO: 208685 - DNA, 25 bp, SARS Virus
cttaaaacacttcttgtatatacgg

SEQ ID NO: 208686 - DNA, 25 bp, SARS Virus
ttaaaacacttgctgtatatacggt

SEQ ID NO: 208687 - DNA, 25 bp, SARS Virus
taaaacacttgtcgtatatacggtt

SEQ ID NO: 208688 - DNA, 25 bp, SARS Virus
aaaacacttgttctatatacggttt

SEQ ID NO: 208689 - DNA, 25 bp, SARS Virus
aaacacttgttgcatatacggtttt

SEQ ID NO: 208690 - DNA, 25 bp, SARS Virus
aacacttgttgtctatacggttttg

SEQ ID NO: 208691 - DNA, 25 bp, SARS Virus
acacttgttgtacatacggttttgg

SEQ ID NO: 208692 - DNA, 25 bp, SARS Virus
cacttgttgtatctacggttttggg

SEQ ID NO: 208693 - DNA, 25 bp, SARS Virus
acttgttgtatacacggttttgggt

SEQ ID NO: 208694 - DNA, 25 bp, SARS Virus
cttgttgtatatccggttttgggtg

SEQ ID NO: 208695 - DNA, 25 bp, SARS Virus
ttgttgtatatacggttttgggtga

SEQ ID NO: 208696 - DNA, 25 bp, SARS Virus
tgttgtatataccgttttgggtgag

SEQ ID NO: 208697 - DNA, 25 bp, SARS Virus
gttgtatatacgcttttgggtgagt

SEQ ID NO: 208698 - DNA, 25 bp, SARS Virus
ttgtatatacggctttgggtgagtc

SEQ ID NO: 208699 - DNA, 25 bp, SARS Virus
tgtatatacggtcttgggtgagtcg

SEQ ID NO: 208700 - DNA, 25 bp, SARS Virus
gtatatacggttctgggtgagtcgc

SEQ ID NO: 208701 - DNA, 25 bp, SARS Virus
tatatacggtttcgggtgagtcgcc

SEQ ID NO: 208702 - DNA, 25 bp, SARS Virus
atatacggttttcggtgagtcgccg

SEQ ID NO: 208703 - DNA, 25 bp, SARS Virus
tatacggttttgcgtgagtcgccgg

SEQ ID NO: 208704 - DNA, 25 bp, SARS Virus
atacggttttggctgagtcgccggt

SEQ ID NO: 208705 - DNA, 25 bp, SARS Virus
tacggttttgggcgagtcgccggtc

SEQ ID NO: 208706 - DNA, 25 bp, SARS Virus
acggttttgggtcagtcgccggtct

SEQ ID NO: 208707 - DNA, 25 bp, SARS Virus
cggttttgggtgcgtcgccggtctg

SEQ ID NO: 208708 - DNA, 25 bp, SARS Virus
ggttttgggtgactcgccggtctgg

SEQ ID NO: 208709 - DNA, 25 bp, SARS Virus
gttttgggtgagccgccggtctgga

SEQ ID NO: 208710 - DNA, 25 bp, SARS Virus
ttttgggtgagtcgccggtctggat

SEQ ID NO: 208711 - DNA, 25 bp, SARS Virus
tttgggtgagtccccggtctggatt

SEQ ID NO: 208712 - DNA, 25 bp, SARS Virus
ttgggtgagtcgccggtctggattt

SEQ ID NO: 208713 - DNA, 25 bp, SARS Virus
tgggtgagtcgccggtctggatttt

SEQ ID NO: 208714 - DNA, 25 bp, SARS Virus
gggtgagtcgcccgtctggatttta

SEQ ID NO: 208715 - DNA, 25 bp, SARS Virus
ggtgagtcgccgctctggattttaa

SEQ ID NO: 208716 - DNA, 25 bp, SARS Virus
gtgagtcgccggcctggattttaac

SEQ ID NO: 208717 - DNA, 25 bp, SARS Virus
tgagtcgccggtctggattttaaca

SEQ ID NO: 208718 - DNA, 25 bp, SARS Virus
gagtcgccggtccggattttaacag

SEQ ID NO: 208719 - DNA, 25 bp, SARS Virus
agtcgccggtctcgattttaacagt

SEQ ID NO: 208720 - DNA, 25 bp, SARS Virus
gtcgccggtctgcattttaacagtt

SEQ ID NO: 208721 - DNA, 25 bp, SARS Virus
tcgccggtctggcttttaacagttc

SEQ ID NO: 208722 - DNA, 25 bp, SARS Virus
cgccggtctggactttaacagttca

SEQ ID NO: 208723 - DNA, 25 bp, SARS Virus
gccggtctggatcttaacagttcag

SEQ ID NO: 208724 - DNA, 25 bp, SARS Virus
ccggtctggattctaacagttcaga

SEQ ID NO: 208725 - DNA, 25 bp, SARS Virus
cggtctggatttcaacagttcagat

SEQ ID NO: 208726 - DNA, 25 bp, SARS Virus
ggtctggattttcacagttcagatc

SEQ ID NO: 208727 - DNA, 25 bp, SARS Virus
gtctggattttaccagttcagatcg

SEQ ID NO: 208728 - DNA, 25 bp, SARS Virus
tctggattttaacagttcagatcga

SEQ ID NO: 208729 - DNA, 25 bp, SARS Virus
ctggattttaaccgttcagatcgaa

SEQ ID NO: 208730 - DNA, 25 bp, SARS Virus
tggattttaacacttcagatcgaac

SEQ ID NO: 208731 - DNA, 25 bp, SARS Virus
ggattttaacagctcagatcgaaca

SEQ ID NO: 208732 - DNA, 25 bp, SARS Virus
gattttaacagtccagatcgaacat

SEQ ID NO: 208733 - DNA, 25 bp, SARS Virus
attttaacagttcagatcgaacatg

SEQ ID NO: 208734 - DNA, 25 bp, SARS Virus
ttttaacagttccgatcgaacatgc

SEQ ID NO: 208735 - DNA, 25 bp, SARS Virus
tttaacagttcacatcgaacatgct

SEQ ID NO: 208736 - DNA, 25 bp, SARS Virus
ttaacagttcagctcgaacatgcta

SEQ ID NO: 208737 - DNA, 25 bp, SARS Virus
taacagttcagaccgaacatgctac

SEQ ID NO: 208738 - DNA, 25 bp, SARS Virus
aacagttcagatcgaacatgctact

SEQ ID NO: 208739 - DNA, 25 bp, SARS Virus
acagttcagatccaacatgctactt

SEQ ID NO: 208740 - DNA, 25 bp, SARS Virus
cagttcagatcgcacatgctacttt

SEQ ID NO: 208741 - DNA, 25 bp, SARS Virus
agttcagatcgaccatgctacttta

SEQ ID NO: 208742 - DNA, 25 bp, SARS Virus
gttcagatcgaacatgctactttag

SEQ ID NO: 208743 - DNA, 25 bp, SARS Virus
ttcagatcgaacctgctactttagc

SEQ ID NO: 208744 - DNA, 25 bp, SARS Virus
tcagatcgaacacgctactttagca

SEQ ID NO: 208745 - DNA, 25 bp, SARS Virus
cagatcgaacatcctactttagcag

SEQ ID NO: 208746 - DNA, 25 bp, SARS Virus
agatcgaacatgctactttagcagt

SEQ ID NO: 208747 - DNA, 25 bp, SARS Virus
gatcgaacatgccactttagcagtg

SEQ ID NO: 208748 - DNA, 25 bp, SARS Virus
atcgaacatgctcctttagcagtgg

SEQ ID NO: 208749 - DNA, 25 bp, SARS Virus
tcgaacatgctactttagcagtgga

SEQ ID NO: 208750 - DNA, 25 bp, SARS Virus
cgaacatgctaccttagcagtggac

SEQ ID NO: 208751 - DNA, 25 bp, SARS Virus
gaacatgctactctagcagtggact

SEQ ID NO: 208752 - DNA, 25 bp, SARS Virus
aacatgctacttcagcagtggactt

SEQ ID NO: 208753 - DNA, 25 bp, SARS Virus
acatgctactttcgcagtggactta

SEQ ID NO: 208754 - DNA, 25 bp, SARS Virus
catgctactttaccagtggacttac

SEQ ID NO: 208755 - DNA, 25 bp, SARS Virus
atgctactttagcagtggacttacc

SEQ ID NO: 208756 - DNA, 25 bp, SARS Virus
tgctactttagccgtggacttacca

SEQ ID NO: 208757 - DNA, 25 bp, SARS Virus
gctactttagcactggacttaccaa

SEQ ID NO: 208758 - DNA, 25 bp, SARS Virus
ctactttagcagcggacttaccaaa

SEQ ID NO: 208759 - DNA, 25 bp, SARS Virus
tactttagcagtcgacttaccaaag

SEQ ID NO: 208760 - DNA, 25 bp, SARS Virus
actttagcagtgcacttaccaaagt

SEQ ID NO: 208761 - DNA, 25 bp, SARS Virus
ctttagcagtggccttaccaaagtt

SEQ ID NO: 208762 - DNA, 25 bp, SARS Virus
tttagcagtggacttaccaaagttc

SEQ ID NO: 208763 - DNA, 25 bp, SARS Virus
ttagcagtggacctaccaaagttct

SEQ ID NO: 208764 - DNA, 25 bp, SARS Virus
tagcagtggactcaccaaagttctc

SEQ ID NO: 208765 - DNA, 25 bp, SARS Virus
agcagtggacttcccaaagttctcg

SEQ ID NO: 208766 - DNA, 25 bp, SARS Virus
gcagtggacttaccaaagttctcga

SEQ ID NO: 208767 - DNA, 25 bp, SARS Virus
cagtggacttaccaaagttctcgac

SEQ ID NO: 208768 - DNA, 25 bp, SARS Virus
agtggacttacccaagttctcgacc

SEQ ID NO: 208769 - DNA, 25 bp, SARS Virus
gtggacttaccacagttctcgacct

SEQ ID NO: 208770 - DNA, 25 bp, SARS Virus
tggacttaccaacgttctcgaccta

SEQ ID NO: 208771 - DNA, 25 bp, SARS Virus
ggacttaccaaacttctcgacctat

SEQ ID NO: 208772 - DNA, 25 bp, SARS Virus
gacttaccaaagctctcgacctatt

SEQ ID NO: 208773 - DNA, 25 bp, SARS Virus
acttaccaaagtcctcgacctattc

SEQ ID NO: 208774 - DNA, 25 bp, SARS Virus
cttaccaaagttctcgacctattct

SEQ ID NO: 208775 - DNA, 25 bp, SARS Virus
ttaccaaagttcccgacctattctt

SEQ ID NO: 208776 - DNA, 25 bp, SARS Virus
taccaaagttctcgacctattctta

SEQ ID NO: 208777 - DNA, 25 bp, SARS Virus
accaaagttctccacctattcttag

SEQ ID NO: 208778 - DNA, 25 bp, SARS Virus
ccaaagttctcgccctattcttagt

SEQ ID NO: 208779 - DNA, 25 bp, SARS Virus
caaagttctcgacctattcttagtt

SEQ ID NO: 208780 - DNA, 25 bp, SARS Virus
aaagttctcgacctattcttagttc

SEQ ID NO: 208781 - DNA, 25 bp, SARS Virus
aagttctcgacccattcttagttcc

SEQ ID NO: 208782 - DNA, 25 bp, SARS Virus
agttctcgacctcttcttagttccc

SEQ ID NO: 208783 - DNA, 25 bp, SARS Virus
gttctcgacctactcttagttccct

SEQ ID NO: 208784 - DNA, 25 bp, SARS Virus
ttctcgacctatccttagttccctc

SEQ ID NO: 208785 - DNA, 25 bp, SARS Virus
tctcgacctattcttagttccctca

SEQ ID NO: 208786 - DNA, 25 bp, SARS Virus
ctcgacctattcctagttccctcag

SEQ ID NO: 208787 - DNA, 25 bp, SARS Virus
tcgacctattctcagttccctcaga

SEQ ID NO: 208788 - DNA, 25 bp, SARS Virus
cgacctattcttcgttccctcagat

SEQ ID NO: 208789 - DNA, 25 bp, SARS Virus
gacctattcttacttccctcagatt

SEQ ID NO: 208790 - DNA, 25 bp, SARS Virus
acctattcttagctccctcagatta

SEQ ID NO: 208791 - DNA, 25 bp, SARS Virus
cctattcttagtcccctcagattag

SEQ ID NO: 208792 - DNA, 25 bp, SARS Virus
ctattcttagttccctcagattagg

SEQ ID NO: 208793 - DNA, 25 bp, SARS Virus
tattcttagttccctcagattaggt

SEQ ID NO: 208794 - DNA, 25 bp, SARS Virus
attcttagttccctcagattaggtg

SEQ ID NO: 208795 - DNA, 25 bp, SARS Virus
ttcttagttcccccagattaggtga

SEQ ID NO: 208796 - DNA, 25 bp, SARS Virus
tcttagttccctcagattaggtgaa

SEQ ID NO: 208797 - DNA, 25 bp, SARS Virus
cttagttccctccgattaggtgaat

SEQ ID NO: 208798 - DNA, 25 bp, SARS Virus
ttagttccctcacattaggtgaatt

SEQ ID NO: 208799 - DNA, 25 bp, SARS Virus
tagttccctcagcttaggtgaattt

SEQ ID NO: 208800 - DNA, 25 bp, SARS Virus
agttccctcagactaggtgaatttg

SEQ ID NO: 208801 - DNA, 25 bp, SARS Virus
gttccctcagatcaggtgaatttgt

SEQ ID NO: 208802 - DNA, 25 bp, SARS Virus
ttccctcagattcggtgaatttgtt

SEQ ID NO: 208803 - DNA, 25 bp, SARS Virus
tccctcagattacgtgaatttgttt

SEQ ID NO: 208804 - DNA, 25 bp, SARS Virus
ccctcagattagctgaatttgttta

SEQ ID NO: 208805 - DNA, 25 bp, SARS Virus
cctcagattaggcgaatttgtttac

SEQ ID NO: 208806 - DNA, 25 bp, SARS Virus
ctcagattaggtcaatttgtttacg

SEQ ID NO: 208807 - DNA, 25 bp, SARS Virus
tcagattaggtgcatttgtttacga

SEQ ID NO: 208808 - DNA, 25 bp, SARS Virus
cagattaggtgactttgtttacgac

SEQ ID NO: 208809 - DNA, 25 bp, SARS Virus
agattaggtgaacttgtttacgacg

SEQ ID NO: 208810 - DNA, 25 bp, SARS Virus
gattaggtgaatctgtttacgacgt

SEQ ID NO: 208811 - DNA, 25 bp, SARS Virus
attaggtgaattcgtttacgacgtt

SEQ ID NO: 208812 - DNA, 25 bp, SARS Virus
ttaggtgaatttctttacgacgttc

SEQ ID NO: 208813 - DNA, 25 bp, SARS Virus
taggtgaatttgcttacgacgttcc

SEQ ID NO: 208814 - DNA, 25 bp, SARS Virus
aggtgaatttgtctacgacgttcct

SEQ ID NO: 208815 - DNA, 25 bp, SARS Virus
ggtgaatttgttcacgacgttcctt

SEQ ID NO: 208816 - DNA, 25 bp, SARS Virus
gtgaatttgtttccgacgttccttt

SEQ ID NO: 208817 - DNA, 25 bp, SARS Virus
tgaatttgtttacgacgttcctttt

SEQ ID NO: 208818 - DNA, 25 bp, SARS Virus
gaatttgtttaccacgttccttttc

SEQ ID NO: 208819 - DNA, 25 bp, SARS Virus
aatttgtttacgccgttccttttct

SEQ ID NO: 208820 - DNA, 25 bp, SARS Virus
atttgtttacgacgttccttttctt

SEQ ID NO: 208821 - DNA, 25 bp, SARS Virus
tttgtttacgaccttccttttcttg

SEQ ID NO: 208822 - DNA, 25 bp, SARS Virus
ttgtttacgacgctccttttcttgg

SEQ ID NO: 208823 - DNA, 25 bp, SARS Virus
tgtttacgacgtcccttttcttgga

SEQ ID NO: 208824 - DNA, 25 bp, SARS Virus
gtttacgacgttccttttcttggaa

SEQ ID NO: 208825 - DNA, 25 bp, SARS Virus
tttacgacgttccttttcttggaag

SEQ ID NO: 208826 - DNA, 25 bp, SARS Virus
ttacgacgttccctttcttggaagt

SEQ ID NO: 208827 - DNA, 25 bp, SARS Virus
tacgacgttcctcttcttggaagtg

SEQ ID NO: 208828 - DNA, 25 bp, SARS Virus
acgacgttccttctcttggaagtgt

SEQ ID NO: 208829 - DNA, 25 bp, SARS Virus
cgacgttcctttccttggaagtgtc

SEQ ID NO: 208830 - DNA, 25 bp, SARS Virus
gacgttccttttcttggaagtgtct

SEQ ID NO: 208831 - DNA, 25 bp, SARS Virus
acgttccttttcctggaagtgtctt

SEQ ID NO: 208832 - DNA, 25 bp, SARS Virus
cgttccttttctcggaagtgtcttt

SEQ ID NO: 208833 - DNA, 25 bp, SARS Virus
gttccttttcttcgaagtgtcttta

SEQ ID NO: 208834 - DNA, 25 bp, SARS Virus
ttccttttcttgcaagtgtctttag

SEQ ID NO: 208835 - DNA, 25 bp, SARS Virus
tccttttcttggcagtgtctttagg

SEQ ID NO: 208836 - DNA, 25 bp, SARS Virus
ccttttcttggacgtgtctttaggt

SEQ ID NO: 208837 - DNA, 25 bp, SARS Virus
cttttcttggaactgtctttaggta

SEQ ID NO: 208838 - DNA, 25 bp, SARS Virus
ttttcttggaagcgtctttaggtat

SEQ ID NO: 208839 - DNA, 25 bp, SARS Virus
tttcttggaagtctctttaggtatc

SEQ ID NO: 208840 - DNA, 25 bp, SARS Virus
ttcttggaagtgcctttaggtatca

SEQ ID NO: 208841 - DNA, 25 bp, SARS Virus
tcttggaagtgtctttaggtatcat

SEQ ID NO: 208842 - DNA, 25 bp, SARS Virus
cttggaagtgtccttaggtatcatc

SEQ ID NO: 208843 - DNA, 25 bp, SARS Virus
ttggaagtgtctctaggtatcatca

SEQ ID NO: 208844 - DNA, 25 bp, SARS Virus
tggaagtgtcttcaggtatcatcat

SEQ ID NO: 208845 - DNA, 25 bp, SARS Virus
ggaagtgtctttcggtatcatcatt

SEQ ID NO: 208846 - DNA, 25 bp, SARS Virus
gaagtgtctttacgtatcatcattg

SEQ ID NO: 208847 - DNA, 25 bp, SARS Virus
aagtgtctttagctatcatcattgc

SEQ ID NO: 208848 - DNA, 25 bp, SARS Virus
agtgtctttaggcatcatcattgca

SEQ ID NO: 208849 - DNA, 25 bp, SARS Virus
gtgtctttaggtctcatcattgcaa

SEQ ID NO: 208850 - DNA, 25 bp, SARS Virus
tgtctttaggtaccatcattgcaat

SEQ ID NO: 208851 - DNA, 25 bp, SARS Virus
gtctttaggtatcatcattgcaatc

SEQ ID NO: 208852 - DNA, 25 bp, SARS Virus
tctttaggtatcctcattgcaatct

SEQ ID NO: 208853 - DNA, 25 bp, SARS Virus
ctttaggtatcaccattgcaatctg

SEQ ID NO: 208854 - DNA, 25 bp, SARS Virus
tttaggtatcatcattgcaatctgc

SEQ ID NO: 208855 - DNA, 25 bp, SARS Virus
ttaggtatcatccttgcaatctgct

SEQ ID NO: 208856 - DNA, 25 bp, SARS Virus
taggtatcatcactgcaatctgctt

SEQ ID NO: 208857 - DNA, 25 bp, SARS Virus
aggtatcatcatcgcaatctgctta

SEQ ID NO: 208858 - DNA, 25 bp, SARS Virus
ggtatcatcattccaatctgcttaa

SEQ ID NO: 208859 - DNA, 25 bp, SARS Virus
gtatcatcattgcaatctgcttaat

SEQ ID NO: 208860 - DNA, 25 bp, SARS Virus
tatcatcattgccatctgcttaatt

SEQ ID NO: 208861 - DNA, 25 bp, SARS Virus
atcatcattgcactctgcttaattc

SEQ ID NO: 208862 - DNA, 25 bp, SARS Virus
tcatcattgcaacctgcttaattct

SEQ ID NO: 208863 - DNA, 25 bp, SARS Virus
catcattgcaatctgcttaattcta

SEQ ID NO: 208864 - DNA, 25 bp, SARS Virus
atcattgcaatccgcttaattctat

SEQ ID NO: 208865 - DNA, 25 bp, SARS Virus
tcattgcaatctccttaattctatg

SEQ ID NO: 208866 - DNA, 25 bp, SARS Virus
cattgcaatctgcttaattctatgt

SEQ ID NO: 208867 - DNA, 25 bp, SARS Virus
attgcaatctgcctaattctatgtt

SEQ ID NO: 208868 - DNA, 25 bp, SARS Virus
ttgcaatctgctcaattctatgtta

SEQ ID NO: 208869 - DNA, 25 bp, SARS Virus
tgcaatctgcttcattctatgttaa

SEQ ID NO: 208870 - DNA, 25 bp, SARS Virus
gcaatctgcttacttctatgttaag

SEQ ID NO: 208871 - DNA, 25 bp, SARS Virus
caatctgcttaactctatgttaaga

SEQ ID NO: 208872 - DNA, 25 bp, SARS Virus
aatctgcttaatcctatgttaagag

SEQ ID NO: 208873 - DNA, 25 bp, SARS Virus
atctgcttaattctatgttaagaga

SEQ ID NO: 208874 - DNA, 25 bp, SARS Virus
tctgcttaattccatgttaagagat

SEQ ID NO: 208875 - DNA, 25 bp, SARS Virus
ctgcttaattctctgttaagagatt

SEQ ID NO: 208876 - DNA, 25 bp, SARS Virus
tgcttaattctacgttaagagattg

SEQ ID NO: 208877 - DNA, 25 bp, SARS Virus
gcttaattctatcttaagagattgc

SEQ ID NO: 208878 - DNA, 25 bp, SARS Virus
cttaattctatgctaagagattgcg

SEQ ID NO: 208879 - DNA, 25 bp, SARS Virus
ttaattctatgtcaagagattgcgg

SEQ ID NO: 208880 - DNA, 25 bp, SARS Virus
taattctatgttcagagattgcggt

SEQ ID NO: 208881 - DNA, 25 bp, SARS Virus
aattctatgttacgagattgcggta

SEQ ID NO: 208882 - DNA, 25 bp, SARS Virus
attctatgttaacagattgcggtaa

SEQ ID NO: 208883 - DNA, 25 bp, SARS Virus
ttctatgttaagcgattgcggtaat

SEQ ID NO: 208884 - DNA, 25 bp, SARS Virus
tctatgttaagacattgcggtaatg

SEQ ID NO: 208885 - DNA, 25 bp, SARS Virus
ctatgttaagagcttgcggtaatgt

SEQ ID NO: 208886 - DNA, 25 bp, SARS Virus
tatgttaagagactgcggtaatgtt

SEQ ID NO: 208887 - DNA, 25 bp, SARS Virus
atgttaagagatcgcggtaatgtta

SEQ ID NO: 208888 - DNA, 25 bp, SARS Virus
tgttaagagattccggtaatgttat

SEQ ID NO: 208889 - DNA, 25 bp, SARS Virus
gttaagagattgcggtaatgttatt

SEQ ID NO: 208890 - DNA, 25 bp, SARS Virus
ttaagagattgccgtaatgttattc

SEQ ID NO: 208891 - DNA, 25 bp, SARS Virus
taagagattgcgctaatgttattct

SEQ ID NO: 208892 - DNA, 25 bp, SARS Virus
aagagattgcggcaatgttattctt

SEQ ID NO: 208893 - DNA, 25 bp, SARS Virus
agagattgcggtcatgttattcttc

SEQ ID NO: 208894 - DNA, 25 bp, SARS Virus
gagattgcggtactgttattcttcc

SEQ ID NO: 208895 - DNA, 25 bp, SARS Virus
agattgcggtaacgttattcttcct

SEQ ID NO: 208896 - DNA, 25 bp, SARS Virus
gattgcggtaatcttattcttcctc

SEQ ID NO: 208897 - DNA, 25 bp, SARS Virus
cggtaattgttagcaacatgtgagt

SEQ ID NO: 208898 - DNA, 25 bp, SARS Virus
ggtaattgttatgaacatgtgagtt

SEQ ID NO: 208899 - DNA, 25 bp, SARS Virus
gtaattgttatcgacatgtgagttg

SEQ ID NO: 208900 - DNA, 25 bp, SARS Virus
taattgttatcagcatgtgagttgc

SEQ ID NO: 208901 - DNA, 25 bp, SARS Virus
aattgttatcaagatgtgagttgcg

SEQ ID NO: 208902 - DNA, 25 bp, SARS Virus
attgttatcaacgtgtgagttgcgc

SEQ ID NO: 208903 - DNA, 25 bp, SARS Virus
ttgttatcaacaggtgagttgcgca

SEQ ID NO: 208904 - DNA, 25 bp, SARS Virus
tgttatcaacatgtgagttgcgcac

SEQ ID NO: 208905 - DNA, 25 bp, SARS Virus
gttatcaacatgggagttgcgcaca

SEQ ID NO: 208906 - DNA, 25 bp, SARS Virus
ttatcaacatgtgagttgcgcacac

SEQ ID NO: 208907 - DNA, 25 bp, SARS Virus
tatcaacatgtgggttgcgcacacc

SEQ ID NO: 208908 - DNA, 25 bp, SARS Virus
atcaacatgtgagttgcgcacaccg

SEQ ID NO: 208909 - DNA, 25 bp, SARS Virus
tcaacatgtgaggtgcgcacaccgt

SEQ ID NO: 208910 - DNA, 25 bp, SARS Virus
caacatgtgagtggcgcacaccgtg

SEQ ID NO: 208911 - DNA, 25 bp, SARS Virus
aacatgtgagttgcgcacaccgtgc

SEQ ID NO: 208912 - DNA, 25 bp, SARS Virus
acatgtgagttgggcacaccgtgct

SEQ ID NO: 208913 - DNA, 25 bp, SARS Virus
catgtgagttgcgcacaccgtgcta

SEQ ID NO: 208914 - DNA, 25 bp, SARS Virus
atgtgagttgcggacaccgtgctaa

SEQ ID NO: 208915 - DNA, 25 bp, SARS Virus
tgtgagttgcgcgcaccgtgctaac

SEQ ID NO: 208916 - DNA, 25 bp, SARS Virus
gtgagttgcgcagaccgtgctaacg

SEQ ID NO: 208917 - DNA, 25 bp, SARS Virus
tgagttgcgcacgccgtgctaacgc

SEQ ID NO: 208918 - DNA, 25 bp, SARS Virus
gagttgcgcacagcgtgctaacgcg

SEQ ID NO: 208919 - DNA, 25 bp, SARS Virus
agttgcgcacacggtgctaacgcga

SEQ ID NO: 208920 - DNA, 25 bp, SARS Virus
gttgcgcacaccgtgctaacgcgaa

SEQ ID NO: 208921 - DNA, 25 bp, SARS Virus
ttgcgcacaccgggctaacgcgaat

SEQ ID NO: 208922 - DNA, 25 bp, SARS Virus
tgcgcacaccgtgctaacgcgaata

SEQ ID NO: 208923 - DNA, 25 bp, SARS Virus
gcgcacaccgtggtaacgcgaatat

SEQ ID NO: 208924 - DNA, 25 bp, SARS Virus
cgcacaccgtgcgaacgcgaatatc

SEQ ID NO: 208925 - DNA, 25 bp, SARS Virus
gcacaccgtgctgacgcgaatatcg

SEQ ID NO: 208926 - DNA, 25 bp, SARS Virus
cacaccgtgctagcgcgaatatcgt

SEQ ID NO: 208927 - DNA, 25 bp, SARS Virus
acaccgtgctaaggcgaatatcgtg

SEQ ID NO: 208928 - DNA, 25 bp, SARS Virus
caccgtgctaacgcgaatatcgtgt

SEQ ID NO: 208929 - DNA, 25 bp, SARS Virus
accgtgctaacgggaatatcgtgta

SEQ ID NO: 208930 - DNA, 25 bp, SARS Virus
ccgtgctaacgcgaatatcgtgtag

SEQ ID NO: 208931 - DNA, 25 bp, SARS Virus
cgtgctaacgcggatatcgtgtagt

SEQ ID NO: 208932 - DNA, 25 bp, SARS Virus
gtgctaacgcgagtatcgtgtagta

SEQ ID NO: 208933 - DNA, 25 bp, SARS Virus
tgctaacgcgaagatcgtgtagtac

SEQ ID NO: 208934 - DNA, 25 bp, SARS Virus
gctaacgcgaatgtcgtgtagtacg

SEQ ID NO: 208935 - DNA, 25 bp, SARS Virus
ctaacgcgaatagcgtgtagtacgt

SEQ ID NO: 208936 - DNA, 25 bp, SARS Virus
taacgcgaatatggtgtagtacgtt

SEQ ID NO: 208937 - DNA, 25 bp, SARS Virus
aacgcgaatatcgtgtagtacgttc

SEQ ID NO: 208938 - DNA, 25 bp, SARS Virus
acgcgaatatcgggtagtacgttca

SEQ ID NO: 208939 - DNA, 25 bp, SARS Virus
cgcgaatatcgtgtagtacgttcag

SEQ ID NO: 208940 - DNA, 25 bp, SARS Virus
gcgaatatcgtggagtacgttcagc

SEQ ID NO: 208941 - DNA, 25 bp, SARS Virus
cgaatatcgtgtggtacgttcagct

SEQ ID NO: 208942 - DNA, 25 bp, SARS Virus
gaatatcgtgtagtacgttcagctt

SEQ ID NO: 208943 - DNA, 25 bp, SARS Virus
aatatcgtgtaggacgttcagcttc

SEQ ID NO: 208944 - DNA, 25 bp, SARS Virus
atatcgtgtagtgcgttcagcttct

SEQ ID NO: 208945 - DNA, 25 bp, SARS Virus
tatcgtgtagtaggttcagcttctc

SEQ ID NO: 208946 - DNA, 25 bp, SARS Virus
atcgtgtagtacgttcagcttctcc

SEQ ID NO: 208947 - DNA, 25 bp, SARS Virus
tcgtgtagtacggtcagcttctcca

SEQ ID NO: 208948 - DNA, 25 bp, SARS Virus
cgtgtagtacgtgcagcttctccac

SEQ ID NO: 208949 - DNA, 25 bp, SARS Virus
gtgtagtacgttgagcttctccacg

SEQ ID NO: 208950 - DNA, 25 bp, SARS Virus
tgtagtacgttcggcttctccacgt

SEQ ID NO: 208951 - DNA, 25 bp, SARS Virus
gtagtacgttcagcttctccacgtt

SEQ ID NO: 208952 - DNA, 25 bp, SARS Virus
tagtacgttcaggttctccacgttg

SEQ ID NO: 208953 - DNA, 25 bp, SARS Virus
agtacgttcagcgtctccacgttgg

SEQ ID NO: 208954 - DNA, 25 bp, SARS Virus
gtacgttcagctgctccacgttggt

SEQ ID NO: 208955 - DNA, 25 bp, SARS Virus
tacgttcagcttgtccacgttggta

SEQ ID NO: 208956 - DNA, 25 bp, SARS Virus
acgttcagcttcgccacgttggtag

SEQ ID NO: 208957 - DNA, 25 bp, SARS Virus
cgttcagcttctgcacgttggtagg

SEQ ID NO: 208958 - DNA, 25 bp, SARS Virus
gttcagcttctcgacgttggtaggt

SEQ ID NO: 208959 - DNA, 25 bp, SARS Virus
ttcagcttctccgcgttggtaggta

SEQ ID NO: 208960 - DNA, 25 bp, SARS Virus
tcagcttctccaggttggtaggtac

SEQ ID NO: 208961 - DNA, 25 bp, SARS Virus
cagcttctccacgttggtaggtact

SEQ ID NO: 208962 - DNA, 25 bp, SARS Virus
agcttctccacggtggtaggtacta

SEQ ID NO: 208963 - DNA, 25 bp, SARS Virus
gcttctccacgtgggtaggtactat

SEQ ID NO: 208964 - DNA, 25 bp, SARS Virus
cttctccacgttggtaggtactata

SEQ ID NO: 208965 - DNA, 25 bp, SARS Virus
ttctccacgttggtaggtactatac

SEQ ID NO: 208966 - DNA, 25 bp, SARS Virus
tctccacgttgggaggtactatact

SEQ ID NO: 208967 - DNA, 25 bp, SARS Virus
ctccacgttggtgggtactatactt

SEQ ID NO: 208968 - DNA, 25 bp, SARS Virus
tccacgttggtaggtactatacttg

SEQ ID NO: 208969 - DNA, 25 bp, SARS Virus
ccacgttggtaggtactatacttgt

SEQ ID NO: 208970 - DNA, 25 bp, SARS Virus
cacgttggtagggactatacttgta

SEQ ID NO: 208971 - DNA, 25 bp, SARS Virus
acgttggtaggtgctatacttgtat

SEQ ID NO: 208972 - DNA, 25 bp, SARS Virus
cgttggtaggtagtatacttgtatc

SEQ ID NO: 208973 - DNA, 25 bp, SARS Virus
gttggtaggtacgatacttgtatcg

SEQ ID NO: 208974 - DNA, 25 bp, SARS Virus
ttggtaggtactgtacttgtatcga

SEQ ID NO: 208975 - DNA, 25 bp, SARS Virus
tggtaggtactagacttgtatcgag

SEQ ID NO: 208976 - DNA, 25 bp, SARS Virus
ggtaggtactatgcttgtatcgaga

SEQ ID NO: 208977 - DNA, 25 bp, SARS Virus
gtaggtactatagttgtatcgagaa

SEQ ID NO: 208978 - DNA, 25 bp, SARS Virus
taggtactatacgtgtatcgagaag

SEQ ID NO: 208979 - DNA, 25 bp, SARS Virus
aggtactatactggtatcgagaagg

SEQ ID NO: 208980 - DNA, 25 bp, SARS Virus
ggtactatacttgtatcgagaaggt

SEQ ID NO: 208981 - DNA, 25 bp, SARS Virus
gtactatacttggatcgagaaggta

SEQ ID NO: 208982 - DNA, 25 bp, SARS Virus
tactatacttgtgtcgagaaggtat

SEQ ID NO: 208983 - DNA, 25 bp, SARS Virus
actatacttgtagcgagaaggtata

SEQ ID NO: 208984 - DNA, 25 bp, SARS Virus
ctatacttgtatggagaaggtatac

SEQ ID NO: 208985 - DNA, 25 bp, SARS Virus
tatacttgtatcgagaaggtataca

SEQ ID NO: 208986 - DNA, 25 bp, SARS Virus
atacttgtatcgggaaggtatacat

SEQ ID NO: 208987 - DNA, 25 bp, SARS Virus
tacttgtatcgagaaggtatacatc

SEQ ID NO: 208988 - DNA, 25 bp, SARS Virus
acttgtatcgaggaggtatacatca

SEQ ID NO: 208989 - DNA, 25 bp, SARS Virus
cttgtatcgagagggtatacatcat

SEQ ID NO: 208990 - DNA, 25 bp, SARS Virus
ttgtatcgagaaggtatacatcatc

SEQ ID NO: 208991 - DNA, 25 bp, SARS Virus
tgtatcgagaaggtatacatcatct

SEQ ID NO: 208992 - DNA, 25 bp, SARS Virus
gtatcgagaagggatacatcatctt

SEQ ID NO: 208993 - DNA, 25 bp, SARS Virus
tatcgagaaggtgtacatcatcttt

SEQ ID NO: 208994 - DNA, 25 bp, SARS Virus
atcgagaaggtagacatcatctttc

SEQ ID NO: 208995 - DNA, 25 bp, SARS Virus
tcgagaaggtatgcatcatctttct

SEQ ID NO: 208996 - DNA, 25 bp, SARS Virus
cgagaaggtatagatcatctttctt

SEQ ID NO: 208997 - DNA, 25 bp, SARS Virus
gagaaggtatacgtcatctttcttc

SEQ ID NO: 208998 - DNA, 25 bp, SARS Virus
agaaggtatacagcatctttcttcg

SEQ ID NO: 208999 - DNA, 25 bp, SARS Virus
gaaggtatacatgatctttcttcgt

SEQ ID NO: 209000 - DNA, 25 bp, SARS Virus
aaggtatacatcgtctttcttcgtt

SEQ ID NO: 209001 - DNA, 25 bp, SARS Virus
aggtatacatcagctttcttcgttt

SEQ ID NO: 209002 - DNA, 25 bp, SARS Virus
ggtatacatcatgtttcttcgtttc

SEQ ID NO: 209003 - DNA, 25 bp, SARS Virus
gtatacatcatcgttcttcgtttct

SEQ ID NO: 209004 - DNA, 25 bp, SARS Virus
tatacatcatctgtcttcgtttctt

SEQ ID NO: 209005 - DNA, 25 bp, SARS Virus
atacatcatcttgcttcgtttcttc

SEQ ID NO: 209006 - DNA, 25 bp, SARS Virus
tacatcatctttgttcgtttcttct

SEQ ID NO: 209007 - DNA, 25 bp, SARS Virus
acatcatctttcgtcgtttcttcta

SEQ ID NO: 209008 - DNA, 25 bp, SARS Virus
catcatctttctgcgtttcttctac

SEQ ID NO: 209009 - DNA, 25 bp, SARS Virus
atcatctttcttggtttcttctaca

SEQ ID NO: 209010 - DNA, 25 bp, SARS Virus
tcatctttcttcgtttcttctacat

SEQ ID NO: 209011 - DNA, 25 bp, SARS Virus
catctttcttcggttcttctacatg

SEQ ID NO: 209012 - DNA, 25 bp, SARS Virus
atctttcttcgtgtcttctacatgt

SEQ ID NO: 209013 - DNA, 25 bp, SARS Virus
tctttcttcgttgcttctacatgta

SEQ ID NO: 209014 - DNA, 25 bp, SARS Virus
ctttcttcgtttgttctacatgtag

SEQ ID NO: 209015 - DNA, 25 bp, SARS Virus
tttcttcgtttcgtctacatgtagg

SEQ ID NO: 209016 - DNA, 25 bp, SARS Virus
ttcttcgtttctgctacatgtagga

SEQ ID NO: 209017 - DNA, 25 bp, SARS Virus
tcttcgtttcttgtacatgtaggat

SEQ ID NO: 209018 - DNA, 25 bp, SARS Virus
cttcgtttcttcgacatgtaggatt

SEQ ID NO: 209019 - DNA, 25 bp, SARS Virus
ttcgtttcttctgcatgtaggattg

SEQ ID NO: 209020 - DNA, 25 bp, SARS Virus
tcgtttcttctagatgtaggattgg

SEQ ID NO: 209021 - DNA, 25 bp, SARS Virus
cgtttcttctacgtgtaggattggt

SEQ ID NO: 209022 - DNA, 25 bp, SARS Virus
gtttcttctacaggtaggattggta

SEQ ID NO: 209023 - DNA, 25 bp, SARS Virus
tttcttctacatgtaggattggtaa

SEQ ID NO: 209024 - DNA, 25 bp, SARS Virus
ttcttctacatggaggattggtaac

SEQ ID NO: 209025 - DNA, 25 bp, SARS Virus
tcttctacatgtgggattggtaacg

SEQ ID NO: 209026 - DNA, 25 bp, SARS Virus
cttctacatgtaggattggtaacgt

SEQ ID NO: 209027 - DNA, 25 bp, SARS Virus
ttctacatgtaggattggtaacgtc

SEQ ID NO: 209028 - DNA, 25 bp, SARS Virus
tctacatgtagggttggtaacgtct

SEQ ID NO: 209029 - DNA, 25 bp, SARS Virus
ctacatgtaggagtggtaacgtctt

SEQ ID NO: 209030 - DNA, 25 bp, SARS Virus
tacatgtaggatgggtaacgtcttt

SEQ ID NO: 209031 - DNA, 25 bp, SARS Virus
acatgtaggattggtaacgtctttg

SEQ ID NO: 209032 - DNA, 25 bp, SARS Virus
catgtaggattggtaacgtctttgc

SEQ ID NO: 209033 - DNA, 25 bp, SARS Virus
atgtaggattgggaacgtctttgcc

SEQ ID NO: 209034 - DNA, 25 bp, SARS Virus
tgtaggattggtgacgtctttgccc

SEQ ID NO: 209035 - DNA, 25 bp, SARS Virus
gtaggattggtagcgtctttgccca

SEQ ID NO: 209036 - DNA, 25 bp, SARS Virus
taggattggtaaggtctttgcccac

SEQ ID NO: 209037 - DNA, 25 bp, SARS Virus
aggattggtaacgtctttgcccacg

SEQ ID NO: 209038 - DNA, 25 bp, SARS Virus
ggattggtaacggctttgcccacgg

SEQ ID NO: 209039 - DNA, 25 bp, SARS Virus
gattggtaacgtgtttgcccacggt

SEQ ID NO: 209040 - DNA, 25 bp, SARS Virus
attggtaacgtcgttgcccacggta

SEQ ID NO: 209041 - DNA, 25 bp, SARS Virus
ttggtaacgtctgtgcccacggtaa

SEQ ID NO: 209042 - DNA, 25 bp, SARS Virus
tggtaacgtcttggcccacggtaaa

SEQ ID NO: 209043 - DNA, 25 bp, SARS Virus
ggtaacgtctttgcccacggtaaac

SEQ ID NO: 209044 - DNA, 25 bp, SARS Virus
gtaacgtctttggccacggtaaaca

SEQ ID NO: 209045 - DNA, 25 bp, SARS Virus
taacgtctttgcgcacggtaaacat

SEQ ID NO: 209046 - DNA, 25 bp, SARS Virus
aacgtctttgccgacggtaaacatg

SEQ ID NO: 209047 - DNA, 25 bp, SARS Virus
acgtctttgcccgcggtaaacatgt

SEQ ID NO: 209048 - DNA, 25 bp, SARS Virus
cgtctttgcccagggtaaacatgtt

SEQ ID NO: 209049 - DNA, 25 bp, SARS Virus
gtctttgcccacggtaaacatgtta

SEQ ID NO: 209050 - DNA, 25 bp, SARS Virus
tctttgcccacggtaaacatgttat

SEQ ID NO: 209051 - DNA, 25 bp, SARS Virus
ctttgcccacgggaaacatgttatg

SEQ ID NO: 209052 - DNA, 25 bp, SARS Virus
tttgcccacggtgaacatgttatga

SEQ ID NO: 209053 - DNA, 25 bp, SARS Virus
ttgcccacggtagacatgttatgat

SEQ ID NO: 209054 - DNA, 25 bp, SARS Virus
tgcccacggtaagcatgttatgatt

SEQ ID NO: 209055 - DNA, 25 bp, SARS Virus
gcccacggtaaagatgttatgatta

SEQ ID NO: 209056 - DNA, 25 bp, SARS Virus
cccacggtaaacgtgttatgattac

SEQ ID NO: 209057 - DNA, 25 bp, SARS Virus
ccacggtaaacaggttatgattact

SEQ ID NO: 209058 - DNA, 25 bp, SARS Virus
cacggtaaacatgttatgattacta

SEQ ID NO: 209059 - DNA, 25 bp, SARS Virus
acggtaaacatggtatgattactat

SEQ ID NO: 209060 - DNA, 25 bp, SARS Virus
cggtaaacatgtgatgattactatt

SEQ ID NO: 209061 - DNA, 25 bp, SARS Virus
ggtaaacatgttgtgattactattt

SEQ ID NO: 209062 - DNA, 25 bp, SARS Virus
gtaaacatgttaggattactatttg

SEQ ID NO: 209063 - DNA, 25 bp, SARS Virus
taaacatgttatgattactatttgg

SEQ ID NO: 209064 - DNA, 25 bp, SARS Virus
aaacatgttatggttactatttggt

SEQ ID NO: 209065 - DNA, 25 bp, SARS Virus
aacatgttatgagtactatttggtg

SEQ ID NO: 209066 - DNA, 25 bp, SARS Virus
acatgttatgatgactatttggtgt

SEQ ID NO: 209067 - DNA, 25 bp, SARS Virus
catgttatgattgctatttggtgta

SEQ ID NO: 209068 - DNA, 25 bp, SARS Virus
atgttatgattagtatttggtgtac

SEQ ID NO: 209069 - DNA, 25 bp, SARS Virus
tgttatgattacgatttggtgtact

SEQ ID NO: 209070 - DNA, 25 bp, SARS Virus
gttatgattactgtttggtgtactc

SEQ ID NO: 209071 - DNA, 25 bp, SARS Virus
ttatgattactagttggtgtactcg

SEQ ID NO: 209072 - DNA, 25 bp, SARS Virus
tatgattactatgtggtgtactcgg

SEQ ID NO: 209073 - DNA, 25 bp, SARS Virus
atgattactattgggtgtactcggt

SEQ ID NO: 209074 - DNA, 25 bp, SARS Virus
tgattactatttggtgtactcggtt

SEQ ID NO: 209075 - DNA, 25 bp, SARS Virus
gattactatttggtgtactcggttc

SEQ ID NO: 209076 - DNA, 25 bp, SARS Virus
attactatttggggtactcggttct

SEQ ID NO: 209077 - DNA, 25 bp, SARS Virus
ttactatttggtgtactcggttctt

SEQ ID NO: 209078 - DNA, 25 bp, SARS Virus
tactatttggtggactcggttctta

SEQ ID NO: 209079 - DNA, 25 bp, SARS Virus
actatttggtgtgctcggttcttaa

SEQ ID NO: 209080 - DNA, 25 bp, SARS Virus
ctatttggtgtagtcggttcttaac

SEQ ID NO: 209081 - DNA, 25 bp, SARS Virus
tatttggtgtacgcggttcttaacg

SEQ ID NO: 209082 - DNA, 25 bp, SARS Virus
atttggtgtactgggttcttaacga

SEQ ID NO: 209083 - DNA, 25 bp, SARS Virus
tttggtgtactcggttcttaacgac

SEQ ID NO: 209084 - DNA, 25 bp, SARS Virus
ttggtgtactcggttcttaacgact

SEQ ID NO: 209085 - DNA, 25 bp, SARS Virus
tggtgtactcgggtcttaacgacta

SEQ ID NO: 209086 - DNA, 25 bp, SARS Virus
ggtgtactcggtgcttaacgactac

SEQ ID NO: 209087 - DNA, 25 bp, SARS Virus
gtgtactcggttgttaacgactact

SEQ ID NO: 209088 - DNA, 25 bp, SARS Virus
tgtactcggttcgtaacgactactt

SEQ ID NO: 209089 - DNA, 25 bp, SARS Virus
gtactcggttctgaacgactacttt

SEQ ID NO: 209090 - DNA, 25 bp, SARS Virus
tactcggttcttgacgactacttta

SEQ ID NO: 209091 - DNA, 25 bp, SARS Virus
actcggttcttagcgactactttac

SEQ ID NO: 209092 - DNA, 25 bp, SARS Virus
ctcggttcttaaggactactttact

SEQ ID NO: 209093 - DNA, 25 bp, SARS Virus
tcggttcttaacgactactttactg

SEQ ID NO: 209094 - DNA, 25 bp, SARS Virus
cggttcttaacggctactttactga

SEQ ID NO: 209095 - DNA, 25 bp, SARS Virus
ggttcttaacgagtactttactgat

SEQ ID NO: 209096 - DNA, 25 bp, SARS Virus
gttcttaacgacgactttactgatc

SEQ ID NO: 209097 - DNA, 25 bp, SARS Virus
ttcttaacgactgctttactgatcg

SEQ ID NO: 209098 - DNA, 25 bp, SARS Virus
tcttaacgactagtttactgatcgt

SEQ ID NO: 209099 - DNA, 25 bp, SARS Virus
cttaacgactacgttactgatcgtt

SEQ ID NO: 209100 - DNA, 25 bp, SARS Virus
ttaacgactactgtactgatcgttt

SEQ ID NO: 209101 - DNA, 25 bp, SARS Virus
taacgactacttgactgatcgtttt

SEQ ID NO: 209102 - DNA, 25 bp, SARS Virus
aacgactactttgctgatcgtttta

SEQ ID NO: 209103 - DNA, 25 bp, SARS Virus
acgactactttagtgatcgttttat

SEQ ID NO: 209104 - DNA, 25 bp, SARS Virus
cgactactttacggatcgttttatc

SEQ ID NO: 209105 - DNA, 25 bp, SARS Virus
gactactttactgatcgttttatcg

SEQ ID NO: 209106 - DNA, 25 bp, SARS Virus
actactttactggtcgttttatcgg

SEQ ID NO: 209107 - DNA, 25 bp, SARS Virus
ctactttactgagcgttttatcggt

SEQ ID NO: 209108 - DNA, 25 bp, SARS Virus
tactttactgatggttttatcggtt

SEQ ID NO: 209109 - DNA, 25 bp, SARS Virus
actttactgatcgttttatcggttt

SEQ ID NO: 209110 - DNA, 25 bp, SARS Virus
ctttactgatcggtttatcggtttc

SEQ ID NO: 209111 - DNA, 25 bp, SARS Virus
tttactgatcgtgttatcggtttct

SEQ ID NO: 209112 - DNA, 25 bp, SARS Virus
ttactgatcgttgtatcggtttctt

SEQ ID NO: 209113 - DNA, 25 bp, SARS Virus
tactgatcgtttgatcggtttcttg

SEQ ID NO: 209114 - DNA, 25 bp, SARS Virus
actgatcgttttgtcggtttcttgt

SEQ ID NO: 209115 - DNA, 25 bp, SARS Virus
ctgatcgttttagcggtttcttgtg

SEQ ID NO: 209116 - DNA, 25 bp, SARS Virus
tgatcgttttatgggtttcttgtgg

SEQ ID NO: 209117 - DNA, 25 bp, SARS Virus
gatcgttttatcggtttcttgtgga

SEQ ID NO: 209118 - DNA, 25 bp, SARS Virus
atcgttttatcggtttcttgtggac

SEQ ID NO: 209119 - DNA, 25 bp, SARS Virus
tcgttttatcgggttcttgtggacg

SEQ ID NO: 209120 - DNA, 25 bp, SARS Virus
cgttttatcggtgtcttgtggacgt

SEQ ID NO: 209121 - DNA, 25 bp, SARS Virus
gttttatcggttgcttgtggacgta

SEQ ID NO: 209122 - DNA, 25 bp, SARS Virus
ttttatcggtttgttgtggacgtaa

SEQ ID NO: 209123 - DNA, 25 bp, SARS Virus
tttatcggtttcgtgtggacgtaat

SEQ ID NO: 209124 - DNA, 25 bp, SARS Virus
ttatcggtttctggtggacgtaata

SEQ ID NO: 209125 - DNA, 25 bp, SARS Virus
tatcggtttcttgtggacgtaatat

SEQ ID NO: 209126 - DNA, 25 bp, SARS Virus
atcggtttcttggggacgtaatatc

SEQ ID NO: 209127 - DNA, 25 bp, SARS Virus
tcggtttcttgtggacgtaatatcg

SEQ ID NO: 209128 - DNA, 25 bp, SARS Virus
cggtttcttgtggacgtaatatcga

SEQ ID NO: 209129 - DNA, 25 bp, SARS Virus
ggtttcttgtgggcgtaatatcgac

SEQ ID NO: 209130 - DNA, 25 bp, SARS Virus
gtttcttgtggaggtaatatcgact

SEQ ID NO: 209131 - DNA, 25 bp, SARS Virus
tttcttgtggacgtaatatcgactt

SEQ ID NO: 209132 - DNA, 25 bp, SARS Virus
ttcttgtggacggaatatcgacttt

SEQ ID NO: 209133 - DNA, 25 bp, SARS Virus
tcttgtggacgtgatatcgactttc

SEQ ID NO: 209134 - DNA, 25 bp, SARS Virus
cttgtggacgtagtatcgactttct

SEQ ID NO: 209135 - DNA, 25 bp, SARS Virus
ttgtggacgtaagatcgactttctg

SEQ ID NO: 209136 - DNA, 25 bp, SARS Virus
tgtggacgtaatgtcgactttctgg

SEQ ID NO: 209137 - DNA, 25 bp, SARS Virus
gtggacgtaatagcgactttctgga

SEQ ID NO: 209138 - DNA, 25 bp, SARS Virus
tggacgtaatatggactttctggat

SEQ ID NO: 209139 - DNA, 25 bp, SARS Virus
ggacgtaatatcgactttctggatt

SEQ ID NO: 209140 - DNA, 25 bp, SARS Virus
gacgtaatatcggctttctggatta

SEQ ID NO: 209141 - DNA, 25 bp, SARS Virus
acgtaatatcgagtttctggattat

SEQ ID NO: 209142 - DNA, 25 bp, SARS Virus
cgtaatatcgacgttctggattatt

SEQ ID NO: 209143 - DNA, 25 bp, SARS Virus
gtaatatcgactgtctggattattt

SEQ ID NO: 209144 - DNA, 25 bp, SARS Virus
taatatcgacttgctggattattta

SEQ ID NO: 209145 - DNA, 25 bp, SARS Virus
aatatcgactttgtggattatttat

SEQ ID NO: 209146 - DNA, 25 bp, SARS Virus
atatcgactttcgggattatttatt

SEQ ID NO: 209147 - DNA, 25 bp, SARS Virus
tatcgactttctggattatttattt

SEQ ID NO: 209148 - DNA, 25 bp, SARS Virus
atcgactttctggattatttatttt

SEQ ID NO: 209149 - DNA, 25 bp, SARS Virus
tcgactttctgggttatttattttc

SEQ ID NO: 209150 - DNA, 25 bp, SARS Virus
cgactttctggagtatttattttct

SEQ ID NO: 209151 - DNA, 25 bp, SARS Virus
gactttctggatgatttattttctt

SEQ ID NO: 209152 - DNA, 25 bp, SARS Virus
actttctggattgtttattttctta

SEQ ID NO: 209153 - DNA, 25 bp, SARS Virus
ctttctggattagttattttcttaa

SEQ ID NO: 209154 - DNA, 25 bp, SARS Virus
tttctggattatgtattttcttaaa

SEQ ID NO: 209155 - DNA, 25 bp, SARS Virus
ttctggattattgattttcttaaaa

SEQ ID NO: 209156 - DNA, 25 bp, SARS Virus
tctggattatttgttttcttaaaac

SEQ ID NO: 209157 - DNA, 25 bp, SARS Virus
ctggattatttagtttcttaaaaca

SEQ ID NO: 209158 - DNA, 25 bp, SARS Virus
tggattatttatgttcttaaaacac

SEQ ID NO: 209159 - DNA, 25 bp, SARS Virus
ggattatttattgtcttaaaacact

SEQ ID NO: 209160 - DNA, 25 bp, SARS Virus
gattatttatttgcttaaaacactt

SEQ ID NO: 209161 - DNA, 25 bp, SARS Virus
attatttattttgttaaaacacttg

SEQ ID NO: 209162 - DNA, 25 bp, SARS Virus
ttatttattttcgtaaaacacttgt

SEQ ID NO: 209163 - DNA, 25 bp, SARS Virus
tatttattttctgaaaacacttgtt

SEQ ID NO: 209164 - DNA, 25 bp, SARS Virus
atttattttcttgaaacacttgttg

SEQ ID NO: 209165 - DNA, 25 bp, SARS Virus
tttattttcttagaacacttgttgt

SEQ ID NO: 209166 - DNA, 25 bp, SARS Virus
ttattttcttaagacacttgttgta

SEQ ID NO: 209167 - DNA, 25 bp, SARS Virus
tattttcttaaagcacttgttgtat

SEQ ID NO: 209168 - DNA, 25 bp, SARS Virus
attttcttaaaagacttgttgtata

SEQ ID NO: 209169 - DNA, 25 bp, SARS Virus
ttttcttaaaacgcttgttgtatat

SEQ ID NO: 209170 - DNA, 25 bp, SARS Virus
tttcttaaaacagttgttgtatata

SEQ ID NO: 209171 - DNA, 25 bp, SARS Virus
ttcttaaaacacgtgttgtatatac

SEQ ID NO: 209172 - DNA, 25 bp, SARS Virus
tcttaaaacactggttgtatatacg

SEQ ID NO: 209173 - DNA, 25 bp, SARS Virus
cttaaaacacttgttgtatatacgg

SEQ ID NO: 209174 - DNA, 25 bp, SARS Virus
ttaaaacacttggtgtatatacggt

SEQ ID NO: 209175 - DNA, 25 bp, SARS Virus
taaaacacttgtggtatatacggtt

SEQ ID NO: 209176 - DNA, 25 bp, SARS Virus
aaaacacttgttgtatatacggttt

SEQ ID NO: 209177 - DNA, 25 bp, SARS Virus
aaacacttgttggatatacggtttt

SEQ ID NO: 209178 - DNA, 25 bp, SARS Virus
aacacttgttgtgtatacggttttg

SEQ ID NO: 209179 - DNA, 25 bp, SARS Virus
acacttgttgtagatacggttttgg

SEQ ID NO: 209180 - DNA, 25 bp, SARS Virus
cacttgttgtatgtacggttttggg

SEQ ID NO: 209181 - DNA, 25 bp, SARS Virus
acttgttgtatagacggttttgggt

SEQ ID NO: 209182 - DNA, 25 bp, SARS Virus
cttgttgtatatgcggttttgggtg

SEQ ID NO: 209183 - DNA, 25 bp, SARS Virus
ttgttgtatatagggttttgggtga

SEQ ID NO: 209184 - DNA, 25 bp, SARS Virus
tgttgtatatacggttttgggtgag

SEQ ID NO: 209185 - DNA, 25 bp, SARS Virus
gttgtatatacggttttgggtgagt

SEQ ID NO: 209186 - DNA, 25 bp, SARS Virus
ttgtatatacgggtttgggtgagtc

SEQ ID NO: 209187 - DNA, 25 bp, SARS Virus
tgtatatacggtgttgggtgagtcg

SEQ ID NO: 209188 - DNA, 25 bp, SARS Virus
gtatatacggttgtgggtgagtcgc

SEQ ID NO: 209189 - DNA, 25 bp, SARS Virus
tatatacggtttggggtgagtcgcc

SEQ ID NO: 209190 - DNA, 25 bp, SARS Virus
atatacggttttgggtgagtcgccg

SEQ ID NO: 209191 - DNA, 25 bp, SARS Virus
tatacggttttgggtgagtcgccgg

SEQ ID NO: 209192 - DNA, 25 bp, SARS Virus
atacggttttgggtgagtcgccggt

SEQ ID NO: 209193 - DNA, 25 bp, SARS Virus
tacggttttgggggagtcgccggtc

SEQ ID NO: 209194 - DNA, 25 bp, SARS Virus
acggttttgggtgagtcgccggtct

SEQ ID NO: 209195 - DNA, 25 bp, SARS Virus
cggttttgggtgggtcgccggtctg

SEQ ID NO: 209196 - DNA, 25 bp, SARS Virus
ggttttgggtgagtcgccggtctgg

SEQ ID NO: 209197 - DNA, 25 bp, SARS Virus
gttttgggtgaggcgccggtctgga

SEQ ID NO: 209198 - DNA, 25 bp, SARS Virus
ttttgggtgagtggccggtctggat

SEQ ID NO: 209199 - DNA, 25 bp, SARS Virus
tttgggtgagtcgccggtctggatt

SEQ ID NO: 209200 - DNA, 25 bp, SARS Virus
ttgggtgagtcggcggtctggattt

SEQ ID NO: 209201 - DNA, 25 bp, SARS Virus
tgggtgagtcgcgggtctggatttt

SEQ ID NO: 209202 - DNA, 25 bp, SARS Virus
gggtgagtcgccggtctggatttta

SEQ ID NO: 209203 - DNA, 25 bp, SARS Virus
ggtgagtcgccggtctggattttaa

SEQ ID NO: 209204 - DNA, 25 bp, SARS Virus
gtgagtcgccgggctggattttaac

SEQ ID NO: 209205 - DNA, 25 bp, SARS Virus
tgagtcgccggtgtggattttaaca

SEQ ID NO: 209206 - DNA, 25 bp, SARS Virus
gagtcgccggtcgggattttaacag

SEQ ID NO: 209207 - DNA, 25 bp, SARS Virus
agtcgccggtctggattttaacagt

SEQ ID NO: 209208 - DNA, 25 bp, SARS Virus
gtcgccggtctggattttaacagtt

SEQ ID NO: 209209 - DNA, 25 bp, SARS Virus
tcgccggtctgggttttaacagttc

SEQ ID NO: 209210 - DNA, 25 bp, SARS Virus
cgccggtctggagtttaacagttca

SEQ ID NO: 209211 - DNA, 25 bp, SARS Virus
gccggtctggatgttaacagttcag

SEQ ID NO: 209212 - DNA, 25 bp, SARS Virus
ccggtctggattgtaacagttcaga

SEQ ID NO: 209213 - DNA, 25 bp, SARS Virus
cggtctggatttgaacagttcagat

SEQ ID NO: 209214 - DNA, 25 bp, SARS Virus
ggtctggattttgacagttcagatc

SEQ ID NO: 209215 - DNA, 25 bp, SARS Virus
gtctggattttagcagttcagatcg

SEQ ID NO: 209216 - DNA, 25 bp, SARS Virus
tctggattttaagagttcagatcga

SEQ ID NO: 209217 - DNA, 25 bp, SARS Virus
ctggattttaacggttcagatcgaa

SEQ ID NO: 209218 - DNA, 25 bp, SARS Virus
tggattttaacagttcagatcgaac

SEQ ID NO: 209219 - DNA, 25 bp, SARS Virus
ggattttaacaggtcagatcgaaca

SEQ ID NO: 209220 - DNA, 25 bp, SARS Virus
gattttaacagtgcagatcgaacat

SEQ ID NO: 209221 - DNA, 25 bp, SARS Virus
attttaacagttgagatcgaacatg

SEQ ID NO: 209222 - DNA, 25 bp, SARS Virus
ttttaacagttcggatcgaacatgc

SEQ ID NO: 209223 - DNA, 25 bp, SARS Virus
tttaacagttcagatcgaacatgct

SEQ ID NO: 209224 - DNA, 25 bp, SARS Virus
ttaacagttcaggtcgaacatgcta

SEQ ID NO: 209225 - DNA, 25 bp, SARS Virus
taacagttcagagcgaacatgctac

SEQ ID NO: 209226 - DNA, 25 bp, SARS Virus
aacagttcagatggaacatgctact

SEQ ID NO: 209227 - DNA, 25 bp, SARS Virus
acagttcagatcgaacatgctactt

SEQ ID NO: 209228 - DNA, 25 bp, SARS Virus
cagttcagatcggacatgctacttt

SEQ ID NO: 209229 - DNA, 25 bp, SARS Virus
agttcagatcgagcatgctacttta

SEQ ID NO: 209230 - DNA, 25 bp, SARS Virus
gttcagatcgaagatgctactttag

SEQ ID NO: 209231 - DNA, 25 bp, SARS Virus
ttcagatcgaacgtgctactttagc

SEQ ID NO: 209232 - DNA, 25 bp, SARS Virus
tcagatcgaacaggctactttagca

SEQ ID NO: 209233 - DNA, 25 bp, SARS Virus
cagatcgaacatgctactttagcag

SEQ ID NO: 209234 - DNA, 25 bp, SARS Virus
agatcgaacatggtactttagcagt

SEQ ID NO: 209235 - DNA, 25 bp, SARS Virus
gatcgaacatgcgactttagcagtg

SEQ ID NO: 209236 - DNA, 25 bp, SARS Virus
atcgaacatgctgctttagcagtgg

SEQ ID NO: 209237 - DNA, 25 bp, SARS Virus
tcgaacatgctagtttagcagtgga

SEQ ID NO: 209238 - DNA, 25 bp, SARS Virus
cgaacatgctacgttagcagtggac

SEQ ID NO: 209239 - DNA, 25 bp, SARS Virus
gaacatgctactgtagcagtggact

SEQ ID NO: 209240 - DNA, 25 bp, SARS Virus
aacatgctacttgagcagtggactt

SEQ ID NO: 209241 - DNA, 25 bp, SARS Virus
acatgctactttggcagtggactta

SEQ ID NO: 209242 - DNA, 25 bp, SARS Virus
catgctactttagcagtggacttac

SEQ ID NO: 209243 - DNA, 25 bp, SARS Virus
atgctactttaggagtggacttacc

SEQ ID NO: 209244 - DNA, 25 bp, SARS Virus
tgctactttagcggtggacttacca

SEQ ID NO: 209245 - DNA, 25 bp, SARS Virus
gctactttagcagtggacttaccaa

SEQ ID NO: 209246 - DNA, 25 bp, SARS Virus
ctactttagcaggggacttaccaaa

SEQ ID NO: 209247 - DNA, 25 bp, SARS Virus
tactttagcagtggacttaccaaag

SEQ ID NO: 209248 - DNA, 25 bp, SARS Virus
actttagcagtggacttaccaaagt

SEQ ID NO: 209249 - DNA, 25 bp, SARS Virus
ctttagcagtgggcttaccaaagtt

SEQ ID NO: 209250 - DNA, 25 bp, SARS Virus
tttagcagtggagttaccaaagttc

SEQ ID NO: 209251 - DNA, 25 bp, SARS Virus
ttagcagtggacgtaccaaagttct

SEQ ID NO: 209252 - DNA, 25 bp, SARS Virus
tagcagtggactgaccaaagttctc

SEQ ID NO: 209253 - DNA, 25 bp, SARS Virus
agcagtggacttgccaaagttctcg

SEQ ID NO: 209254 - DNA, 25 bp, SARS Virus
gcagtggacttagcaaagttctcga

SEQ ID NO: 209255 - DNA, 25 bp, SARS Virus
cagtggacttacgaaagttctcgac

SEQ ID NO: 209256 - DNA, 25 bp, SARS Virus
agtggacttaccgaagttctcgacc

SEQ ID NO: 209257 - DNA, 25 bp, SARS Virus
gtggacttaccagagttctcgacct

SEQ ID NO: 209258 - DNA, 25 bp, SARS Virus
tggacttaccaaggttctcgaccta

SEQ ID NO: 209259 - DNA, 25 bp, SARS Virus
ggacttaccaaagttctcgacctat

SEQ ID NO: 209260 - DNA, 25 bp, SARS Virus
gacttaccaaaggtctcgacctatt

SEQ ID NO: 209261 - DNA, 25 bp, SARS Virus
acttaccaaagtgctcgacctattc

SEQ ID NO: 209262 - DNA, 25 bp, SARS Virus
cttaccaaagttgtcgacctattct

SEQ ID NO: 209263 - DNA, 25 bp, SARS Virus
ttaccaaagttcgcgacctattctt

SEQ ID NO: 209264 - DNA, 25 bp, SARS Virus
taccaaagttctggacctattctta

SEQ ID NO: 209265 - DNA, 25 bp, SARS Virus
accaaagttctcgacctattcttag

SEQ ID NO: 209266 - DNA, 25 bp, SARS Virus
ccaaagttctcggcctattcttagt

SEQ ID NO: 209267 - DNA, 25 bp, SARS Virus
caaagttctcgagctattcttagtt

SEQ ID NO: 209268 - DNA, 25 bp, SARS Virus
aaagttctcgacgtattcttagttc

SEQ ID NO: 209269 - DNA, 25 bp, SARS Virus
aagttctcgaccgattcttagttcc

SEQ ID NO: 209270 - DNA, 25 bp, SARS Virus
agttctcgacctgttcttagttccc

SEQ ID NO: 209271 - DNA, 25 bp, SARS Virus
gttctcgacctagtcttagttccct

SEQ ID NO: 209272 - DNA, 25 bp, SARS Virus
ttctcgacctatgcttagttccctc

SEQ ID NO: 209273 - DNA, 25 bp, SARS Virus
tctcgacctattgttagttccctca

SEQ ID NO: 209274 - DNA, 25 bp, SARS Virus
ctcgacctattcgtagttccctcag

SEQ ID NO: 209275 - DNA, 25 bp, SARS Virus
tcgacctattctgagttccctcaga

SEQ ID NO: 209276 - DNA, 25 bp, SARS Virus
cgacctattcttggttccctcagat

SEQ ID NO: 209277 - DNA, 25 bp, SARS Virus
gacctattcttagttccctcagatt

SEQ ID NO: 209278 - DNA, 25 bp, SARS Virus
acctattcttaggtccctcagatta

SEQ ID NO: 209279 - DNA, 25 bp, SARS Virus
cctattcttagtgccctcagattag

SEQ ID NO: 209280 - DNA, 25 bp, SARS Virus
ctattcttagttgcctcagattagg

SEQ ID NO: 209281 - DNA, 25 bp, SARS Virus
tattcttagttcgctcagattaggt

SEQ ID NO: 209282 - DNA, 25 bp, SARS Virus
attcttagttccgtcagattaggtg

SEQ ID NO: 209283 - DNA, 25 bp, SARS Virus
ttcttagttcccgcagattaggtga

SEQ ID NO: 209284 - DNA, 25 bp, SARS Virus
tcttagttccctgagattaggtgaa

SEQ ID NO: 209285 - DNA, 25 bp, SARS Virus
cttagttccctcggattaggtgaat

SEQ ID NO: 209286 - DNA, 25 bp, SARS Virus
ttagttccctcagattaggtgaatt

SEQ ID NO: 209287 - DNA, 25 bp, SARS Virus
tagttccctcaggttaggtgaattt

SEQ ID NO: 209288 - DNA, 25 bp, SARS Virus
agttccctcagagtaggtgaatttg

SEQ ID NO: 209289 - DNA, 25 bp, SARS Virus
gttccctcagatgaggtgaatttgt

SEQ ID NO: 209290 - DNA, 25 bp, SARS Virus
ttccctcagattgggtgaatttgtt

SEQ ID NO: 209291 - DNA, 25 bp, SARS Virus
tccctcagattaggtgaatttgttt

SEQ ID NO: 209292 - DNA, 25 bp, SARS Virus
ccctcagattaggtgaatttgttta

SEQ ID NO: 209293 - DNA, 25 bp, SARS Virus
cctcagattaggggaatttgtttac

SEQ ID NO: 209294 - DNA, 25 bp, SARS Virus
ctcagattaggtgaatttgtttacg

SEQ ID NO: 209295 - DNA, 25 bp, SARS Virus
tcagattaggtggatttgtttacga

SEQ ID NO: 209296 - DNA, 25 bp, SARS Virus
cagattaggtgagtttgtttacgac

SEQ ID NO: 209297 - DNA, 25 bp, SARS Virus
agattaggtgaagttgtttacgacg

SEQ ID NO: 209298 - DNA, 25 bp, SARS Virus
gattaggtgaatgtgtttacgacgt

SEQ ID NO: 209299 - DNA, 25 bp, SARS Virus
attaggtgaattggtttacgacgtt

SEQ ID NO: 209300 - DNA, 25 bp, SARS Virus
ttaggtgaatttgtttacgacgttc

SEQ ID NO: 209301 - DNA, 25 bp, SARS Virus
taggtgaatttggttacgacgttcc

SEQ ID NO: 209302 - DNA, 25 bp, SARS Virus
aggtgaatttgtgtacgacgttcct

SEQ ID NO: 209303 - DNA, 25 bp, SARS Virus
ggtgaatttgttgacgacgttcctt

SEQ ID NO: 209304 - DNA, 25 bp, SARS Virus
gtgaatttgtttgcgacgttccttt

SEQ ID NO: 209305 - DNA, 25 bp, SARS Virus
tgaatttgtttaggacgttcctttt

SEQ ID NO: 209306 - DNA, 25 bp, SARS Virus
gaatttgtttacgacgttccttttc

SEQ ID NO: 209307 - DNA, 25 bp, SARS Virus
aatttgtttacggcgttccttttct

SEQ ID NO: 209308 - DNA, 25 bp, SARS Virus
atttgtttacgaggttccttttctt

SEQ ID NO: 209309 - DNA, 25 bp, SARS Virus
tttgtttacgacgttccttttcttg

SEQ ID NO: 209310 - DNA, 25 bp, SARS Virus
ttgtttacgacggtccttttcttgg

SEQ ID NO: 209311 - DNA, 25 bp, SARS Virus
tgtttacgacgtgccttttcttgga

SEQ ID NO: 209312 - DNA, 25 bp, SARS Virus
gtttacgacgttgcttttcttggaa

SEQ ID NO: 209313 - DNA, 25 bp, SARS Virus
tttacgacgttcgttttcttggaag

SEQ ID NO: 209314 - DNA, 25 bp, SARS Virus
ttacgacgttccgtttcttggaagt

SEQ ID NO: 209315 - DNA, 25 bp, SARS Virus
tacgacgttcctgttcttggaagtg

SEQ ID NO: 209316 - DNA, 25 bp, SARS Virus
acgacgttccttgtcttggaagtgt

SEQ ID NO: 209317 - DNA, 25 bp, SARS Virus
cgacgttcctttgcttggaagtgtc

SEQ ID NO: 209318 - DNA, 25 bp, SARS Virus
gacgttccttttgttggaagtgtct

SEQ ID NO: 209319 - DNA, 25 bp, SARS Virus
acgttccttttcgtggaagtgtctt

SEQ ID NO: 209320 - DNA, 25 bp, SARS Virus
cgttccttttctgggaagtgtcttt

SEQ ID NO: 209321 - DNA, 25 bp, SARS Virus
gttccttttcttggaagtgtcttta

SEQ ID NO: 209322 - DNA, 25 bp, SARS Virus
ttccttttcttggaagtgtctttag

SEQ ID NO: 209323 - DNA, 25 bp, SARS Virus
tccttttcttgggagtgtctttagg

SEQ ID NO: 209324 - DNA, 25 bp, SARS Virus
ccttttcttggaggtgtctttaggt

SEQ ID NO: 209325 - DNA, 25 bp, SARS Virus
cttttcttggaagtgtctttaggta

SEQ ID NO: 209326 - DNA, 25 bp, SARS Virus
ttttcttggaagggtctttaggtat

SEQ ID NO: 209327 - DNA, 25 bp, SARS Virus
tttcttggaagtgtctttaggtatc

SEQ ID NO: 209328 - DNA, 25 bp, SARS Virus
ttcttggaagtggctttaggtatca

SEQ ID NO: 209329 - DNA, 25 bp, SARS Virus
tcttggaagtgtgtttaggtatcat

SEQ ID NO: 209330 - DNA, 25 bp, SARS Virus
cttggaagtgtcgttaggtatcatc

SEQ ID NO: 209331 - DNA, 25 bp, SARS Virus
ttggaagtgtctgtaggtatcatca

SEQ ID NO: 209332 - DNA, 25 bp, SARS Virus
tggaagtgtcttgaggtatcatcat

SEQ ID NO: 209333 - DNA, 25 bp, SARS Virus
ggaagtgtctttgggtatcatcatt

SEQ ID NO: 209334 - DNA, 25 bp, SARS Virus
gaagtgtctttaggtatcatcattg

SEQ ID NO: 209335 - DNA, 25 bp, SARS Virus
aagtgtctttaggtatcatcattgc

SEQ ID NO: 209336 - DNA, 25 bp, SARS Virus
agtgtctttagggatcatcattgca

SEQ ID NO: 209337 - DNA, 25 bp, SARS Virus
gtgtctttaggtgtcatcattgcaa

SEQ ID NO: 209338 - DNA, 25 bp, SARS Virus
tgtctttaggtagcatcattgcaat

SEQ ID NO: 209339 - DNA, 25 bp, SARS Virus
gtctttaggtatgatcattgcaatc

SEQ ID NO: 209340 - DNA, 25 bp, SARS Virus
tctttaggtatcgtcattgcaatct

SEQ ID NO: 209341 - DNA, 25 bp, SARS Virus
ctttaggtatcagcattgcaatctg

SEQ ID NO: 209342 - DNA, 25 bp, SARS Virus
tttaggtatcatgattgcaatctgc

SEQ ID NO: 209343 - DNA, 25 bp, SARS Virus
ttaggtatcatcgttgcaatctgct

SEQ ID NO: 209344 - DNA, 25 bp, SARS Virus
taggtatcatcagtgcaatctgctt

SEQ ID NO: 209345 - DNA, 25 bp, SARS Virus
aggtatcatcatggcaatctgctta

SEQ ID NO: 209346 - DNA, 25 bp, SARS Virus
ggtatcatcattgcaatctgcttaa

SEQ ID NO: 209347 - DNA, 25 bp, SARS Virus
gtatcatcattggaatctgcttaat

SEQ ID NO: 209348 - DNA, 25 bp, SARS Virus
tatcatcattgcgatctgcttaatt

SEQ ID NO: 209349 - DNA, 25 bp, SARS Virus
atcatcattgcagtctgcttaattc

SEQ ID NO: 209350 - DNA, 25 bp, SARS Virus
tcatcattgcaagctgcttaattct

SEQ ID NO: 209351 - DNA, 25 bp, SARS Virus
catcattgcaatgtgcttaattcta

SEQ ID NO: 209352 - DNA, 25 bp, SARS Virus
atcattgcaatcggcttaattctat

SEQ ID NO: 209353 - DNA, 25 bp, SARS Virus
tcattgcaatctgcttaattctatg

SEQ ID NO: 209354 - DNA, 25 bp, SARS Virus
cattgcaatctggttaattctatgt

SEQ ID NO: 209355 - DNA, 25 bp, SARS Virus
attgcaatctgcgtaattctatgtt

SEQ ID NO: 209356 - DNA, 25 bp, SARS Virus
ttgcaatctgctgaattctatgtta

SEQ ID NO: 209357 - DNA, 25 bp, SARS Virus
tgcaatctgcttgattctatgttaa

SEQ ID NO: 209358 - DNA, 25 bp, SARS Virus
gcaatctgcttagttctatgttaag

SEQ ID NO: 209359 - DNA, 25 bp, SARS Virus
caatctgcttaagtctatgttaaga

SEQ ID NO: 209360 - DNA, 25 bp, SARS Virus
aatctgcttaatgctatgttaagag

SEQ ID NO: 209361 - DNA, 25 bp, SARS Virus
atctgcttaattgtatgttaagaga

SEQ ID NO: 209362 - DNA, 25 bp, SARS Virus
tctgcttaattcgatgttaagagat

SEQ ID NO: 209363 - DNA, 25 bp, SARS Virus
ctgcttaattctgtgttaagagatt

SEQ ID NO: 209364 - DNA, 25 bp, SARS Virus
tgcttaattctaggttaagagattg

SEQ ID NO: 209365 - DNA, 25 bp, SARS Virus
gcttaattctatgttaagagattgc

SEQ ID NO: 209366 - DNA, 25 bp, SARS Virus
cttaattctatggtaagagattgcg

SEQ ID NO: 209367 - DNA, 25 bp, SARS Virus
ttaattctatgtgaagagattgcgg

SEQ ID NO: 209368 - DNA, 25 bp, SARS Virus
taattctatgttgagagattgcggt

SEQ ID NO: 209369 - DNA, 25 bp, SARS Virus
aattctatgttaggagattgcggta

SEQ ID NO: 209370 - DNA, 25 bp, SARS Virus
attctatgttaagagattgcggtaa

SEQ ID NO: 209371 - DNA, 25 bp, SARS Virus
ttctatgttaagggattgcggtaat

SEQ ID NO: 209372 - DNA, 25 bp, SARS Virus
tctatgttaagagattgcggtaatg

SEQ ID NO: 209373 - DNA, 25 bp, SARS Virus
ctatgttaagaggttgcggtaatgt

SEQ ID NO: 209374 - DNA, 25 bp, SARS Virus
tatgttaagagagtgcggtaatgtt

SEQ ID NO: 209375 - DNA, 25 bp, SARS Virus
atgttaagagatggcggtaatgtta

SEQ ID NO: 209376 - DNA, 25 bp, SARS Virus
tgttaagagattgcggtaatgttat

SEQ ID NO: 209377 - DNA, 25 bp, SARS Virus
gttaagagattggggtaatgttatt

SEQ ID NO: 209378 - DNA, 25 bp, SARS Virus
ttaagagattgcggtaatgttattc

SEQ ID NO: 209379 - DNA, 25 bp, SARS Virus
taagagattgcggtaatgttattct

SEQ ID NO: 209380 - DNA, 25 bp, SARS Virus
aagagattgcgggaatgttattctt

SEQ ID NO: 209381 - DNA, 25 bp, SARS Virus
agagattgcggtgatgttattcttc

SEQ ID NO: 209382 - DNA, 25 bp, SARS Virus
gagattgcggtagtgttattcttcc

SEQ ID NO: 209383 - DNA, 25 bp, SARS Virus
agattgcggtaaggttattcttcct

SEQ ID NO: 209384 - DNA, 25 bp, SARS Virus
gattgcggtaatgttattcttcctc

SEQ ID NO: 209385 - DNA, 25 bp, SARS Virus
cggtaattgttatcaacatgtgagt

SEQ ID NO: 209386 - DNA, 25 bp, SARS Virus
ggtaattgttattaacatgtgagtt

SEQ ID NO: 209387 - DNA, 25 bp, SARS Virus
gtaattgttatctacatgtgagttg

SEQ ID NO: 209388 - DNA, 25 bp, SARS Virus
taattgttatcatcatgtgagttgc

SEQ ID NO: 209389 - DNA, 25 bp, SARS Virus
aattgttatcaatatgtgagttgcg

SEQ ID NO: 209390 - DNA, 25 bp, SARS Virus
attgttatcaacttgtgagttgcgc

SEQ ID NO: 209391 - DNA, 25 bp, SARS Virus
ttgttatcaacatgtgagttgcgca

SEQ ID NO: 209392 - DNA, 25 bp, SARS Virus
tgttatcaacatttgagttgcgcac

SEQ ID NO: 209393 - DNA, 25 bp, SARS Virus
gttatcaacatgtgagttgcgcaca

SEQ ID NO: 209394 - DNA, 25 bp, SARS Virus
ttatcaacatgttagttgcgcacac

SEQ ID NO: 209395 - DNA, 25 bp, SARS Virus
tatcaacatgtgtgttgcgcacacc

SEQ ID NO: 209396 - DNA, 25 bp, SARS Virus
atcaacatgtgatttgcgcacaccg

SEQ ID NO: 209397 - DNA, 25 bp, SARS Virus
tcaacatgtgagttgcgcacaccgt

SEQ ID NO: 209398 - DNA, 25 bp, SARS Virus
caacatgtgagttgcgcacaccgtg

SEQ ID NO: 209399 - DNA, 25 bp, SARS Virus
aacatgtgagtttcgcacaccgtgc

SEQ ID NO: 209400 - DNA, 25 bp, SARS Virus
acatgtgagttgtgcacaccgtgct

SEQ ID NO: 209401 - DNA, 25 bp, SARS Virus
catgtgagttgctcacaccgtgcta

SEQ ID NO: 209402 - DNA, 25 bp, SARS Virus
atgtgagttgcgtacaccgtgctaa

SEQ ID NO: 209403 - DNA, 25 bp, SARS Virus
tgtgagttgcgctcaccgtgctaac

SEQ ID NO: 209404 - DNA, 25 bp, SARS Virus
gtgagttgcgcataccgtgctaacg

SEQ ID NO: 209405 - DNA, 25 bp, SARS Virus
tgagttgcgcactccgtgctaacgc

SEQ ID NO: 209406 - DNA, 25 bp, SARS Virus
gagttgcgcacatcgtgctaacgcg

SEQ ID NO: 209407 - DNA, 25 bp, SARS Virus
agttgcgcacactgtgctaacgcga

SEQ ID NO: 209408 - DNA, 25 bp, SARS Virus
gttgcgcacaccttgctaacgcgaa

SEQ ID NO: 209409 - DNA, 25 bp, SARS Virus
ttgcgcacaccgtgctaacgcgaat

SEQ ID NO: 209410 - DNA, 25 bp, SARS Virus
tgcgcacaccgttctaacgcgaata

SEQ ID NO: 209411 - DNA, 25 bp, SARS Virus
gcgcacaccgtgttaacgcgaatat

SEQ ID NO: 209412 - DNA, 25 bp, SARS Virus
cgcacaccgtgctaacgcgaatatc

SEQ ID NO: 209413 - DNA, 25 bp, SARS Virus
gcacaccgtgcttacgcgaatatcg

SEQ ID NO: 209414 - DNA, 25 bp, SARS Virus
cacaccgtgctatcgcgaatatcgt

SEQ ID NO: 209415 - DNA, 25 bp, SARS Virus
acaccgtgctaatgcgaatatcgtg

SEQ ID NO: 209416 - DNA, 25 bp, SARS Virus
caccgtgctaactcgaatatcgtgt

SEQ ID NO: 209417 - DNA, 25 bp, SARS Virus
accgtgctaacgtgaatatcgtgta

SEQ ID NO: 209418 - DNA, 25 bp, SARS Virus
ccgtgctaacgctaatatcgtgtag

SEQ ID NO: 209419 - DNA, 25 bp, SARS Virus
cgtgctaacgcgtatatcgtgtagt

SEQ ID NO: 209420 - DNA, 25 bp, SARS Virus
gtgctaacgcgattatcgtgtagta

SEQ ID NO: 209421 - DNA, 25 bp, SARS Virus
tgctaacgcgaatatcgtgtagtac

SEQ ID NO: 209422 - DNA, 25 bp, SARS Virus
gctaacgcgaatttcgtgtagtacg

SEQ ID NO: 209423 - DNA, 25 bp, SARS Virus
ctaacgcgaatatcgtgtagtacgt

SEQ ID NO: 209424 - DNA, 25 bp, SARS Virus
taacgcgaatattgtgtagtacgtt

SEQ ID NO: 209425 - DNA, 25 bp, SARS Virus
aacgcgaatatcttgtagtacgttc

SEQ ID NO: 209426 - DNA, 25 bp, SARS Virus
acgcgaatatcgtgtagtacgttca

SEQ ID NO: 209427 - DNA, 25 bp, SARS Virus
cgcgaatatcgtttagtacgttcag

SEQ ID NO: 209428 - DNA, 25 bp, SARS Virus
gcgaatatcgtgtagtacgttcagc

SEQ ID NO: 209429 - DNA, 25 bp, SARS Virus
cgaatatcgtgttgtacgttcagct

SEQ ID NO: 209430 - DNA, 25 bp, SARS Virus
gaatatcgtgtattacgttcagctt

SEQ ID NO: 209431 - DNA, 25 bp, SARS Virus
aatatcgtgtagtacgttcagcttc

SEQ ID NO: 209432 - DNA, 25 bp, SARS Virus
atatcgtgtagttcgttcagcttct

SEQ ID NO: 209433 - DNA, 25 bp, SARS Virus
tatcgtgtagtatgttcagcttctc

SEQ ID NO: 209434 - DNA, 25 bp, SARS Virus
atcgtgtagtactttcagcttctcc

SEQ ID NO: 209435 - DNA, 25 bp, SARS Virus
tcgtgtagtacgttcagcttctcca

SEQ ID NO: 209436 - DNA, 25 bp, SARS Virus
cgtgtagtacgttcagcttctccac

SEQ ID NO: 209437 - DNA, 25 bp, SARS Virus
gtgtagtacgtttagcttctccacg

SEQ ID NO: 209438 - DNA, 25 bp, SARS Virus
tgtagtacgttctgcttctccacgt

SEQ ID NO: 209439 - DNA, 25 bp, SARS Virus
gtagtacgttcatcttctccacgtt

SEQ ID NO: 209440 - DNA, 25 bp, SARS Virus
tagtacgttcagtttctccacgttg

SEQ ID NO: 209441 - DNA, 25 bp, SARS Virus
agtacgttcagcttctccacgttgg

SEQ ID NO: 209442 - DNA, 25 bp, SARS Virus
gtacgttcagcttctccacgttggt

SEQ ID NO: 209443 - DNA, 25 bp, SARS Virus
tacgttcagcttttccacgttggta

SEQ ID NO: 209444 - DNA, 25 bp, SARS Virus
acgttcagcttctccacgttggtag

SEQ ID NO: 209445 - DNA, 25 bp, SARS Virus
cgttcagcttcttcacgttggtagg

SEQ ID NO: 209446 - DNA, 25 bp, SARS Virus
gttcagcttctctacgttggtaggt

SEQ ID NO: 209447 - DNA, 25 bp, SARS Virus
ttcagcttctcctcgttggtaggta

SEQ ID NO: 209448 - DNA, 25 bp, SARS Virus
tcagcttctccatgttggtaggtac

SEQ ID NO: 209449 - DNA, 25 bp, SARS Virus
cagcttctccactttggtaggtact

SEQ ID NO: 209450 - DNA, 25 bp, SARS Virus
agcttctccacgttggtaggtacta

SEQ ID NO: 209451 - DNA, 25 bp, SARS Virus
gcttctccacgttggtaggtactat

SEQ ID NO: 209452 - DNA, 25 bp, SARS Virus
cttctccacgtttgtaggtactata

SEQ ID NO: 209453 - DNA, 25 bp, SARS Virus
ttctccacgttgttaggtactatac

SEQ ID NO: 209454 - DNA, 25 bp, SARS Virus
tctccacgttggtaggtactatact

SEQ ID NO: 209455 - DNA, 25 bp, SARS Virus
ctccacgttggttggtactatactt

SEQ ID NO: 209456 - DNA, 25 bp, SARS Virus
tccacgttggtatgtactatacttg

SEQ ID NO: 209457 - DNA, 25 bp, SARS Virus
ccacgttggtagttactatacttgt

SEQ ID NO: 209458 - DNA, 25 bp, SARS Virus
cacgttggtaggtactatacttgta

SEQ ID NO: 209459 - DNA, 25 bp, SARS Virus
acgttggtaggttctatacttgtat

SEQ ID NO: 209460 - DNA, 25 bp, SARS Virus
cgttggtaggtattatacttgtatc

SEQ ID NO: 209461 - DNA, 25 bp, SARS Virus
gttggtaggtactatacttgtatcg

SEQ ID NO: 209462 - DNA, 25 bp, SARS Virus
ttggtaggtactttacttgtatcga

SEQ ID NO: 209463 - DNA, 25 bp, SARS Virus
tggtaggtactatacttgtatcgag

SEQ ID NO: 209464 - DNA, 25 bp, SARS Virus
ggtaggtactattcttgtatcgaga

SEQ ID NO: 209465 - DNA, 25 bp, SARS Virus
gtaggtactatatttgtatcgagaa

SEQ ID NO: 209466 - DNA, 25 bp, SARS Virus
taggtactatacttgtatcgagaag

SEQ ID NO: 209467 - DNA, 25 bp, SARS Virus
aggtactatacttgtatcgagaagg

SEQ ID NO: 209468 - DNA, 25 bp, SARS Virus
ggtactatacttttatcgagaaggt

SEQ ID NO: 209469 - DNA, 25 bp, SARS Virus
gtactatacttgtatcgagaaggta

SEQ ID NO: 209470 - DNA, 25 bp, SARS Virus
tactatacttgtttcgagaaggtat

SEQ ID NO: 209471 - DNA, 25 bp, SARS Virus
actatacttgtatcgagaaggtata

SEQ ID NO: 209472 - DNA, 25 bp, SARS Virus
ctatacttgtattgagaaggtatac

SEQ ID NO: 209473 - DNA, 25 bp, SARS Virus
tatacttgtatctagaaggtataca

SEQ ID NO: 209474 - DNA, 25 bp, SARS Virus
atacttgtatcgtgaaggtatacat

SEQ ID NO: 209475 - DNA, 25 bp, SARS Virus
tacttgtatcgataaggtatacatc

SEQ ID NO: 209476 - DNA, 25 bp, SARS Virus
acttgtatcgagtaggtatacatca

SEQ ID NO: 209477 - DNA, 25 bp, SARS Virus
cttgtatcgagatggtatacatcat

SEQ ID NO: 209478 - DNA, 25 bp, SARS Virus
ttgtatcgagaatgtatacatcatc

SEQ ID NO: 209479 - DNA, 25 bp, SARS Virus
tgtatcgagaagttatacatcatct

SEQ ID NO: 209480 - DNA, 25 bp, SARS Virus
gtatcgagaaggtatacatcatctt

SEQ ID NO: 209481 - DNA, 25 bp, SARS Virus
tatcgagaaggtttacatcatcttt

SEQ ID NO: 209482 - DNA, 25 bp, SARS Virus
atcgagaaggtatacatcatctttc

SEQ ID NO: 209483 - DNA, 25 bp, SARS Virus
tcgagaaggtattcatcatctttct

SEQ ID NO: 209484 - DNA, 25 bp, SARS Virus
cgagaaggtatatatcatctttctt

SEQ ID NO: 209485 - DNA, 25 bp, SARS Virus
gagaaggtatacttcatctttcttc

SEQ ID NO: 209486 - DNA, 25 bp, SARS Virus
agaaggtatacatcatctttcttcg

SEQ ID NO: 209487 - DNA, 25 bp, SARS Virus
gaaggtatacattatctttcttcgt

SEQ ID NO: 209488 - DNA, 25 bp, SARS Virus
aaggtatacatcttctttcttcgtt

SEQ ID NO: 209489 - DNA, 25 bp, SARS Virus
aggtatacatcatctttcttcgttt

SEQ ID NO: 209490 - DNA, 25 bp, SARS Virus
ggtatacatcatttttcttcgtttc

SEQ ID NO: 209491 - DNA, 25 bp, SARS Virus
gtatacatcatctttcttcgtttct

SEQ ID NO: 209492 - DNA, 25 bp, SARS Virus
tatacatcatctttcttcgtttctt

SEQ ID NO: 209493 - DNA, 25 bp, SARS Virus
atacatcatctttcttcgtttcttc

SEQ ID NO: 209494 - DNA, 25 bp, SARS Virus
tacatcatcttttttcgtttcttct

SEQ ID NO: 209495 - DNA, 25 bp, SARS Virus
acatcatctttcttcgtttcttcta

SEQ ID NO: 209496 - DNA, 25 bp, SARS Virus
catcatctttcttcgtttcttctac

SEQ ID NO: 209497 - DNA, 25 bp, SARS Virus
atcatctttctttgtttcttctaca

SEQ ID NO: 209498 - DNA, 25 bp, SARS Virus
tcatctttcttcttttcttctacat

SEQ ID NO: 209499 - DNA, 25 bp, SARS Virus
catctttcttcgtttcttctacatg

SEQ ID NO: 209500 - DNA, 25 bp, SARS Virus
atctttcttcgtttcttctacatgt

SEQ ID NO: 209501 - DNA, 25 bp, SARS Virus
tctttcttcgtttcttctacatgta

SEQ ID NO: 209502 - DNA, 25 bp, SARS Virus
ctttcttcgttttttctacatgtag

SEQ ID NO: 209503 - DNA, 25 bp, SARS Virus
tttcttcgtttcttctacatgtagg

SEQ ID NO: 209504 - DNA, 25 bp, SARS Virus
ttcttcgtttcttctacatgtagga

SEQ ID NO: 209505 - DNA, 25 bp, SARS Virus
tcttcgtttcttttacatgtaggat

SEQ ID NO: 209506 - DNA, 25 bp, SARS Virus
cttcgtttcttctacatgtaggatt

SEQ ID NO: 209507 - DNA, 25 bp, SARS Virus
ttcgtttcttcttcatgtaggattg

SEQ ID NO: 209508 - DNA, 25 bp, SARS Virus
tcgtttcttctatatgtaggattgg

SEQ ID NO: 209509 - DNA, 25 bp, SARS Virus
cgtttcttctacttgtaggattggt

SEQ ID NO: 209510 - DNA, 25 bp, SARS Virus
gtttcttctacatgtaggattggta

SEQ ID NO: 209511 - DNA, 25 bp, SARS Virus
tttcttctacatttaggattggtaa

SEQ ID NO: 209512 - DNA, 25 bp, SARS Virus
ttcttctacatgtaggattggtaac

SEQ ID NO: 209513 - DNA, 25 bp, SARS Virus
tcttctacatgttggattggtaacg

SEQ ID NO: 209514 - DNA, 25 bp, SARS Virus
cttctacatgtatgattggtaacgt

SEQ ID NO: 209515 - DNA, 25 bp, SARS Virus
ttctacatgtagtattggtaacgtc

SEQ ID NO: 209516 - DNA, 25 bp, SARS Virus
tctacatgtaggtttggtaacgtct

SEQ ID NO: 209517 - DNA, 25 bp, SARS Virus
ctacatgtaggattggtaacgtctt

SEQ ID NO: 209518 - DNA, 25 bp, SARS Virus
tacatgtaggattggtaacgtcttt

SEQ ID NO: 209519 - DNA, 25 bp, SARS Virus
acatgtaggatttgtaacgtctttg

SEQ ID NO: 209520 - DNA, 25 bp, SARS Virus
catgtaggattgttaacgtctttgc

SEQ ID NO: 209521 - DNA, 25 bp, SARS Virus
atgtaggattggtaacgtctttgcc

SEQ ID NO: 209522 - DNA, 25 bp, SARS Virus
tgtaggattggttacgtctttgccc

SEQ ID NO: 209523 - DNA, 25 bp, SARS Virus
gtaggattggtatcgtctttgccca

SEQ ID NO: 209524 - DNA, 25 bp, SARS Virus
taggattggtaatgtctttgcccac

SEQ ID NO: 209525 - DNA, 25 bp, SARS Virus
aggattggtaacttctttgcccacg

SEQ ID NO: 209526 - DNA, 25 bp, SARS Virus
ggattggtaacgtctttgcccacgg

SEQ ID NO: 209527 - DNA, 25 bp, SARS Virus
gattggtaacgtttttgcccacggt

SEQ ID NO: 209528 - DNA, 25 bp, SARS Virus
attggtaacgtctttgcccacggta

SEQ ID NO: 209529 - DNA, 25 bp, SARS Virus
ttggtaacgtctttgcccacggtaa

SEQ ID NO: 209530 - DNA, 25 bp, SARS Virus
tggtaacgtctttgcccacggtaaa

SEQ ID NO: 209531 - DNA, 25 bp, SARS Virus
ggtaacgtcttttcccacggtaaac

SEQ ID NO: 209532 - DNA, 25 bp, SARS Virus
gtaacgtctttgtccacggtaaaca

SEQ ID NO: 209533 - DNA, 25 bp, SARS Virus
taacgtctttgctcacggtaaacat

SEQ ID NO: 209534 - DNA, 25 bp, SARS Virus
aacgtctttgcctacggtaaacatg

SEQ ID NO: 209535 - DNA, 25 bp, SARS Virus
acgtctttgccctcggtaaacatgt

SEQ ID NO: 209536 - DNA, 25 bp, SARS Virus
cgtctttgcccatggtaaacatgtt

SEQ ID NO: 209537 - DNA, 25 bp, SARS Virus
gtctttgcccactgtaaacatgtta

SEQ ID NO: 209538 - DNA, 25 bp, SARS Virus
tctttgcccacgttaaacatgttat

SEQ ID NO: 209539 - DNA, 25 bp, SARS Virus
ctttgcccacggtaaacatgttatg

SEQ ID NO: 209540 - DNA, 25 bp, SARS Virus
tttgcccacggttaacatgttatga

SEQ ID NO: 209541 - DNA, 25 bp, SARS Virus
ttgcccacggtatacatgttatgat

SEQ ID NO: 209542 - DNA, 25 bp, SARS Virus
tgcccacggtaatcatgttatgatt

SEQ ID NO: 209543 - DNA, 25 bp, SARS Virus
gcccacggtaaatatgttatgatta

SEQ ID NO: 209544 - DNA, 25 bp, SARS Virus
cccacggtaaacttgttatgattac

SEQ ID NO: 209545 - DNA, 25 bp, SARS Virus
ccacggtaaacatgttatgattact

SEQ ID NO: 209546 - DNA, 25 bp, SARS Virus
cacggtaaacattttatgattacta

SEQ ID NO: 209547 - DNA, 25 bp, SARS Virus
acggtaaacatgttatgattactat

SEQ ID NO: 209548 - DNA, 25 bp, SARS Virus
cggtaaacatgttatgattactatt

SEQ ID NO: 209549 - DNA, 25 bp, SARS Virus
ggtaaacatgttttgattactattt

SEQ ID NO: 209550 - DNA, 25 bp, SARS Virus
gtaaacatgttatgattactatttg

SEQ ID NO: 209551 - DNA, 25 bp, SARS Virus
taaacatgttattattactatttgg

SEQ ID NO: 209552 - DNA, 25 bp, SARS Virus
aaacatgttatgtttactatttggt

SEQ ID NO: 209553 - DNA, 25 bp, SARS Virus
aacatgttatgattactatttggtg

SEQ ID NO: 209554 - DNA, 25 bp, SARS Virus
acatgttatgattactatttggtgt

SEQ ID NO: 209555 - DNA, 25 bp, SARS Virus
catgttatgatttctatttggtgta

SEQ ID NO: 209556 - DNA, 25 bp, SARS Virus
atgttatgattattatttggtgtac

SEQ ID NO: 209557 - DNA, 25 bp, SARS Virus
tgttatgattactatttggtgtact

SEQ ID NO: 209558 - DNA, 25 bp, SARS Virus
gttatgattactttttggtgtactc

SEQ ID NO: 209559 - DNA, 25 bp, SARS Virus
ttatgattactatttggtgtactcg

SEQ ID NO: 209560 - DNA, 25 bp, SARS Virus
tatgattactatttggtgtactcgg

SEQ ID NO: 209561 - DNA, 25 bp, SARS Virus
atgattactatttggtgtactcggt

SEQ ID NO: 209562 - DNA, 25 bp, SARS Virus
tgattactattttgtgtactcggtt

SEQ ID NO: 209563 - DNA, 25 bp, SARS Virus
gattactatttgttgtactcggttc

SEQ ID NO: 209564 - DNA, 25 bp, SARS Virus
attactatttggtgtactcggttct

SEQ ID NO: 209565 - DNA, 25 bp, SARS Virus
ttactatttggtttactcggttctt

SEQ ID NO: 209566 - DNA, 25 bp, SARS Virus
tactatttggtgtactcggttctta

SEQ ID NO: 209567 - DNA, 25 bp, SARS Virus
actatttggtgttctcggttcttaa

SEQ ID NO: 209568 - DNA, 25 bp, SARS Virus
ctatttggtgtattcggttcttaac

SEQ ID NO: 209569 - DNA, 25 bp, SARS Virus
tatttggtgtactcggttcttaacg

SEQ ID NO: 209570 - DNA, 25 bp, SARS Virus
atttggtgtacttggttcttaacga

SEQ ID NO: 209571 - DNA, 25 bp, SARS Virus
tttggtgtactctgttcttaacgac

SEQ ID NO: 209572 - DNA, 25 bp, SARS Virus
ttggtgtactcgtttcttaacgact

SEQ ID NO: 209573 - DNA, 25 bp, SARS Virus
tggtgtactcggttcttaacgacta

SEQ ID NO: 209574 - DNA, 25 bp, SARS Virus
ggtgtactcggttcttaacgactac

SEQ ID NO: 209575 - DNA, 25 bp, SARS Virus
gtgtactcggtttttaacgactact

SEQ ID NO: 209576 - DNA, 25 bp, SARS Virus
tgtactcggttcttaacgactactt

SEQ ID NO: 209577 - DNA, 25 bp, SARS Virus
gtactcggttcttaacgactacttt

SEQ ID NO: 209578 - DNA, 25 bp, SARS Virus
tactcggttctttacgactacttta

SEQ ID NO: 209579 - DNA, 25 bp, SARS Virus
actcggttcttatcgactactttac

SEQ ID NO: 209580 - DNA, 25 bp, SARS Virus
ctcggttcttaatgactactttact

SEQ ID NO: 209581 - DNA, 25 bp, SARS Virus
tcggttcttaactactactttactg

SEQ ID NO: 209582 - DNA, 25 bp, SARS Virus
cggttcttaacgtctactttactga

SEQ ID NO: 209583 - DNA, 25 bp, SARS Virus
ggttcttaacgattactttactgat

SEQ ID NO: 209584 - DNA, 25 bp, SARS Virus
gttcttaacgactactttactgatc

SEQ ID NO: 209585 - DNA, 25 bp, SARS Virus
ttcttaacgacttctttactgatcg

SEQ ID NO: 209586 - DNA, 25 bp, SARS Virus
tcttaacgactattttactgatcgt

SEQ ID NO: 209587 - DNA, 25 bp, SARS Virus
cttaacgactactttactgatcgtt

SEQ ID NO: 209588 - DNA, 25 bp, SARS Virus
ttaacgactactttactgatcgttt

SEQ ID NO: 209589 - DNA, 25 bp, SARS Virus
taacgactactttactgatcgtttt

SEQ ID NO: 209590 - DNA, 25 bp, SARS Virus
aacgactacttttctgatcgtttta

SEQ ID NO: 209591 - DNA, 25 bp, SARS Virus
acgactactttattgatcgttttat

SEQ ID NO: 209592 - DNA, 25 bp, SARS Virus
cgactactttactgatcgttttatc

SEQ ID NO: 209593 - DNA, 25 bp, SARS Virus
gactactttacttatcgttttatcg

SEQ ID NO: 209594 - DNA, 25 bp, SARS Virus
actactttactgttcgttttatcgg

SEQ ID NO: 209595 - DNA, 25 bp, SARS Virus
ctactttactgatcgttttatcggt

SEQ ID NO: 209596 - DNA, 25 bp, SARS Virus
tactttactgattgttttatcggtt

SEQ ID NO: 209597 - DNA, 25 bp, SARS Virus
actttactgatctttttatcggttt

SEQ ID NO: 209598 - DNA, 25 bp, SARS Virus
ctttactgatcgttttatcggtttc

SEQ ID NO: 209599 - DNA, 25 bp, SARS Virus
tttactgatcgttttatcggtttct

SEQ ID NO: 209600 - DNA, 25 bp, SARS Virus
ttactgatcgttttatcggtttctt

SEQ ID NO: 209601 - DNA, 25 bp, SARS Virus
tactgatcgttttatcggtttcttg

SEQ ID NO: 209602 - DNA, 25 bp, SARS Virus
actgatcgttttttcggtttcttgt

SEQ ID NO: 209603 - DNA, 25 bp, SARS Virus
ctgatcgttttatcggtttcttgtg

SEQ ID NO: 209604 - DNA, 25 bp, SARS Virus
tgatcgttttattggtttcttgtgg

SEQ ID NO: 209605 - DNA, 25 bp, SARS Virus
gatcgttttatctgtttcttgtgga

SEQ ID NO: 209606 - DNA, 25 bp, SARS Virus
atcgttttatcgttttcttgtggac

SEQ ID NO: 209607 - DNA, 25 bp, SARS Virus
tcgttttatcggtttcttgtggacg

SEQ ID NO: 209608 - DNA, 25 bp, SARS Virus
cgttttatcggtttcttgtggacgt

SEQ ID NO: 209609 - DNA, 25 bp, SARS Virus
gttttatcggtttcttgtggacgta

SEQ ID NO: 209610 - DNA, 25 bp, SARS Virus
ttttatcggttttttgtggacgtaa

SEQ ID NO: 209611 - DNA, 25 bp, SARS Virus
tttatcggtttcttgtggacgtaat

SEQ ID NO: 209612 - DNA, 25 bp, SARS Virus
ttatcggtttcttgtggacgtaata

SEQ ID NO: 209613 - DNA, 25 bp, SARS Virus
tatcggtttcttttggacgtaatat

SEQ ID NO: 209614 - DNA, 25 bp, SARS Virus
atcggtttcttgtggacgtaatatc

SEQ ID NO: 209615 - DNA, 25 bp, SARS Virus
tcggtttcttgttgacgtaatatcg

SEQ ID NO: 209616 - DNA, 25 bp, SARS Virus
cggtttcttgtgtacgtaatatcga

SEQ ID NO: 209617 - DNA, 25 bp, SARS Virus
ggtttcttgtggtcgtaatatcgac

SEQ ID NO: 209618 - DNA, 25 bp, SARS Virus
gtttcttgtggatgtaatatcgact

SEQ ID NO: 209619 - DNA, 25 bp, SARS Virus
tttcttgtggacttaatatcgactt

SEQ ID NO: 209620 - DNA, 25 bp, SARS Virus
ttcttgtggacgtaatatcgacttt

SEQ ID NO: 209621 - DNA, 25 bp, SARS Virus
tcttgtggacgttatatcgactttc

SEQ ID NO: 209622 - DNA, 25 bp, SARS Virus
cttgtggacgtattatcgactttct

SEQ ID NO: 209623 - DNA, 25 bp, SARS Virus
ttgtggacgtaatatcgactttctg

SEQ ID NO: 209624 - DNA, 25 bp, SARS Virus
tgtggacgtaatttcgactttctgg

SEQ ID NO: 209625 - DNA, 25 bp, SARS Virus
gtggacgtaatatcgactttctgga

SEQ ID NO: 209626 - DNA, 25 bp, SARS Virus
tggacgtaatattgactttctggat

SEQ ID NO: 209627 - DNA, 25 bp, SARS Virus
ggacgtaatatctactttctggatt

SEQ ID NO: 209628 - DNA, 25 bp, SARS Virus
gacgtaatatcgtctttctggatta

SEQ ID NO: 209629 - DNA, 25 bp, SARS Virus
acgtaatatcgattttctggattat

SEQ ID NO: 209630 - DNA, 25 bp, SARS Virus
cgtaatatcgactttctggattatt

SEQ ID NO: 209631 - DNA, 25 bp, SARS Virus
gtaatatcgactttctggattattt

SEQ ID NO: 209632 - DNA, 25 bp, SARS Virus
taatatcgactttctggattattta

SEQ ID NO: 209633 - DNA, 25 bp, SARS Virus
aatatcgactttttggattatttat

SEQ ID NO: 209634 - DNA, 25 bp, SARS Virus
atatcgactttctggattatttatt

SEQ ID NO: 209635 - DNA, 25 bp, SARS Virus
tatcgactttcttgattatttattt

SEQ ID NO: 209636 - DNA, 25 bp, SARS Virus
atcgactttctgtattatttatttt

SEQ ID NO: 209637 - DNA, 25 bp, SARS Virus
tcgactttctggtttatttattttc

SEQ ID NO: 209638 - DNA, 25 bp, SARS Virus
cgactttctggattatttattttct

SEQ ID NO: 209639 - DNA, 25 bp, SARS Virus
gactttctggattatttattttctt

SEQ ID NO: 209640 - DNA, 25 bp, SARS Virus
actttctggattttttattttctta

SEQ ID NO: 209641 - DNA, 25 bp, SARS Virus
ctttctggattatttattttcttaa

SEQ ID NO: 209642 - DNA, 25 bp, SARS Virus
tttctggattatttattttcttaaa

SEQ ID NO: 209643 - DNA, 25 bp, SARS Virus
ttctggattatttattttcttaaaa

SEQ ID NO: 209644 - DNA, 25 bp, SARS Virus
tctggattattttttttcttaaaac

SEQ ID NO: 209645 - DNA, 25 bp, SARS Virus
ctggattatttattttcttaaaaca

SEQ ID NO: 209646 - DNA, 25 bp, SARS Virus
tggattatttattttcttaaaacac

SEQ ID NO: 209647 - DNA, 25 bp, SARS Virus
ggattatttattttcttaaaacact

SEQ ID NO: 209648 - DNA, 25 bp, SARS Virus
gattatttattttcttaaaacactt

SEQ ID NO: 209649 - DNA, 25 bp, SARS Virus
attatttatttttttaaaacacttg

SEQ ID NO: 209650 - DNA, 25 bp, SARS Virus
ttatttattttcttaaaacacttgt

SEQ ID NO: 209651 - DNA, 25 bp, SARS Virus
tatttattttcttaaaacacttgtt

SEQ ID NO: 209652 - DNA, 25 bp, SARS Virus
atttattttctttaaacacttgttg

SEQ ID NO: 209653 - DNA, 25 bp, SARS Virus
tttattttcttataacacttgttgt

SEQ ID NO: 209654 - DNA, 25 bp, SARS Virus
ttattttcttaatacacttgttgta

SEQ ID NO: 209655 - DNA, 25 bp, SARS Virus
tattttcttaaatcacttgttgtat

SEQ ID NO: 209656 - DNA, 25 bp, SARS Virus
attttcttaaaatacttgttgtata

SEQ ID NO: 209657 - DNA, 25 bp, SARS Virus
ttttcttaaaactcttgttgtatat

SEQ ID NO: 209658 - DNA, 25 bp, SARS Virus
tttcttaaaacatttgttgtatata

SEQ ID NO: 209659 - DNA, 25 bp, SARS Virus
ttcttaaaacacttgttgtatatac

SEQ ID NO: 209660 - DNA, 25 bp, SARS Virus
tcttaaaacacttgttgtatatacg

SEQ ID NO: 209661 - DNA, 25 bp, SARS Virus
cttaaaacactttttgtatatacgg

SEQ ID NO: 209662 - DNA, 25 bp, SARS Virus
ttaaaacacttgttgtatatacggt

SEQ ID NO: 209663 - DNA, 25 bp, SARS Virus
taaaacacttgttgtatatacggtt

SEQ ID NO: 209664 - DNA, 25 bp, SARS Virus
aaaacacttgttttatatacggttt

SEQ ID NO: 209665 - DNA, 25 bp, SARS Virus
aaacacttgttgtatatacggtttt

SEQ ID NO: 209666 - DNA, 25 bp, SARS Virus
aacacttgttgtttatacggttttg

SEQ ID NO: 209667 - DNA, 25 bp, SARS Virus
acacttgttgtatatacggttttgg

SEQ ID NO: 209668 - DNA, 25 bp, SARS Virus
cacttgttgtatttacggttttggg

SEQ ID NO: 209669 - DNA, 25 bp, SARS Virus
acttgttgtatatacggttttgggt

SEQ ID NO: 209670 - DNA, 25 bp, SARS Virus
cttgttgtatattcggttttgggtg

SEQ ID NO: 209671 - DNA, 25 bp, SARS Virus
ttgttgtatatatggttttgggtga

SEQ ID NO: 209672 - DNA, 25 bp, SARS Virus
tgttgtatatactgttttgggtgag

SEQ ID NO: 209673 - DNA, 25 bp, SARS Virus
gttgtatatacgtttttgggtgagt

SEQ ID NO: 209674 - DNA, 25 bp, SARS Virus
ttgtatatacggttttgggtgagtc

SEQ ID NO: 209675 - DNA, 25 bp, SARS Virus
tgtatatacggttttgggtgagtcg

SEQ ID NO: 209676 - DNA, 25 bp, SARS Virus
gtatatacggttttgggtgagtcgc

SEQ ID NO: 209677 - DNA, 25 bp, SARS Virus
tatatacggttttgggtgagtcgcc

SEQ ID NO: 209678 - DNA, 25 bp, SARS Virus
atatacggtttttggtgagtcgccg

SEQ ID NO: 209679 - DNA, 25 bp, SARS Virus
tatacggttttgtgtgagtcgccgg

SEQ ID NO: 209680 - DNA, 25 bp, SARS Virus
atacggttttggttgagtcgccggt

SEQ ID NO: 209681 - DNA, 25 bp, SARS Virus
tacggttttgggtgagtcgccggtc

SEQ ID NO: 209682 - DNA, 25 bp, SARS Virus
acggttttgggttagtcgccggtct

SEQ ID NO: 209683 - DNA, 25 bp, SARS Virus
cggttttgggtgtgtcgccggtctg

SEQ ID NO: 209684 - DNA, 25 bp, SARS Virus
ggttttgggtgattcgccggtctgg

SEQ ID NO: 209685 - DNA, 25 bp, SARS Virus
gttttgggtgagtcgccggtctgga

SEQ ID NO: 209686 - DNA, 25 bp, SARS Virus
ttttgggtgagttgccggtctggat

SEQ ID NO: 209687 - DNA, 25 bp, SARS Virus
tttgggtgagtctccggtctggatt

SEQ ID NO: 209688 - DNA, 25 bp, SARS Virus
ttgggtgagtcgtcggtctggattt

SEQ ID NO: 209689 - DNA, 25 bp, SARS Virus
tgggtgagtcgctggtctggatttt

SEQ ID NO: 209690 - DNA, 25 bp, SARS Virus
gggtgagtcgcctgtctggatttta

SEQ ID NO: 209691 - DNA, 25 bp, SARS Virus
ggtgagtcgccgttctggattttaa

SEQ ID NO: 209692 - DNA, 25 bp, SARS Virus
gtgagtcgccggtctggattttaac

SEQ ID NO: 209693 - DNA, 25 bp, SARS Virus
tgagtcgccggtttggattttaaca

SEQ ID NO: 209694 - DNA, 25 bp, SARS Virus
gagtcgccggtctggattttaacag

SEQ ID NO: 209695 - DNA, 25 bp, SARS Virus
agtcgccggtcttgattttaacagt

SEQ ID NO: 209696 - DNA, 25 bp, SARS Virus
gtcgccggtctgtattttaacagtt

SEQ ID NO: 209697 - DNA, 25 bp, SARS Virus
tcgccggtctggtttttaacagttc

SEQ ID NO: 209698 - DNA, 25 bp, SARS Virus
cgccggtctggattttaacagttca

SEQ ID NO: 209699 - DNA, 25 bp, SARS Virus
gccggtctggattttaacagttcag

SEQ ID NO: 209700 - DNA, 25 bp, SARS Virus
ccggtctggattttaacagttcaga

SEQ ID NO: 209701 - DNA, 25 bp, SARS Virus
cggtctggattttaacagttcagat

SEQ ID NO: 209702 - DNA, 25 bp, SARS Virus
ggtctggatttttacagttcagatc

SEQ ID NO: 209703 - DNA, 25 bp, SARS Virus
gtctggattttatcagttcagatcg

SEQ ID NO: 209704 - DNA, 25 bp, SARS Virus
tctggattttaatagttcagatcga

SEQ ID NO: 209705 - DNA, 25 bp, SARS Virus
ctggattttaactgttcagatcgaa

SEQ ID NO: 209706 - DNA, 25 bp, SARS Virus
tggattttaacatttcagatcgaac

SEQ ID NO: 209707 - DNA, 25 bp, SARS Virus
ggattttaacagttcagatcgaaca

SEQ ID NO: 209708 - DNA, 25 bp, SARS Virus
gattttaacagttcagatcgaacat

SEQ ID NO: 209709 - DNA, 25 bp, SARS Virus
attttaacagtttagatcgaacatg

SEQ ID NO: 209710 - DNA, 25 bp, SARS Virus
ttttaacagttctgatcgaacatgc

SEQ ID NO: 209711 - DNA, 25 bp, SARS Virus
tttaacagttcatatcgaacatgct

SEQ ID NO: 209712 - DNA, 25 bp, SARS Virus
ttaacagttcagttcgaacatgcta

SEQ ID NO: 209713 - DNA, 25 bp, SARS Virus
taacagttcagatcgaacatgctac

SEQ ID NO: 209714 - DNA, 25 bp, SARS Virus
aacagttcagattgaacatgctact

SEQ ID NO: 209715 - DNA, 25 bp, SARS Virus
acagttcagatctaacatgctactt

SEQ ID NO: 209716 - DNA, 25 bp, SARS Virus
cagttcagatcgtacatgctacttt

SEQ ID NO: 209717 - DNA, 25 bp, SARS Virus
agttcagatcgatcatgctacttta

SEQ ID NO: 209718 - DNA, 25 bp, SARS Virus
gttcagatcgaatatgctactttag

SEQ ID NO: 209719 - DNA, 25 bp, SARS Virus
ttcagatcgaacttgctactttagc

SEQ ID NO: 209720 - DNA, 25 bp, SARS Virus
tcagatcgaacatgctactttagca

SEQ ID NO: 209721 - DNA, 25 bp, SARS Virus
cagatcgaacattctactttagcag

SEQ ID NO: 209722 - DNA, 25 bp, SARS Virus
agatcgaacatgttactttagcagt

SEQ ID NO: 209723 - DNA, 25 bp, SARS Virus
gatcgaacatgctactttagcagtg

SEQ ID NO: 209724 - DNA, 25 bp, SARS Virus
atcgaacatgcttctttagcagtgg

SEQ ID NO: 209725 - DNA, 25 bp, SARS Virus
tcgaacatgctattttagcagtgga

SEQ ID NO: 209726 - DNA, 25 bp, SARS Virus
cgaacatgctactttagcagtggac

SEQ ID NO: 209727 - DNA, 25 bp, SARS Virus
gaacatgctactttagcagtggact

SEQ ID NO: 209728 - DNA, 25 bp, SARS Virus
aacatgctactttagcagtggactt

SEQ ID NO: 209729 - DNA, 25 bp, SARS Virus
acatgctacttttgcagtggactta

SEQ ID NO: 209730 - DNA, 25 bp, SARS Virus
catgctactttatcagtggacttac

SEQ ID NO: 209731 - DNA, 25 bp, SARS Virus
atgctactttagtagtggacttacc

SEQ ID NO: 209732 - DNA, 25 bp, SARS Virus
tgctactttagctgtggacttacca

SEQ ID NO: 209733 - DNA, 25 bp, SARS Virus
gctactttagcattggacttaccaa

SEQ ID NO: 209734 - DNA, 25 bp, SARS Virus
ctactttagcagtggacttaccaaa

SEQ ID NO: 209735 - DNA, 25 bp, SARS Virus
tactttagcagttgacttaccaaag

SEQ ID NO: 209736 - DNA, 25 bp, SARS Virus
actttagcagtgtacttaccaaagt

SEQ ID NO: 209737 - DNA, 25 bp, SARS Virus
ctttagcagtggtcttaccaaagtt

SEQ ID NO: 209738 - DNA, 25 bp, SARS Virus
tttagcagtggatttaccaaagttc

SEQ ID NO: 209739 - DNA, 25 bp, SARS Virus
ttagcagtggacttaccaaagttct

SEQ ID NO: 209740 - DNA, 25 bp, SARS Virus
tagcagtggacttaccaaagttctc

SEQ ID NO: 209741 - DNA, 25 bp, SARS Virus
agcagtggactttccaaagttctcg

SEQ ID NO: 209742 - DNA, 25 bp, SARS Virus
gcagtggacttatcaaagttctcga

SEQ ID NO: 209743 - DNA, 25 bp, SARS Virus
cagtggacttactaaagttctcgac

SEQ ID NO: 209744 - DNA, 25 bp, SARS Virus
agtggacttacctaagttctcgacc

SEQ ID NO: 209745 - DNA, 25 bp, SARS Virus
gtggacttaccatagttctcgacct

SEQ ID NO: 209746 - DNA, 25 bp, SARS Virus
tggacttaccaatgttctcgaccta

SEQ ID NO: 209747 - DNA, 25 bp, SARS Virus
ggacttaccaaatttctcgacctat

SEQ ID NO: 209748 - DNA, 25 bp, SARS Virus
gacttaccaaagttctcgacctatt

SEQ ID NO: 209749 - DNA, 25 bp, SARS Virus
acttaccaaagttctcgacctattc

SEQ ID NO: 209750 - DNA, 25 bp, SARS Virus
cttaccaaagttttcgacctattct

SEQ ID NO: 209751 - DNA, 25 bp, SARS Virus
ttaccaaagttctcgacctattctt

SEQ ID NO: 209752 - DNA, 25 bp, SARS Virus
taccaaagttcttgacctattctta

SEQ ID NO: 209753 - DNA, 25 bp, SARS Virus
accaaagttctctacctattcttag

SEQ ID NO: 209754 - DNA, 25 bp, SARS Virus
ccaaagttctcgtcctattcttagt

SEQ ID NO: 209755 - DNA, 25 bp, SARS Virus
caaagttctcgatctattcttagtt

SEQ ID NO: 209756 - DNA, 25 bp, SARS Virus
aaagttctcgacttattcttagttc

SEQ ID NO: 209757 - DNA, 25 bp, SARS Virus
aagttctcgacctattcttagttcc

SEQ ID NO: 209758 - DNA, 25 bp, SARS Virus
agttctcgaccttttcttagttccc

SEQ ID NO: 209759 - DNA, 25 bp, SARS Virus
gttctcgacctattcttagttccct

SEQ ID NO: 209760 - DNA, 25 bp, SARS Virus
ttctcgacctattcttagttccctc

SEQ ID NO: 209761 - DNA, 25 bp, SARS Virus
tctcgacctatttttagttccctca

SEQ ID NO: 209762 - DNA, 25 bp, SARS Virus
ctcgacctattcttagttccctcag

SEQ ID NO: 209763 - DNA, 25 bp, SARS Virus
tcgacctattcttagttccctcaga

SEQ ID NO: 209764 - DNA, 25 bp, SARS Virus
cgacctattctttgttccctcagat

SEQ ID NO: 209765 - DNA, 25 bp, SARS Virus
gacctattcttatttccctcagatt

SEQ ID NO: 209766 - DNA, 25 bp, SARS Virus
acctattcttagttccctcagatta

SEQ ID NO: 209767 - DNA, 25 bp, SARS Virus
cctattcttagttccctcagattag

SEQ ID NO: 209768 - DNA, 25 bp, SARS Virus
ctattcttagtttcctcagattagg

SEQ ID NO: 209769 - DNA, 25 bp, SARS Virus
tattcttagttctctcagattaggt

SEQ ID NO: 209770 - DNA, 25 bp, SARS Virus
attcttagttccttcagattaggtg

SEQ ID NO: 209771 - DNA, 25 bp, SARS Virus
ttcttagttccctcagattaggtga

SEQ ID NO: 209772 - DNA, 25 bp, SARS Virus
tcttagttcccttagattaggtgaa

SEQ ID NO: 209773 - DNA, 25 bp, SARS Virus
cttagttccctctgattaggtgaat

SEQ ID NO: 209774 - DNA, 25 bp, SARS Virus
ttagttccctcatattaggtgaatt

SEQ ID NO: 209775 - DNA, 25 bp, SARS Virus
tagttccctcagtttaggtgaattt

SEQ ID NO: 209776 - DNA, 25 bp, SARS Virus
agttccctcagattaggtgaatttg

SEQ ID NO: 209777 - DNA, 25 bp, SARS Virus
gttccctcagattaggtgaatttgt

SEQ ID NO: 209778 - DNA, 25 bp, SARS Virus
ttccctcagatttggtgaatttgtt

SEQ ID NO: 209779 - DNA, 25 bp, SARS Virus
tccctcagattatgtgaatttgttt

SEQ ID NO: 209780 - DNA, 25 bp, SARS Virus
ccctcagattagttgaatttgttta

SEQ ID NO: 209781 - DNA, 25 bp, SARS Virus
cctcagattaggtgaatttgtttac

SEQ ID NO: 209782 - DNA, 25 bp, SARS Virus
ctcagattaggttaatttgtttacg

SEQ ID NO: 209783 - DNA, 25 bp, SARS Virus
tcagattaggtgtatttgtttacga

SEQ ID NO: 209784 - DNA, 25 bp, SARS Virus
cagattaggtgattttgtttacgac

SEQ ID NO: 209785 - DNA, 25 bp, SARS Virus
agattaggtgaatttgtttacgacg

SEQ ID NO: 209786 - DNA, 25 bp, SARS Virus
gattaggtgaatttgtttacgacgt

SEQ ID NO: 209787 - DNA, 25 bp, SARS Virus
attaggtgaatttgtttacgacgtt

SEQ ID NO: 209788 - DNA, 25 bp, SARS Virus
ttaggtgaatttttttacgacgttc

SEQ ID NO: 209789 - DNA, 25 bp, SARS Virus
taggtgaatttgtttacgacgttcc

SEQ ID NO: 209790 - DNA, 25 bp, SARS Virus
aggtgaatttgtttacgacgttcct

SEQ ID NO: 209791 - DNA, 25 bp, SARS Virus
ggtgaatttgtttacgacgttcctt

SEQ ID NO: 209792 - DNA, 25 bp, SARS Virus
gtgaatttgttttcgacgttccttt

SEQ ID NO: 209793 - DNA, 25 bp, SARS Virus
tgaatttgtttatgacgttcctttt

SEQ ID NO: 209794 - DNA, 25 bp, SARS Virus
gaatttgtttactacgttccttttc

SEQ ID NO: 209795 - DNA, 25 bp, SARS Virus
aatttgtttacgtcgttccttttct

SEQ ID NO: 209796 - DNA, 25 bp, SARS Virus
atttgtttacgatgttccttttctt

SEQ ID NO: 209797 - DNA, 25 bp, SARS Virus
tttgtttacgactttccttttcttg

SEQ ID NO: 209798 - DNA, 25 bp, SARS Virus
ttgtttacgacgttccttttcttgg

SEQ ID NO: 209799 - DNA, 25 bp, SARS Virus
tgtttacgacgttccttttcttgga

SEQ ID NO: 209800 - DNA, 25 bp, SARS Virus
gtttacgacgtttcttttcttggaa

SEQ ID NO: 209801 - DNA, 25 bp, SARS Virus
tttacgacgttctttttcttggaag

SEQ ID NO: 209802 - DNA, 25 bp, SARS Virus
ttacgacgttccttttcttggaagt

SEQ ID NO: 209803 - DNA, 25 bp, SARS Virus
tacgacgttccttttcttggaagtg

SEQ ID NO: 209804 - DNA, 25 bp, SARS Virus
acgacgttccttttcttggaagtgt

SEQ ID NO: 209805 - DNA, 25 bp, SARS Virus
cgacgttccttttcttggaagtgtc

SEQ ID NO: 209806 - DNA, 25 bp, SARS Virus
gacgttcctttttttggaagtgtct

SEQ ID NO: 209807 - DNA, 25 bp, SARS Virus
acgttccttttcttggaagtgtctt

SEQ ID NO: 209808 - DNA, 25 bp, SARS Virus
cgttccttttcttggaagtgtcttt

SEQ ID NO: 209809 - DNA, 25 bp, SARS Virus
gttccttttctttgaagtgtcttta

SEQ ID NO: 209810 - DNA, 25 bp, SARS Virus
ttccttttcttgtaagtgtctttag

SEQ ID NO: 209811 - DNA, 25 bp, SARS Virus
tccttttcttggtagtgtctttagg

SEQ ID NO: 209812 - DNA, 25 bp, SARS Virus
ccttttcttggatgtgtctttaggt

SEQ ID NO: 209813 - DNA, 25 bp, SARS Virus
cttttcttggaattgtctttaggta

SEQ ID NO: 209814 - DNA, 25 bp, SARS Virus
ttttcttggaagtgtctttaggtat

SEQ ID NO: 209815 - DNA, 25 bp, SARS Virus
tttcttggaagtttctttaggtatc

SEQ ID NO: 209816 - DNA, 25 bp, SARS Virus
ttcttggaagtgtctttaggtatca

SEQ ID NO: 209817 - DNA, 25 bp, SARS Virus
tcttggaagtgtttttaggtatcat

SEQ ID NO: 209818 - DNA, 25 bp, SARS Virus
cttggaagtgtctttaggtatcatc

SEQ ID NO: 209819 - DNA, 25 bp, SARS Virus
ttggaagtgtctttaggtatcatca

SEQ ID NO: 209820 - DNA, 25 bp, SARS Virus
tggaagtgtctttaggtatcatcat

SEQ ID NO: 209821 - DNA, 25 bp, SARS Virus
ggaagtgtcttttggtatcatcatt

SEQ ID NO: 209822 - DNA, 25 bp, SARS Virus
gaagtgtctttatgtatcatcattg

SEQ ID NO: 209823 - DNA, 25 bp, SARS Virus
aagtgtctttagttatcatcattgc

SEQ ID NO: 209824 - DNA, 25 bp, SARS Virus
agtgtctttaggtatcatcattgca

SEQ ID NO: 209825 - DNA, 25 bp, SARS Virus
gtgtctttaggtttcatcattgcaa

SEQ ID NO: 209826 - DNA, 25 bp, SARS Virus
tgtctttaggtatcatcattgcaat

SEQ ID NO: 209827 - DNA, 25 bp, SARS Virus
gtctttaggtattatcattgcaatc

SEQ ID NO: 209828 - DNA, 25 bp, SARS Virus
tctttaggtatcttcattgcaatct

SEQ ID NO: 209829 - DNA, 25 bp, SARS Virus
ctttaggtatcatcattgcaatctg

SEQ ID NO: 209830 - DNA, 25 bp, SARS Virus
tttaggtatcattattgcaatctgc

SEQ ID NO: 209831 - DNA, 25 bp, SARS Virus
ttaggtatcatctttgcaatctgct

SEQ ID NO: 209832 - DNA, 25 bp, SARS Virus
taggtatcatcattgcaatctgctt

SEQ ID NO: 209833 - DNA, 25 bp, SARS Virus
aggtatcatcattgcaatctgctta

SEQ ID NO: 209834 - DNA, 25 bp, SARS Virus
ggtatcatcatttcaatctgcttaa

SEQ ID NO: 209835 - DNA, 25 bp, SARS Virus
gtatcatcattgtaatctgcttaat

SEQ ID NO: 209836 - DNA, 25 bp, SARS Virus
tatcatcattgctatctgcttaatt

SEQ ID NO: 209837 - DNA, 25 bp, SARS Virus
atcatcattgcattctgcttaattc

SEQ ID NO: 209838 - DNA, 25 bp, SARS Virus
tcatcattgcaatctgcttaattct

SEQ ID NO: 209839 - DNA, 25 bp, SARS Virus
catcattgcaatttgcttaattcta

SEQ ID NO: 209840 - DNA, 25 bp, SARS Virus
atcattgcaatctgcttaattctat

SEQ ID NO: 209841 - DNA, 25 bp, SARS Virus
tcattgcaatcttcttaattctatg

SEQ ID NO: 209842 - DNA, 25 bp, SARS Virus
cattgcaatctgtttaattctatgt

SEQ ID NO: 209843 - DNA, 25 bp, SARS Virus
attgcaatctgcttaattctatgtt

SEQ ID NO: 209844 - DNA, 25 bp, SARS Virus
ttgcaatctgcttaattctatgtta

SEQ ID NO: 209845 - DNA, 25 bp, SARS Virus
tgcaatctgctttattctatgttaa

SEQ ID NO: 209846 - DNA, 25 bp, SARS Virus
gcaatctgcttatttctatgttaag

SEQ ID NO: 209847 - DNA, 25 bp, SARS Virus
caatctgcttaattctatgttaaga

SEQ ID NO: 209848 - DNA, 25 bp, SARS Virus
aatctgcttaattctatgttaagag

SEQ ID NO: 209849 - DNA, 25 bp, SARS Virus
atctgcttaattttatgttaagaga

SEQ ID NO: 209850 - DNA, 25 bp, SARS Virus
tctgcttaattctatgttaagagat

SEQ ID NO: 209851 - DNA, 25 bp, SARS Virus
ctgcttaattctttgttaagagatt

SEQ ID NO: 209852 - DNA, 25 bp, SARS Virus
tgcttaattctatgttaagagattg

SEQ ID NO: 209853 - DNA, 25 bp, SARS Virus
gcttaattctattttaagagattgc

SEQ ID NO: 209854 - DNA, 25 bp, SARS Virus
cttaattctatgttaagagattgcg

SEQ ID NO: 209855 - DNA, 25 bp, SARS Virus
ttaattctatgttaagagattgcgg

SEQ ID NO: 209856 - DNA, 25 bp, SARS Virus
taattctatgtttagagattgcggt

SEQ ID NO: 209857 - DNA, 25 bp, SARS Virus
aattctatgttatgagattgcggta

SEQ ID NO: 209858 - DNA, 25 bp, SARS Virus
attctatgttaatagattgcggtaa

SEQ ID NO: 209859 - DNA, 25 bp, SARS Virus
ttctatgttaagtgattgcggtaat

SEQ ID NO: 209860 - DNA, 25 bp, SARS Virus
tctatgttaagatattgcggtaatg

SEQ ID NO: 209861 - DNA, 25 bp, SARS Virus
ctatgttaagagtttgcggtaatgt

SEQ ID NO: 209862 - DNA, 25 bp, SARS Virus
tatgttaagagattgcggtaatgtt

SEQ ID NO: 209863 - DNA, 25 bp, SARS Virus
atgttaagagattgcggtaatgtta

SEQ ID NO: 209864 - DNA, 25 bp, SARS Virus
tgttaagagatttcggtaatgttat

SEQ ID NO: 209865 - DNA, 25 bp, SARS Virus
gttaagagattgtggtaatgttatt

SEQ ID NO: 209866 - DNA, 25 bp, SARS Virus
ttaagagattgctgtaatgttattc

SEQ ID NO: 209867 - DNA, 25 bp, SARS Virus
taagagattgcgttaatgttattct

SEQ ID NO: 209868 - DNA, 25 bp, SARS Virus
aagagattgcggtaatgttattctt

SEQ ID NO: 209869 - DNA, 25 bp, SARS Virus
agagattgcggttatgttattcttc

SEQ ID NO: 209870 - DNA, 25 bp, SARS Virus
gagattgcggtattgttattcttcc

SEQ ID NO: 209871 - DNA, 25 bp, SARS Virus
agattgcggtaatgttattcttcct

SEQ ID NO: 209872 - DNA, 25 bp, SARS Virus
gattgcggtaattttattcttcctc

SEQ ID NO: 209873 - DNA, 25 bp, SARS Virus
attgcggtaatgatattcttcctcg

SEQ ID NO: 209874 - DNA, 25 bp, SARS Virus
ttgcggtaatgtaattcttcctcgt

SEQ ID NO: 209875 - DNA, 25 bp, SARS Virus
tgcggtaatgttattcttcctcgtg

SEQ ID NO: 209876 - DNA, 25 bp, SARS Virus
gcggtaatgttaatcttcctcgtgg

SEQ ID NO: 209877 - DNA, 25 bp, SARS Virus
cggtaatgttatacttcctcgtggt

SEQ ID NO: 209878 - DNA, 25 bp, SARS Virus
ggtaatgttattattcctcgtggtt

SEQ ID NO: 209879 - DNA, 25 bp, SARS Virus
gtaatgttattcatcctcgtggttt

SEQ ID NO: 209880 - DNA, 25 bp, SARS Virus
taatgttattctacctcgtggtttt

SEQ ID NO: 209881 - DNA, 25 bp, SARS Virus
aatgttattcttactcgtggtttta

SEQ ID NO: 209882 - DNA, 25 bp, SARS Virus
atgttattcttcatcgtggttttaa

SEQ ID NO: 209883 - DNA, 25 bp, SARS Virus
tgttattcttccacgtggttttaat

SEQ ID NO: 209884 - DNA, 25 bp, SARS Virus
gttattcttcctagtggttttaatc

SEQ ID NO: 209885 - DNA, 25 bp, SARS Virus
ttattcttcctcatggttttaatct

SEQ ID NO: 209886 - DNA, 25 bp, SARS Virus
tattcttcctcgaggttttaatcta

SEQ ID NO: 209887 - DNA, 25 bp, SARS Virus
attcttcctcgtagttttaatctat

SEQ ID NO: 209888 - DNA, 25 bp, SARS Virus
ttcttcctcgtgattttaatctatt

SEQ ID NO: 209889 - DNA, 25 bp, SARS Virus
tcttcctcgtggatttaatctattc

SEQ ID NO: 209890 - DNA, 25 bp, SARS Virus
cttcctcgtggtattaatctattct

SEQ ID NO: 209891 - DNA, 25 bp, SARS Virus
ttcctcgtggttataatctattctc

SEQ ID NO: 209892 - DNA, 25 bp, SARS Virus
tcctcgtggtttaaatctattctca

SEQ ID NO: 209893 - DNA, 25 bp, SARS Virus
cctcgtggttttaatctattctcat

SEQ ID NO: 209894 - DNA, 25 bp, SARS Virus
ctcgtggttttaatctattctcatg

SEQ ID NO: 209895 - DNA, 25 bp, SARS Virus
tcgtggttttaaactattctcatgt

SEQ ID NO: 209896 - DNA, 25 bp, SARS Virus
cgtggttttaatatattctcatgtg

SEQ ID NO: 209897 - DNA, 25 bp, SARS Virus
gtggttttaatcaattctcatgtgg

SEQ ID NO: 209898 - DNA, 25 bp, SARS Virus
tggttttaatctattctcatgtggt

SEQ ID NO: 209899 - DNA, 25 bp, SARS Virus
ggttttaatctaatctcatgtggtt

SEQ ID NO: 209900 - DNA, 25 bp, SARS Virus
gttttaatctatactcatgtggttt

SEQ ID NO: 209901 - DNA, 25 bp, SARS Virus
ttttaatctattatcatgtggtttt

SEQ ID NO: 209902 - DNA, 25 bp, SARS Virus
tttaatctattcacatgtggttttc

SEQ ID NO: 209903 - DNA, 25 bp, SARS Virus
ttaatctattctaatgtggttttcg

SEQ ID NO: 209904 - DNA, 25 bp, SARS Virus
taatctattctcatgtggttttcgt

SEQ ID NO: 209905 - DNA, 25 bp, SARS Virus
aatctattctcaagtggttttcgtc

SEQ ID NO: 209906 - DNA, 25 bp, SARS Virus
atctattctcatatggttttcgtcg

SEQ ID NO: 209907 - DNA, 25 bp, SARS Virus
tctattctcatgaggttttcgtcgt

SEQ ID NO: 209908 - DNA, 25 bp, SARS Virus
ctattctcatgtagttttcgtcgtc

SEQ ID NO: 209909 - DNA, 25 bp, SARS Virus
tattctcatgtgattttcgtcgtca

SEQ ID NO: 209910 - DNA, 25 bp, SARS Virus
attctcatgtggatttcgtcgtcaa

SEQ ID NO: 209911 - DNA, 25 bp, SARS Virus
ttctcatgtggtattcgtcgtcaat

SEQ ID NO: 209912 - DNA, 25 bp, SARS Virus
tctcatgtggttatcgtcgtcaatg

SEQ ID NO: 209913 - DNA, 25 bp, SARS Virus
ctcatgtggtttacgtcgtcaatgt

SEQ ID NO: 209914 - DNA, 25 bp, SARS Virus
tcatgtggttttagtcgtcaatgtg

SEQ ID NO: 209915 - DNA, 25 bp, SARS Virus
catgtggttttcatcgtcaatgtgt

SEQ ID NO: 209916 - DNA, 25 bp, SARS Virus
atgtggttttcgacgtcaatgtgtc

SEQ ID NO: 209917 - DNA, 25 bp, SARS Virus
tgtggttttcgtagtcaatgtgtct

SEQ ID NO: 209918 - DNA, 25 bp, SARS Virus
gtggttttcgtcatcaatgtgtcta

SEQ ID NO: 209919 - DNA, 25 bp, SARS Virus
tggttttcgtcgacaatgtgtctaa

SEQ ID NO: 209920 - DNA, 25 bp, SARS Virus
ggttttcgtcgtaaatgtgtctaat

SEQ ID NO: 209921 - DNA, 25 bp, SARS Virus
gttttcgtcgtcaatgtgtctaatc

SEQ ID NO: 209922 - DNA, 25 bp, SARS Virus
ttttcgtcgtcaatgtgtctaatct

SEQ ID NO: 209923 - DNA, 25 bp, SARS Virus
tttcgtcgtcaaagtgtctaatctc

SEQ ID NO: 209924 - DNA, 25 bp, SARS Virus
ttcgtcgtcaatatgtctaatctct

SEQ ID NO: 209925 - DNA, 25 bp, SARS Virus
tcgtcgtcaatgagtctaatctctt

SEQ ID NO: 209926 - DNA, 25 bp, SARS Virus
cgtcgtcaatgtatctaatctcttg

SEQ ID NO: 209927 - DNA, 25 bp, SARS Virus
gtcgtcaatgtgactaatctcttgg

SEQ ID NO: 209928 - DNA, 25 bp, SARS Virus
tcgtcaatgtgtataatctcttgga

SEQ ID NO: 209929 - DNA, 25 bp, SARS Virus
cgtcaatgtgtcaaatctcttggat

SEQ ID NO: 209930 - DNA, 25 bp, SARS Virus
gtcaatgtgtctaatctcttggatt

SEQ ID NO: 209931 - DNA, 25 bp, SARS Virus
tcaatgtgtctaatctcttggattc

SEQ ID NO: 209932 - DNA, 25 bp, SARS Virus
caatgtgtctaaactcttggattcg

SEQ ID NO: 209933 - DNA, 25 bp, SARS Virus
aatgtgtctaatatcttggattcgt

SEQ ID NO: 209934 - DNA, 25 bp, SARS Virus
atgtgtctaatcacttggattcgtt

SEQ ID NO: 209935 - DNA, 25 bp, SARS Virus
tgtgtctaatctattggattcgttt

SEQ ID NO: 209936 - DNA, 25 bp, SARS Virus
gtgtctaatctcatggattcgttta

SEQ ID NO: 209937 - DNA, 25 bp, SARS Virus
tgtctaatctctaggattcgtttat

SEQ ID NO: 209938 - DNA, 25 bp, SARS Virus
gtctaatctcttagattcgtttatg

SEQ ID NO: 209939 - DNA, 25 bp, SARS Virus
tctaatctcttgaattcgtttatga

SEQ ID NO: 209940 - DNA, 25 bp, SARS Virus
ctaatctcttggattcgtttatgaa

SEQ ID NO: 209941 - DNA, 25 bp, SARS Virus
taatctcttggaatcgtttatgaat

SEQ ID NO: 209942 - DNA, 25 bp, SARS Virus
aatctcttggatacgtttatgaatt

SEQ ID NO: 209943 - DNA, 25 bp, SARS Virus
atctcttggattagtttatgaattg

SEQ ID NO: 209944 - DNA, 25 bp, SARS Virus
tctcttggattcatttatgaattgt

SEQ ID NO: 209945 - DNA, 25 bp, SARS Virus
ctcttggattcgattatgaattgtt

SEQ ID NO: 209946 - DNA, 25 bp, SARS Virus
tcttggattcgtatatgaattgttg

SEQ ID NO: 209947 - DNA, 25 bp, SARS Virus
cttggattcgttaatgaattgttgt

SEQ ID NO: 209948 - DNA, 25 bp, SARS Virus
ttggattcgtttatgaattgttgtt

SEQ ID NO: 209949 - DNA, 25 bp, SARS Virus
tggattcgtttaagaattgttgtta

SEQ ID NO: 209950 - DNA, 25 bp, SARS Virus
ggattcgtttataaattgttgttat

SEQ ID NO: 209951 - DNA, 25 bp, SARS Virus
gattcgtttatgaattgttgttatc

SEQ ID NO: 209952 - DNA, 25 bp, SARS Virus
attcgtttatgaattgttgttatcg

SEQ ID NO: 209953 - DNA, 25 bp, SARS Virus
ttcgtttatgaaatgttgttatcgg

SEQ ID NO: 209954 - DNA, 25 bp, SARS Virus
tcgtttatgaatagttgttatcggt

SEQ ID NO: 209955 - DNA, 25 bp, SARS Virus
cgtttatgaattattgttatcggtg

SEQ ID NO: 209956 - DNA, 25 bp, SARS Virus
gtttatgaattgatgttatcggtgt

SEQ ID NO: 209957 - DNA, 25 bp, SARS Virus
tttatgaattgtagttatcggtgta

SEQ ID NO: 209958 - DNA, 25 bp, SARS Virus
ttatgaattgttattatcggtgtat

SEQ ID NO: 209959 - DNA, 25 bp, SARS Virus
tatgaattgttgatatcggtgtatc

SEQ ID NO: 209960 - DNA, 25 bp, SARS Virus
atgaattgttgtaatcggtgtatcg

SEQ ID NO: 209961 - DNA, 25 bp, SARS Virus
tgaattgttgttatcggtgtatcgc

SEQ ID NO: 209962 - DNA, 25 bp, SARS Virus
gaattgttgttaacggtgtatcgct

SEQ ID NO: 209963 - DNA, 25 bp, SARS Virus
aattgttgttataggtgtatcgcta

SEQ ID NO: 209964 - DNA, 25 bp, SARS Virus
attgttgttatcagtgtatcgctaa

SEQ ID NO: 209965 - DNA, 25 bp, SARS Virus
ttgttgttatcgatgtatcgctaac

SEQ ID NO: 209966 - DNA, 25 bp, SARS Virus
tgttgttatcggagtatcgctaaca

SEQ ID NO: 209967 - DNA, 25 bp, SARS Virus
gttgttatcggtatatcgctaacac

SEQ ID NO: 209968 - DNA, 25 bp, SARS Virus
ttgttatcggtgaatcgctaacact

SEQ ID NO: 209969 - DNA, 25 bp, SARS Virus
tgttatcggtgtatcgctaacactt

SEQ ID NO: 209970 - DNA, 25 bp, SARS Virus
gttatcggtgtaacgctaacacttg

SEQ ID NO: 209971 - DNA, 25 bp, SARS Virus
ttatcggtgtatagctaacacttgt

SEQ ID NO: 209972 - DNA, 25 bp, SARS Virus
tatcggtgtatcactaacacttgtt

SEQ ID NO: 209973 - DNA, 25 bp, SARS Virus
atcggtgtatcgataacacttgtta

SEQ ID NO: 209974 - DNA, 25 bp, SARS Virus
tcggtgtatcgcaaacacttgttaa

SEQ ID NO: 209975 - DNA, 25 bp, SARS Virus
cggtgtatcgctaacacttgttaaa

SEQ ID NO: 209976 - DNA, 25 bp, SARS Virus
ggtgtatcgctaacacttgttaaat

SEQ ID NO: 209977 - DNA, 25 bp, SARS Virus
gtgtatcgctaaaacttgttaaatc

SEQ ID NO: 209978 - DNA, 25 bp, SARS Virus
tgtatcgctaacacttgttaaatct

SEQ ID NO: 209979 - DNA, 25 bp, SARS Virus
gtatcgctaacaattgttaaatctt

SEQ ID NO: 209980 - DNA, 25 bp, SARS Virus
tatcgctaacacatgttaaatcttt

SEQ ID NO: 209981 - DNA, 25 bp, SARS Virus
atcgctaacactagttaaatctttt

SEQ ID NO: 209982 - DNA, 25 bp, SARS Virus
tcgctaacacttattaaatctttta

SEQ ID NO: 209983 - DNA, 25 bp, SARS Virus
cgctaacacttgataaatcttttaa

SEQ ID NO: 209984 - DNA, 25 bp, SARS Virus
gctaacacttgtaaaatcttttaaa

SEQ ID NO: 209985 - DNA, 25 bp, SARS Virus
ctaacacttgttaaatcttttaaac

SEQ ID NO: 209986 - DNA, 25 bp, SARS Virus
taacacttgttaaatcttttaaacc

SEQ ID NO: 209987 - DNA, 25 bp, SARS Virus
aacacttgttaaatcttttaaaccc

SEQ ID NO: 209988 - DNA, 25 bp, SARS Virus
acacttgttaaaacttttaaaccca

SEQ ID NO: 209989 - DNA, 25 bp, SARS Virus
cacttgttaaatattttaaacccac

SEQ ID NO: 209990 - DNA, 25 bp, SARS Virus
acttgttaaatcatttaaacccact

SEQ ID NO: 209991 - DNA, 25 bp, SARS Virus
cttgttaaatctattaaacccactg

SEQ ID NO: 209992 - DNA, 25 bp, SARS Virus
ttgttaaatcttataaacccactga

SEQ ID NO: 209993 - DNA, 25 bp, SARS Virus
tgttaaatctttaaaacccactgaa

SEQ ID NO: 209994 - DNA, 25 bp, SARS Virus
gttaaatcttttaaacccactgaag

SEQ ID NO: 209995 - DNA, 25 bp, SARS Virus
ttaaatcttttaaacccactgaagt

SEQ ID NO: 209996 - DNA, 25 bp, SARS Virus
taaatcttttaaacccactgaagtg

SEQ ID NO: 209997 - DNA, 25 bp, SARS Virus
aaatcttttaaaaccactgaagtgt

SEQ ID NO: 209998 - DNA, 25 bp, SARS Virus
aatcttttaaacacactgaagtgta

SEQ ID NO: 209999 - DNA, 25 bp, SARS Virus
atcttttaaaccaactgaagtgtat

SEQ ID NO: 210000 - DNA, 25 bp, SARS Virus
tcttttaaacccactgaagtgtatt

SEQ ID NO: 210001 - DNA, 25 bp, SARS Virus
cttttaaacccaatgaagtgtatta

SEQ ID NO: 210002 - DNA, 25 bp, SARS Virus
ttttaaacccacagaagtgtattaa

SEQ ID NO: 210003 - DNA, 25 bp, SARS Virus
tttaaacccactaaagtgtattaat

SEQ ID NO: 210004 - DNA, 25 bp, SARS Virus
ttaaacccactgaagtgtattaatt

SEQ ID NO: 210005 - DNA, 25 bp, SARS Virus
taaacccactgaagtgtattaatta

SEQ ID NO: 210006 - DNA, 25 bp, SARS Virus
aaacccactgaaatgtattaattac

SEQ ID NO: 210007 - DNA, 25 bp, SARS Virus
aacccactgaagagtattaattacg

SEQ ID NO: 210008 - DNA, 25 bp, SARS Virus
acccactgaagtatattaattacgg

SEQ ID NO: 210009 - DNA, 25 bp, SARS Virus
cccactgaagtgaattaattacggc

SEQ ID NO: 210010 - DNA, 25 bp, SARS Virus
ccactgaagtgtattaattacggcc

SEQ ID NO: 210011 - DNA, 25 bp, SARS Virus
cactgaagtgtaataattacggccg

SEQ ID NO: 210012 - DNA, 25 bp, SARS Virus
actgaagtgtataaattacggccgt

SEQ ID NO: 210013 - DNA, 25 bp, SARS Virus
ctgaagtgtattaattacggccgta

SEQ ID NO: 210014 - DNA, 25 bp, SARS Virus
tgaagtgtattaattacggccgtag

SEQ ID NO: 210015 - DNA, 25 bp, SARS Virus
gaagtgtattaaatacggccgtagg

SEQ ID NO: 210016 - DNA, 25 bp, SARS Virus
aagtgtattaataacggccgtaggt

SEQ ID NO: 210017 - DNA, 25 bp, SARS Virus
agtgtattaattacggccgtaggtt

SEQ ID NO: 210018 - DNA, 25 bp, SARS Virus
gtgtattaattaaggccgtaggttt

SEQ ID NO: 210019 - DNA, 25 bp, SARS Virus
tgtattaattacagccgtaggtttg

SEQ ID NO: 210020 - DNA, 25 bp, SARS Virus
gtattaattacgaccgtaggtttgt

SEQ ID NO: 210021 - DNA, 25 bp, SARS Virus
tattaattacggacgtaggtttgta

SEQ ID NO: 210022 - DNA, 25 bp, SARS Virus
attaattacggcagtaggtttgtat

SEQ ID NO: 210023 - DNA, 25 bp, SARS Virus
ttaattacggccataggtttgtatt

SEQ ID NO: 210024 - DNA, 25 bp, SARS Virus
taattacggccgaaggtttgtatta

SEQ ID NO: 210025 - DNA, 25 bp, SARS Virus
aattacggccgtaggtttgtattaa

SEQ ID NO: 210026 - DNA, 25 bp, SARS Virus
attacggccgtaagtttgtattaaa

SEQ ID NO: 210027 - DNA, 25 bp, SARS Virus
ttacggccgtagatttgtattaaat

SEQ ID NO: 210028 - DNA, 25 bp, SARS Virus
tacggccgtaggattgtattaaatc

SEQ ID NO: 210029 - DNA, 25 bp, SARS Virus
acggccgtaggtatgtattaaatcg

SEQ ID NO: 210030 - DNA, 25 bp, SARS Virus
cggccgtaggttagtattaaatcgt

SEQ ID NO: 210031 - DNA, 25 bp, SARS Virus
ggccgtaggtttatattaaatcgtt

SEQ ID NO: 210032 - DNA, 25 bp, SARS Virus
gccgtaggtttgaattaaatcgttg

SEQ ID NO: 210033 - DNA, 25 bp, SARS Virus
ccgtaggtttgtattaaatcgttgt

SEQ ID NO: 210034 - DNA, 25 bp, SARS Virus
cgtaggtttgtaataaatcgttgtg

SEQ ID NO: 210035 - DNA, 25 bp, SARS Virus
gtaggtttgtataaaatcgttgtga

SEQ ID NO: 210036 - DNA, 25 bp, SARS Virus
taggtttgtattaaatcgttgtgag

SEQ ID NO: 210037 - DNA, 25 bp, SARS Virus
aggtttgtattaaatcgttgtgaga

SEQ ID NO: 210038 - DNA, 25 bp, SARS Virus
ggtttgtattaaatcgttgtgagaa

SEQ ID NO: 210039 - DNA, 25 bp, SARS Virus
gtttgtattaaaacgttgtgagaat

SEQ ID NO: 210040 - DNA, 25 bp, SARS Virus
tttgtattaaatagttgtgagaatt

SEQ ID NO: 210041 - DNA, 25 bp, SARS Virus
ttgtattaaatcattgtgagaattg

SEQ ID NO: 210042 - DNA, 25 bp, SARS Virus
tgtattaaatcgatgtgagaattgt

SEQ ID NO: 210043 - DNA, 25 bp, SARS Virus
gtattaaatcgtagtgagaattgtg

SEQ ID NO: 210044 - DNA, 25 bp, SARS Virus
tattaaatcgttatgagaattgtga

SEQ ID NO: 210045 - DNA, 25 bp, SARS Virus
attaaatcgttgagagaattgtgat

SEQ ID NO: 210046 - DNA, 25 bp, SARS Virus
ttaaatcgttgtaagaattgtgata

SEQ ID NO: 210047 - DNA, 25 bp, SARS Virus
taaatcgttgtgagaattgtgataa

SEQ ID NO: 210048 - DNA, 25 bp, SARS Virus
aaatcgttgtgaaaattgtgataaa

SEQ ID NO: 210049 - DNA, 25 bp, SARS Virus
aatcgttgtgagaattgtgataaaa

SEQ ID NO: 210050 - DNA, 25 bp, SARS Virus
atcgttgtgagaattgtgataaaaa

SEQ ID NO: 210051 - DNA, 25 bp, SARS Virus
tcgttgtgagaaatgtgataaaaat

SEQ ID NO: 210052 - DNA, 25 bp, SARS Virus
cgttgtgagaatagtgataaaaatc

SEQ ID NO: 210053 - DNA, 25 bp, SARS Virus
gttgtgagaattatgataaaaatcg

SEQ ID NO: 210054 - DNA, 25 bp, SARS Virus
ttgtgagaattgagataaaaatcgt

SEQ ID NO: 210055 - DNA, 25 bp, SARS Virus
tgtgagaattgtaataaaaatcgtt

SEQ ID NO: 210056 - DNA, 25 bp, SARS Virus
gtgagaattgtgataaaaatcgtta

SEQ ID NO: 210057 - DNA, 25 bp, SARS Virus
tgagaattgtgaaaaaaatcgttat

SEQ ID NO: 210058 - DNA, 25 bp, SARS Virus
gagaattgtgataaaaatcgttatc

SEQ ID NO: 210059 - DNA, 25 bp, SARS Virus
agaattgtgataaaaatcgttatca

SEQ ID NO: 210060 - DNA, 25 bp, SARS Virus
gaattgtgataaaaatcgttatcaa

SEQ ID NO: 210061 - DNA, 25 bp, SARS Virus
aattgtgataaaaatcgttatcaac

SEQ ID NO: 210062 - DNA, 25 bp, SARS Virus
attgtgataaaaatcgttatcaaca

SEQ ID NO: 210063 - DNA, 25 bp, SARS Virus
ttgtgataaaaaacgttatcaacat

SEQ ID NO: 210064 - DNA, 25 bp, SARS Virus
tgtgataaaaatagttatcaacatc

SEQ ID NO: 210065 - DNA, 25 bp, SARS Virus
gtgataaaaatcattatcaacatcc

SEQ ID NO: 210066 - DNA, 25 bp, SARS Virus
tgataaaaatcgatatcaacatcca

SEQ ID NO: 210067 - DNA, 25 bp, SARS Virus
gataaaaatcgtaatcaacatccat

SEQ ID NO: 210068 - DNA, 25 bp, SARS Virus
ataaaaatcgttatcaacatccatc

SEQ ID NO: 210069 - DNA, 25 bp, SARS Virus
taaaaatcgttaacaacatccatca

SEQ ID NO: 210070 - DNA, 25 bp, SARS Virus
aaaaatcgttataaacatccatcac

SEQ ID NO: 210071 - DNA, 25 bp, SARS Virus
aaaatcgttatcaacatccatcact

SEQ ID NO: 210072 - DNA, 25 bp, SARS Virus
aaatcgttatcaacatccatcactt

SEQ ID NO: 210073 - DNA, 25 bp, SARS Virus
aatcgttatcaaaatccatcacttc

SEQ ID NO: 210074 - DNA, 25 bp, SARS Virus
atcgttatcaacatccatcacttcg

SEQ ID NO: 210075 - DNA, 25 bp, SARS Virus
tcgttatcaacaaccatcacttcga

SEQ ID NO: 210076 - DNA, 25 bp, SARS Virus
cgttatcaacatacatcacttcgag

SEQ ID NO: 210077 - DNA, 25 bp, SARS Virus
gttatcaacatcaatcacttcgaga

SEQ ID NO: 210078 - DNA, 25 bp, SARS Virus
ttatcaacatccatcacttcgagat

SEQ ID NO: 210079 - DNA, 25 bp, SARS Virus
tatcaacatccaacacttcgagatt

SEQ ID NO: 210080 - DNA, 25 bp, SARS Virus
atcaacatccataacttcgagatta

SEQ ID NO: 210081 - DNA, 25 bp, SARS Virus
tcaacatccatcacttcgagattaa

SEQ ID NO: 210082 - DNA, 25 bp, SARS Virus
caacatccatcaattcgagattaag

SEQ ID NO: 210083 - DNA, 25 bp, SARS Virus
aacatccatcacatcgagattaaga

SEQ ID NO: 210084 - DNA, 25 bp, SARS Virus
acatccatcactacgagattaagat

SEQ ID NO: 210085 - DNA, 25 bp, SARS Virus
catccatcacttagagattaagatc

SEQ ID NO: 210086 - DNA, 25 bp, SARS Virus
atccatcacttcaagattaagatct

SEQ ID NO: 210087 - DNA, 25 bp, SARS Virus
tccatcacttcgagattaagatctt

SEQ ID NO: 210088 - DNA, 25 bp, SARS Virus
ccatcacttcgaaattaagatctta

SEQ ID NO: 210089 - DNA, 25 bp, SARS Virus
catcacttcgagattaagatcttaa

SEQ ID NO: 210090 - DNA, 25 bp, SARS Virus
atcacttcgagaataagatcttaac

SEQ ID NO: 210091 - DNA, 25 bp, SARS Virus
tcacttcgagataaagatcttaacc

SEQ ID NO: 210092 - DNA, 25 bp, SARS Virus
cacttcgagattaagatcttaacca

SEQ ID NO: 210093 - DNA, 25 bp, SARS Virus
acttcgagattaagatcttaaccat

SEQ ID NO: 210094 - DNA, 25 bp, SARS Virus
cttcgagattaaaatcttaaccatg

SEQ ID NO: 210095 - DNA, 25 bp, SARS Virus
ttcgagattaagatcttaaccatga

SEQ ID NO: 210096 - DNA, 25 bp, SARS Virus
tcgagattaagaacttaaccatgaa

SEQ ID NO: 210097 - DNA, 25 bp, SARS Virus
cgagattaagatattaaccatgaaa

SEQ ID NO: 210098 - DNA, 25 bp, SARS Virus
gagattaagatcataaccatgaaaa

SEQ ID NO: 210099 - DNA, 25 bp, SARS Virus
agattaagatctaaaccatgaaaat

SEQ ID NO: 210100 - DNA, 25 bp, SARS Virus
gattaagatcttaaccatgaaaatc

SEQ ID NO: 210101 - DNA, 25 bp, SARS Virus
attaagatcttaaccatgaaaatca

SEQ ID NO: 210102 - DNA, 25 bp, SARS Virus
ttaagatcttaaacatgaaaatcat

SEQ ID NO: 210103 - DNA, 25 bp, SARS Virus
taagatcttaacaatgaaaatcatt

SEQ ID NO: 210104 - DNA, 25 bp, SARS Virus
aagatcttaaccatgaaaatcattt

SEQ ID NO: 210105 - DNA, 25 bp, SARS Virus
agatcttaaccaagaaaatcatttt

SEQ ID NO: 210106 - DNA, 25 bp, SARS Virus
gatcttaaccataaaaatcattttc

SEQ ID NO: 210107 - DNA, 25 bp, SARS Virus
atcttaaccatgaaaatcattttca

SEQ ID NO: 210108 - DNA, 25 bp, SARS Virus
tcttaaccatgaaaatcattttcat

SEQ ID NO: 210109 - DNA, 25 bp, SARS Virus
cttaaccatgaaaatcattttcatg

SEQ ID NO: 210110 - DNA, 25 bp, SARS Virus
ttaaccatgaaaatcattttcatgt

SEQ ID NO: 210111 - DNA, 25 bp, SARS Virus
taaccatgaaaaacattttcatgtg

SEQ ID NO: 210112 - DNA, 25 bp, SARS Virus
aaccatgaaaataattttcatgtgt

SEQ ID NO: 210113 - DNA, 25 bp, SARS Virus
accatgaaaatcattttcatgtgtt

SEQ ID NO: 210114 - DNA, 25 bp, SARS Virus
ccatgaaaatcaatttcatgtgtta

SEQ ID NO: 210115 - DNA, 25 bp, SARS Virus
catgaaaatcatattcatgtgttaa

SEQ ID NO: 210116 - DNA, 25 bp, SARS Virus
atgaaaatcattatcatgtgttaac

SEQ ID NO: 210117 - DNA, 25 bp, SARS Virus
tgaaaatcatttacatgtgttaacc

SEQ ID NO: 210118 - DNA, 25 bp, SARS Virus
gaaaatcattttaatgtgttaacct

SEQ ID NO: 210119 - DNA, 25 bp, SARS Virus
aaaatcattttcatgtgttaacctt

SEQ ID NO: 210120 - DNA, 25 bp, SARS Virus
aaatcattttcaagtgttaaccttg

SEQ ID NO: 210121 - DNA, 25 bp, SARS Virus
aatcattttcatatgttaaccttgt

SEQ ID NO: 210122 - DNA, 25 bp, SARS Virus
atcattttcatgagttaaccttgtt

SEQ ID NO: 210123 - DNA, 25 bp, SARS Virus
tcattttcatgtattaaccttgtta

SEQ ID NO: 210124 - DNA, 25 bp, SARS Virus
cattttcatgtgataaccttgttat

SEQ ID NO: 210125 - DNA, 25 bp, SARS Virus
attttcatgtgtaaaccttgttatt

SEQ ID NO: 210126 - DNA, 25 bp, SARS Virus
ttttcatgtgttaaccttgttatta

SEQ ID NO: 210127 - DNA, 25 bp, SARS Virus
tttcatgtgttaaccttgttattac

SEQ ID NO: 210128 - DNA, 25 bp, SARS Virus
ttcatgtgttaaacttgttattaca

SEQ ID NO: 210129 - DNA, 25 bp, SARS Virus
tcatgtgttaacattgttattacat

SEQ ID NO: 210130 - DNA, 25 bp, SARS Virus
catgtgttaaccatgttattacatt

SEQ ID NO: 210131 - DNA, 25 bp, SARS Virus
atgtgttaacctagttattacattt

SEQ ID NO: 210132 - DNA, 25 bp, SARS Virus
tgtgttaaccttattattacatttg

SEQ ID NO: 210133 - DNA, 25 bp, SARS Virus
gtgttaaccttgatattacatttgt

SEQ ID NO: 210134 - DNA, 25 bp, SARS Virus
tgttaaccttgtaattacatttgtg

SEQ ID NO: 210135 - DNA, 25 bp, SARS Virus
gttaaccttgttattacatttgtgt

SEQ ID NO: 210136 - DNA, 25 bp, SARS Virus
ttaaccttgttaatacatttgtgta

SEQ ID NO: 210137 - DNA, 25 bp, SARS Virus
taaccttgttataacatttgtgtat

SEQ ID NO: 210138 - DNA, 25 bp, SARS Virus
aaccttgttattacatttgtgtatt

SEQ ID NO: 210139 - DNA, 25 bp, SARS Virus
accttgttattaaatttgtgtattc

SEQ ID NO: 210140 - DNA, 25 bp, SARS Virus
ccttgttattacatttgtgtattcc

SEQ ID NO: 210141 - DNA, 25 bp, SARS Virus
cttgttattacaattgtgtattccg

SEQ ID NO: 210142 - DNA, 25 bp, SARS Virus
ttgttattacatatgtgtattccgt

SEQ ID NO: 210143 - DNA, 25 bp, SARS Virus
tgttattacattagtgtattccgta

SEQ ID NO: 210144 - DNA, 25 bp, SARS Virus
gttattacatttatgtattccgtat

SEQ ID NO: 210145 - DNA, 25 bp, SARS Virus
ttattacatttgagtattccgtata

SEQ ID NO: 210146 - DNA, 25 bp, SARS Virus
tattacatttgtatattccgtatat

SEQ ID NO: 210147 - DNA, 25 bp, SARS Virus
attacatttgtgaattccgtatatt

SEQ ID NO: 210148 - DNA, 25 bp, SARS Virus
ttacatttgtgtattccgtatatta

SEQ ID NO: 210149 - DNA, 25 bp, SARS Virus
tacatttgtgtaatccgtatattaa

SEQ ID NO: 210150 - DNA, 25 bp, SARS Virus
acatttgtgtataccgtatattaac

SEQ ID NO: 210151 - DNA, 25 bp, SARS Virus
catttgtgtattacgtatattaaca

SEQ ID NO: 210152 - DNA, 25 bp, SARS Virus
atttgtgtattcagtatattaacaa

SEQ ID NO: 210153 - DNA, 25 bp, SARS Virus
tttgtgtattccatatattaacaat

SEQ ID NO: 210154 - DNA, 25 bp, SARS Virus
ttgtgtattccgaatattaacaatt

SEQ ID NO: 210155 - DNA, 25 bp, SARS Virus
tgtgtattccgtatattaacaattt

SEQ ID NO: 210156 - DNA, 25 bp, SARS Virus
gtgtattccgtaaattaacaatttg

SEQ ID NO: 210157 - DNA, 25 bp, SARS Virus
tgtattccgtatattaacaatttgt

SEQ ID NO: 210158 - DNA, 25 bp, SARS Virus
gtattccgtataataacaatttgtg

SEQ ID NO: 210159 - DNA, 25 bp, SARS Virus
tattccgtatataaacaatttgtgt

SEQ ID NO: 210160 - DNA, 25 bp, SARS Virus
attccgtatattaacaatttgtgtg

SEQ ID NO: 210161 - DNA, 25 bp, SARS Virus
ttccgtatattaacaatttgtgtgc

SEQ ID NO: 210162 - DNA, 25 bp, SARS Virus
tccgtatattaaaaatttgtgtgca

SEQ ID NO: 210163 - DNA, 25 bp, SARS Virus
ccgtatattaacaatttgtgtgcaa

SEQ ID NO: 210164 - DNA, 25 bp, SARS Virus
cgtatattaacaatttgtgtgcaac

SEQ ID NO: 210165 - DNA, 25 bp, SARS Virus
gtatattaacaaattgtgtgcaaca

SEQ ID NO: 210166 - DNA, 25 bp, SARS Virus
tatattaacaatatgtgtgcaacac

SEQ ID NO: 210167 - DNA, 25 bp, SARS Virus
atattaacaattagtgtgcaacacg

SEQ ID NO: 210168 - DNA, 25 bp, SARS Virus
tattaacaatttatgtgcaacacga

SEQ ID NO: 210169 - DNA, 25 bp, SARS Virus
attaacaatttgagtgcaacacgat

SEQ ID NO: 210170 - DNA, 25 bp, SARS Virus
ttaacaatttgtatgcaacacgatt

SEQ ID NO: 210171 - DNA, 25 bp, SARS Virus
taacaatttgtgagcaacacgatta

SEQ ID NO: 210172 - DNA, 25 bp, SARS Virus
aacaatttgtgtacaacacgattag

SEQ ID NO: 210173 - DNA, 25 bp, SARS Virus
acaatttgtgtgaaacacgattaga

SEQ ID NO: 210174 - DNA, 25 bp, SARS Virus
caatttgtgtgcaacacgattagag

SEQ ID NO: 210175 - DNA, 25 bp, SARS Virus
aatttgtgtgcaacacgattagaga

SEQ ID NO: 210176 - DNA, 25 bp, SARS Virus
atttgtgtgcaaaacgattagagaa

SEQ ID NO: 210177 - DNA, 25 bp, SARS Virus
tttgtgtgcaacacgattagagaat

SEQ ID NO: 210178 - DNA, 25 bp, SARS Virus
ttgtgtgcaacaagattagagaatc

SEQ ID NO: 210179 - DNA, 25 bp, SARS Virus
tgtgtgcaacacaattagagaatcg

SEQ ID NO: 210180 - DNA, 25 bp, SARS Virus
gtgtgcaacacgattagagaatcgc

SEQ ID NO: 210181 - DNA, 25 bp, SARS Virus
tgtgcaacacgaatagagaatcgcg

SEQ ID NO: 210182 - DNA, 25 bp, SARS Virus
gtgcaacacgataagagaatcgcgt

SEQ ID NO: 210183 - DNA, 25 bp, SARS Virus
tgcaacacgattagagaatcgcgtt

SEQ ID NO: 210184 - DNA, 25 bp, SARS Virus
gcaacacgattaaagaatcgcgtta

SEQ ID NO: 210185 - DNA, 25 bp, SARS Virus
caacacgattagagaatcgcgttaa

SEQ ID NO: 210186 - DNA, 25 bp, SARS Virus
aacacgattagaaaatcgcgttaaa

SEQ ID NO: 210187 - DNA, 25 bp, SARS Virus
acacgattagagaatcgcgttaaac

SEQ ID NO: 210188 - DNA, 25 bp, SARS Virus
cacgattagagaatcgcgttaaact

SEQ ID NO: 210189 - DNA, 25 bp, SARS Virus
acgattagagaaacgcgttaaacta

SEQ ID NO: 210190 - DNA, 25 bp, SARS Virus
cgattagagaatagcgttaaactac

SEQ ID NO: 210191 - DNA, 25 bp, SARS Virus
gattagagaatcacgttaaactaca

SEQ ID NO: 210192 - DNA, 25 bp, SARS Virus
attagagaatcgagttaaactacaa

SEQ ID NO: 210193 - DNA, 25 bp, SARS Virus
ttagagaatcgcattaaactacaac

SEQ ID NO: 210194 - DNA, 25 bp, SARS Virus
tagagaatcgcgataaactacaaca

SEQ ID NO: 210195 - DNA, 25 bp, SARS Virus
agagaatcgcgtaaaactacaacat

SEQ ID NO: 210196 - DNA, 25 bp, SARS Virus
gagaatcgcgttaaactacaacatt

SEQ ID NO: 210197 - DNA, 25 bp, SARS Virus
agaatcgcgttaaactacaacatta

SEQ ID NO: 210198 - DNA, 25 bp, SARS Virus
gaatcgcgttaaactacaacattaa

SEQ ID NO: 210199 - DNA, 25 bp, SARS Virus
aatcgcgttaaaatacaacattaac

SEQ ID NO: 210200 - DNA, 25 bp, SARS Virus
atcgcgttaaacaacaacattaacg

SEQ ID NO: 210201 - DNA, 25 bp, SARS Virus
tcgcgttaaactacaacattaacga

SEQ ID NO: 210202 - DNA, 25 bp, SARS Virus
cgcgttaaactaaaacattaacgac

SEQ ID NO: 210203 - DNA, 25 bp, SARS Virus
gcgttaaactacaacattaacgacg

SEQ ID NO: 210204 - DNA, 25 bp, SARS Virus
cgttaaactacaacattaacgacga

SEQ ID NO: 210205 - DNA, 25 bp, SARS Virus
gttaaactacaaaattaacgacgaa

SEQ ID NO: 210206 - DNA, 25 bp, SARS Virus
ttaaactacaacattaacgacgaac

SEQ ID NO: 210207 - DNA, 25 bp, SARS Virus
taaactacaacaataacgacgaaca

SEQ ID NO: 210208 - DNA, 25 bp, SARS Virus
aaactacaacataaacgacgaacag

SEQ ID NO: 210209 - DNA, 25 bp, SARS Virus
aactacaacattaacgacgaacagg

SEQ ID NO: 210210 - DNA, 25 bp, SARS Virus
actacaacattaacgacgaacagga

SEQ ID NO: 210211 - DNA, 25 bp, SARS Virus
ctacaacattaaagacgaacaggat

SEQ ID NO: 210212 - DNA, 25 bp, SARS Virus
tacaacattaacaacgaacaggatt

SEQ ID NO: 210213 - DNA, 25 bp, SARS Virus
acaacattaacgacgaacaggattc

SEQ ID NO: 210214 - DNA, 25 bp, SARS Virus
caacattaacgaagaacaggattct

SEQ ID NO: 210215 - DNA, 25 bp, SARS Virus
aacattaacgacaaacaggattctt

SEQ ID NO: 210216 - DNA, 25 bp, SARS Virus
acattaacgacgaacaggattctta

SEQ ID NO: 210217 - DNA, 25 bp, SARS Virus
cattaacgacgaacaggattcttac

SEQ ID NO: 210218 - DNA, 25 bp, SARS Virus
attaacgacgaaaaggattcttacc

SEQ ID NO: 210219 - DNA, 25 bp, SARS Virus
ttaacgacgaacaggattcttacca

SEQ ID NO: 210220 - DNA, 25 bp, SARS Virus
taacgacgaacaagattcttaccaa

SEQ ID NO: 210221 - DNA, 25 bp, SARS Virus
aacgacgaacagaattcttaccaaa

SEQ ID NO: 210222 - DNA, 25 bp, SARS Virus
acgacgaacaggattcttaccaaac

SEQ ID NO: 210223 - DNA, 25 bp, SARS Virus
cgacgaacaggaatcttaccaaact

SEQ ID NO: 210224 - DNA, 25 bp, SARS Virus
gacgaacaggatacttaccaaactg

SEQ ID NO: 210225 - DNA, 25 bp, SARS Virus
acgaacaggattattaccaaactgt

SEQ ID NO: 210226 - DNA, 25 bp, SARS Virus
cgaacaggattcataccaaactgta

SEQ ID NO: 210227 - DNA, 25 bp, SARS Virus
gaacaggattctaaccaaactgtat

SEQ ID NO: 210228 - DNA, 25 bp, SARS Virus
aacaggattcttaccaaactgtatt

SEQ ID NO: 210229 - DNA, 25 bp, SARS Virus
acaggattcttaacaaactgtattc

SEQ ID NO: 210230 - DNA, 25 bp, SARS Virus
caggattcttacaaaactgtattcg

SEQ ID NO: 210231 - DNA, 25 bp, SARS Virus
aggattcttaccaaactgtattcgg

SEQ ID NO: 210232 - DNA, 25 bp, SARS Virus
ggattcttaccaaactgtattcggt

SEQ ID NO: 210233 - DNA, 25 bp, SARS Virus
gattcttaccaaactgtattcggtt

SEQ ID NO: 210234 - DNA, 25 bp, SARS Virus
attcttaccaaaatgtattcggttt

SEQ ID NO: 210235 - DNA, 25 bp, SARS Virus
ttcttaccaaacagtattcggtttt

SEQ ID NO: 210236 - DNA, 25 bp, SARS Virus
tcttaccaaactatattcggtttta

SEQ ID NO: 210237 - DNA, 25 bp, SARS Virus
cttaccaaactgaattcggttttaa

SEQ ID NO: 210238 - DNA, 25 bp, SARS Virus
ttaccaaactgtattcggttttaaa

SEQ ID NO: 210239 - DNA, 25 bp, SARS Virus
taccaaactgtaatcggttttaaaa

SEQ ID NO: 210240 - DNA, 25 bp, SARS Virus
accaaactgtatacggttttaaaat

SEQ ID NO: 210241 - DNA, 25 bp, SARS Virus
ccaaactgtattaggttttaaaatg

SEQ ID NO: 210242 - DNA, 25 bp, SARS Virus
caaactgtattcagttttaaaatga

SEQ ID NO: 210243 - DNA, 25 bp, SARS Virus
aaactgtattcgattttaaaatgag

SEQ ID NO: 210244 - DNA, 25 bp, SARS Virus
aactgtattcggatttaaaatgagg

SEQ ID NO: 210245 - DNA, 25 bp, SARS Virus
actgtattcggtattaaaatgaggt

SEQ ID NO: 210246 - DNA, 25 bp, SARS Virus
ctgtattcggttataaaatgaggtt

SEQ ID NO: 210247 - DNA, 25 bp, SARS Virus
tgtattcggtttaaaaatgaggttc

SEQ ID NO: 210248 - DNA, 25 bp, SARS Virus
gtattcggttttaaaatgaggttcc

SEQ ID NO: 210249 - DNA, 25 bp, SARS Virus
tattcggttttaaaatgaggttcct

SEQ ID NO: 210250 - DNA, 25 bp, SARS Virus
attcggttttaaaatgaggttcctt

SEQ ID NO: 210251 - DNA, 25 bp, SARS Virus
ttcggttttaaaatgaggttccttg

SEQ ID NO: 210252 - DNA, 25 bp, SARS Virus
tcggttttaaaaagaggttccttgt

SEQ ID NO: 210253 - DNA, 25 bp, SARS Virus
cggttttaaaataaggttccttgtg

SEQ ID NO: 210254 - DNA, 25 bp, SARS Virus
ggttttaaaatgaggttccttgtga

SEQ ID NO: 210255 - DNA, 25 bp, SARS Virus
gttttaaaatgaagttccttgtgat

SEQ ID NO: 210256 - DNA, 25 bp, SARS Virus
ttttaaaatgagattccttgtgata

SEQ ID NO: 210257 - DNA, 25 bp, SARS Virus
tttaaaatgaggatccttgtgataa

SEQ ID NO: 210258 - DNA, 25 bp, SARS Virus
ttaaaatgaggtaccttgtgataat

SEQ ID NO: 210259 - DNA, 25 bp, SARS Virus
taaaatgaggttacttgtgataatt

SEQ ID NO: 210260 - DNA, 25 bp, SARS Virus
aaaatgaggttcattgtgataatta

SEQ ID NO: 210261 - DNA, 25 bp, SARS Virus
aaatgaggttccatgtgataattaa

SEQ ID NO: 210262 - DNA, 25 bp, SARS Virus
aatgaggttcctagtgataattaac

SEQ ID NO: 210263 - DNA, 25 bp, SARS Virus
atgaggttccttatgataattaacg

SEQ ID NO: 210264 - DNA, 25 bp, SARS Virus
tgaggttccttgagataattaacgt

SEQ ID NO: 210265 - DNA, 25 bp, SARS Virus
gaggttccttgtaataattaacgtc

SEQ ID NO: 210266 - DNA, 25 bp, SARS Virus
aggttccttgtgataattaacgtcg

SEQ ID NO: 210267 - DNA, 25 bp, SARS Virus
ggttccttgtgaaaattaacgtcgt

SEQ ID NO: 210268 - DNA, 25 bp, SARS Virus
gttccttgtgataattaacgtcgtt

SEQ ID NO: 210269 - DNA, 25 bp, SARS Virus
ttccttgtgataattaacgtcgtta

SEQ ID NO: 210270 - DNA, 25 bp, SARS Virus
tccttgtgataaataacgtcgttat

SEQ ID NO: 210271 - DNA, 25 bp, SARS Virus
ccttgtgataataaacgtcgttatg

SEQ ID NO: 210272 - DNA, 25 bp, SARS Virus
cttgtgataattaacgtcgttatgg

SEQ ID NO: 210273 - DNA, 25 bp, SARS Virus
ttgtgataattaacgtcgttatggt

SEQ ID NO: 210274 - DNA, 25 bp, SARS Virus
tgtgataattaaagtcgttatggta

SEQ ID NO: 210275 - DNA, 25 bp, SARS Virus
gtgataattaacatcgttatggtac

SEQ ID NO: 210276 - DNA, 25 bp, SARS Virus
tgataattaacgacgttatggtact

SEQ ID NO: 210277 - DNA, 25 bp, SARS Virus
gataattaacgtagttatggtactc

SEQ ID NO: 210278 - DNA, 25 bp, SARS Virus
ataattaacgtcattatggtactca

SEQ ID NO: 210279 - DNA, 25 bp, SARS Virus
taattaacgtcgatatggtactcac

SEQ ID NO: 210280 - DNA, 25 bp, SARS Virus
aattaacgtcgtaatggtactcacc

SEQ ID NO: 210281 - DNA, 25 bp, SARS Virus
attaacgtcgttatggtactcaccg

SEQ ID NO: 210282 - DNA, 25 bp, SARS Virus
ttaacgtcgttaaggtactcaccgt

SEQ ID NO: 210283 - DNA, 25 bp, SARS Virus
taacgtcgttatagtactcaccgtt

SEQ ID NO: 210284 - DNA, 25 bp, SARS Virus
aacgtcgttatgatactcaccgtta

SEQ ID NO: 210285 - DNA, 25 bp, SARS Virus
acgtcgttatggaactcaccgttaa

SEQ ID NO: 210286 - DNA, 25 bp, SARS Virus
cgtcgttatggtactcaccgttaac

SEQ ID NO: 210287 - DNA, 25 bp, SARS Virus
gtcgttatggtaatcaccgttaaca

SEQ ID NO: 210288 - DNA, 25 bp, SARS Virus
tcgttatggtacacaccgttaacaa

SEQ ID NO: 210289 - DNA, 25 bp, SARS Virus
cgttatggtactaaccgttaacaaa

SEQ ID NO: 210290 - DNA, 25 bp, SARS Virus
gttatggtactcaccgttaacaaaa

SEQ ID NO: 210291 - DNA, 25 bp, SARS Virus
ttatggtactcaacgttaacaaaaa

SEQ ID NO: 210292 - DNA, 25 bp, SARS Virus
tatggtactcacagttaacaaaaat

SEQ ID NO: 210293 - DNA, 25 bp, SARS Virus
atggtactcaccattaacaaaaatt

SEQ ID NO: 210294 - DNA, 25 bp, SARS Virus
tggtactcaccgataacaaaaattt

SEQ ID NO: 210295 - DNA, 25 bp, SARS Virus
ggtactcaccgtaaacaaaaatttg

SEQ ID NO: 210296 - DNA, 25 bp, SARS Virus
gtactcaccgttaacaaaaatttgg

SEQ ID NO: 210297 - DNA, 25 bp, SARS Virus
tactcaccgttaacaaaaatttgga

SEQ ID NO: 210298 - DNA, 25 bp, SARS Virus
actcaccgttaaaaaaaatttggat

SEQ ID NO: 210299 - DNA, 25 bp, SARS Virus
ctcaccgttaacaaaaatttggatt

SEQ ID NO: 210300 - DNA, 25 bp, SARS Virus
tcaccgttaacaaaaatttggattc

SEQ ID NO: 210301 - DNA, 25 bp, SARS Virus
caccgttaacaaaaatttggattcc

SEQ ID NO: 210302 - DNA, 25 bp, SARS Virus
accgttaacaaaaatttggattccg

SEQ ID NO: 210303 - DNA, 25 bp, SARS Virus
ccgttaacaaaaatttggattccga

SEQ ID NO: 210304 - DNA, 25 bp, SARS Virus
cgttaacaaaaaattggattccgat

SEQ ID NO: 210305 - DNA, 25 bp, SARS Virus
gttaacaaaaatatggattccgatc

SEQ ID NO: 210306 - DNA, 25 bp, SARS Virus
ttaacaaaaattaggattccgatca

SEQ ID NO: 210307 - DNA, 25 bp, SARS Virus
taacaaaaatttagattccgatcac

SEQ ID NO: 210308 - DNA, 25 bp, SARS Virus
aacaaaaatttgaattccgatcact

SEQ ID NO: 210309 - DNA, 25 bp, SARS Virus
acaaaaatttggattccgatcactt

SEQ ID NO: 210310 - DNA, 25 bp, SARS Virus
caaaaatttggaatccgatcacttt

SEQ ID NO: 210311 - DNA, 25 bp, SARS Virus
aaaaatttggataccgatcactttc

SEQ ID NO: 210312 - DNA, 25 bp, SARS Virus
aaaatttggattacgatcactttcg

SEQ ID NO: 210313 - DNA, 25 bp, SARS Virus
aaatttggattcagatcactttcga

SEQ ID NO: 210314 - DNA, 25 bp, SARS Virus
aatttggattccaatcactttcgag

SEQ ID NO: 210315 - DNA, 25 bp, SARS Virus
atttggattccgatcactttcgagt

SEQ ID NO: 210316 - DNA, 25 bp, SARS Virus
tttggattccgaacactttcgagta

SEQ ID NO: 210317 - DNA, 25 bp, SARS Virus
ttggattccgataactttcgagtaa

SEQ ID NO: 210318 - DNA, 25 bp, SARS Virus
tggattccgatcactttcgagtaat

SEQ ID NO: 210319 - DNA, 25 bp, SARS Virus
ggattccgatcaatttcgagtaatc

SEQ ID NO: 210320 - DNA, 25 bp, SARS Virus
gattccgatcacattcgagtaatcc

SEQ ID NO: 210321 - DNA, 25 bp, SARS Virus
attccgatcactatcgagtaatcca

SEQ ID NO: 210322 - DNA, 25 bp, SARS Virus
ttccgatcacttacgagtaatccaa

SEQ ID NO: 210323 - DNA, 25 bp, SARS Virus
tccgatcactttagagtaatccaaa

SEQ ID NO: 210324 - DNA, 25 bp, SARS Virus
ccgatcactttcaagtaatccaaag

SEQ ID NO: 210325 - DNA, 25 bp, SARS Virus
cgatcactttcgagtaatccaaaga

SEQ ID NO: 210326 - DNA, 25 bp, SARS Virus
gatcactttcgaataatccaaagaa

SEQ ID NO: 210327 - DNA, 25 bp, SARS Virus
atcactttcgagaaatccaaagaat

SEQ ID NO: 210328 - DNA, 25 bp, SARS Virus
tcactttcgagtaatccaaagaatt

SEQ ID NO: 210329 - DNA, 25 bp, SARS Virus
cactttcgagtaatccaaagaatta

SEQ ID NO: 210330 - DNA, 25 bp, SARS Virus
actttcgagtaaaccaaagaattac

SEQ ID NO: 210331 - DNA, 25 bp, SARS Virus
ctttcgagtaatacaaagaattacc

SEQ ID NO: 210332 - DNA, 25 bp, SARS Virus
tttcgagtaatcaaaagaattacca

SEQ ID NO: 210333 - DNA, 25 bp, SARS Virus
ttcgagtaatccaaagaattaccat

SEQ ID NO: 210334 - DNA, 25 bp, SARS Virus
tcgagtaatccaaagaattaccatt

SEQ ID NO: 210335 - DNA, 25 bp, SARS Virus
cgagtaatccaaagaattaccatta

SEQ ID NO: 210336 - DNA, 25 bp, SARS Virus
gagtaatccaaaaaattaccattac

SEQ ID NO: 210337 - DNA, 25 bp, SARS Virus
agtaatccaaagaattaccattacg

SEQ ID NO: 210338 - DNA, 25 bp, SARS Virus
gtaatccaaagaattaccattacga

SEQ ID NO: 210339 - DNA, 25 bp, SARS Virus
taatccaaagaaataccattacgaa

SEQ ID NO: 210340 - DNA, 25 bp, SARS Virus
aatccaaagaataaccattacgaac

SEQ ID NO: 210341 - DNA, 25 bp, SARS Virus
atccaaagaattaccattacgaaca

SEQ ID NO: 210342 - DNA, 25 bp, SARS Virus
tccaaagaattaacattacgaacac

SEQ ID NO: 210343 - DNA, 25 bp, SARS Virus
ccaaagaattacaattacgaacaca

SEQ ID NO: 210344 - DNA, 25 bp, SARS Virus
caaagaattaccattacgaacacaa

SEQ ID NO: 210345 - DNA, 25 bp, SARS Virus
aaagaattaccaatacgaacacaaa

SEQ ID NO: 210346 - DNA, 25 bp, SARS Virus
aagaattaccataacgaacacaaaa

SEQ ID NO: 210347 - DNA, 25 bp, SARS Virus
agaattaccattacgaacacaaaag

SEQ ID NO: 210348 - DNA, 25 bp, SARS Virus
gaattaccattaagaacacaaaagg

SEQ ID NO: 210349 - DNA, 25 bp, SARS Virus
aattaccattacaaacacaaaaggt

SEQ ID NO: 210350 - DNA, 25 bp, SARS Virus
attaccattacgaacacaaaaggtg

SEQ ID NO: 210351 - DNA, 25 bp, SARS Virus
ttaccattacgaacacaaaaggtgt

SEQ ID NO: 210352 - DNA, 25 bp, SARS Virus
taccattacgaaaacaaaaggtgta

SEQ ID NO: 210353 - DNA, 25 bp, SARS Virus
accattacgaacacaaaaggtgtat

SEQ ID NO: 210354 - DNA, 25 bp, SARS Virus
ccattacgaacaaaaaaggtgtatt

SEQ ID NO: 210355 - DNA, 25 bp, SARS Virus
cattacgaacacaaaaggtgtattc

SEQ ID NO: 210356 - DNA, 25 bp, SARS Virus
attacgaacacaaaaggtgtattcg

SEQ ID NO: 210357 - DNA, 25 bp, SARS Virus
ttacgaacacaaaaggtgtattcgt

SEQ ID NO: 210358 - DNA, 25 bp, SARS Virus
tacgaacacaaaaggtgtattcgtc

SEQ ID NO: 210359 - DNA, 25 bp, SARS Virus
acgaacacaaaaagtgtattcgtcg

SEQ ID NO: 210360 - DNA, 25 bp, SARS Virus
cgaacacaaaagatgtattcgtcgg

SEQ ID NO: 210361 - DNA, 25 bp, SARS Virus
attgcggtaatgctattcttcctcg

SEQ ID NO: 210362 - DNA, 25 bp, SARS Virus
ttgcggtaatgtcattcttcctcgt

SEQ ID NO: 210363 - DNA, 25 bp, SARS Virus
tgcggtaatgttcttcttcctcgtg

SEQ ID NO: 210364 - DNA, 25 bp, SARS Virus
gcggtaatgttactcttcctcgtgg

SEQ ID NO: 210365 - DNA, 25 bp, SARS Virus
cggtaatgttatccttcctcgtggt

SEQ ID NO: 210366 - DNA, 25 bp, SARS Virus
ggtaatgttattcttcctcgtggtt

SEQ ID NO: 210367 - DNA, 25 bp, SARS Virus
gtaatgttattcctcctcgtggttt

SEQ ID NO: 210368 - DNA, 25 bp, SARS Virus
taatgttattctccctcgtggtttt

SEQ ID NO: 210369 - DNA, 25 bp, SARS Virus
aatgttattcttcctcgtggtttta

SEQ ID NO: 210370 - DNA, 25 bp, SARS Virus
atgttattcttcctcgtggttttaa

SEQ ID NO: 210371 - DNA, 25 bp, SARS Virus
tgttattcttccccgtggttttaat

SEQ ID NO: 210372 - DNA, 25 bp, SARS Virus
gttattcttcctcgtggttttaatc

SEQ ID NO: 210373 - DNA, 25 bp, SARS Virus
ttattcttcctcctggttttaatct

SEQ ID NO: 210374 - DNA, 25 bp, SARS Virus
tattcttcctcgcggttttaatcta

SEQ ID NO: 210375 - DNA, 25 bp, SARS Virus
attcttcctcgtcgttttaatctat

SEQ ID NO: 210376 - DNA, 25 bp, SARS Virus
ttcttcctcgtgcttttaatctatt

SEQ ID NO: 210377 - DNA, 25 bp, SARS Virus
tcttcctcgtggctttaatctattc

SEQ ID NO: 210378 - DNA, 25 bp, SARS Virus
cttcctcgtggtcttaatctattct

SEQ ID NO: 210379 - DNA, 25 bp, SARS Virus
ttcctcgtggttctaatctattctc

SEQ ID NO: 210380 - DNA, 25 bp, SARS Virus
tcctcgtggtttcaatctattctca

SEQ ID NO: 210381 - DNA, 25 bp, SARS Virus
cctcgtggttttcatctattctcat

SEQ ID NO: 210382 - DNA, 25 bp, SARS Virus
ctcgtggttttactctattctcatg

SEQ ID NO: 210383 - DNA, 25 bp, SARS Virus
tcgtggttttaacctattctcatgt

SEQ ID NO: 210384 - DNA, 25 bp, SARS Virus
cgtggttttaatctattctcatgtg

SEQ ID NO: 210385 - DNA, 25 bp, SARS Virus
gtggttttaatccattctcatgtgg

SEQ ID NO: 210386 - DNA, 25 bp, SARS Virus
tggttttaatctcttctcatgtggt

SEQ ID NO: 210387 - DNA, 25 bp, SARS Virus
ggttttaatctactctcatgtggtt

SEQ ID NO: 210388 - DNA, 25 bp, SARS Virus
gttttaatctatcctcatgtggttt

SEQ ID NO: 210389 - DNA, 25 bp, SARS Virus
ttttaatctattctcatgtggtttt

SEQ ID NO: 210390 - DNA, 25 bp, SARS Virus
tttaatctattcccatgtggttttc

SEQ ID NO: 210391 - DNA, 25 bp, SARS Virus
ttaatctattctcatgtggttttcg

SEQ ID NO: 210392 - DNA, 25 bp, SARS Virus
taatctattctcctgtggttttcgt

SEQ ID NO: 210393 - DNA, 25 bp, SARS Virus
aatctattctcacgtggttttcgtc

SEQ ID NO: 210394 - DNA, 25 bp, SARS Virus
atctattctcatctggttttcgtcg

SEQ ID NO: 210395 - DNA, 25 bp, SARS Virus
tctattctcatgcggttttcgtcgt

SEQ ID NO: 210396 - DNA, 25 bp, SARS Virus
ctattctcatgtcgttttcgtcgtc

SEQ ID NO: 210397 - DNA, 25 bp, SARS Virus
tattctcatgtgcttttcgtcgtca

SEQ ID NO: 210398 - DNA, 25 bp, SARS Virus
attctcatgtggctttcgtcgtcaa

SEQ ID NO: 210399 - DNA, 25 bp, SARS Virus
ttctcatgtggtcttcgtcgtcaat

SEQ ID NO: 210400 - DNA, 25 bp, SARS Virus
tctcatgtggttctcgtcgtcaatg

SEQ ID NO: 210401 - DNA, 25 bp, SARS Virus
ctcatgtggtttccgtcgtcaatgt

SEQ ID NO: 210402 - DNA, 25 bp, SARS Virus
tcatgtggttttcgtcgtcaatgtg

SEQ ID NO: 210403 - DNA, 25 bp, SARS Virus
catgtggttttcctcgtcaatgtgt

SEQ ID NO: 210404 - DNA, 25 bp, SARS Virus
atgtggttttcgccgtcaatgtgtc

SEQ ID NO: 210405 - DNA, 25 bp, SARS Virus
tgtggttttcgtcgtcaatgtgtct

SEQ ID NO: 210406 - DNA, 25 bp, SARS Virus
gtggttttcgtcctcaatgtgtcta

SEQ ID NO: 210407 - DNA, 25 bp, SARS Virus
tggttttcgtcgccaatgtgtctaa

SEQ ID NO: 210408 - DNA, 25 bp, SARS Virus
ggttttcgtcgtcaatgtgtctaat

SEQ ID NO: 210409 - DNA, 25 bp, SARS Virus
gttttcgtcgtccatgtgtctaatc

SEQ ID NO: 210410 - DNA, 25 bp, SARS Virus
ttttcgtcgtcactgtgtctaatct

SEQ ID NO: 210411 - DNA, 25 bp, SARS Virus
tttcgtcgtcaacgtgtctaatctc

SEQ ID NO: 210412 - DNA, 25 bp, SARS Virus
ttcgtcgtcaatctgtctaatctct

SEQ ID NO: 210413 - DNA, 25 bp, SARS Virus
tcgtcgtcaatgcgtctaatctctt

SEQ ID NO: 210414 - DNA, 25 bp, SARS Virus
cgtcgtcaatgtctctaatctcttg

SEQ ID NO: 210415 - DNA, 25 bp, SARS Virus
gtcgtcaatgtgcctaatctcttgg

SEQ ID NO: 210416 - DNA, 25 bp, SARS Virus
tcgtcaatgtgtctaatctcttgga

SEQ ID NO: 210417 - DNA, 25 bp, SARS Virus
cgtcaatgtgtccaatctcttggat

SEQ ID NO: 210418 - DNA, 25 bp, SARS Virus
gtcaatgtgtctcatctcttggatt

SEQ ID NO: 210419 - DNA, 25 bp, SARS Virus
tcaatgtgtctactctcttggattc

SEQ ID NO: 210420 - DNA, 25 bp, SARS Virus
caatgtgtctaacctcttggattcg

SEQ ID NO: 210421 - DNA, 25 bp, SARS Virus
aatgtgtctaatctcttggattcgt

SEQ ID NO: 210422 - DNA, 25 bp, SARS Virus
atgtgtctaatcccttggattcgtt

SEQ ID NO: 210423 - DNA, 25 bp, SARS Virus
tgtgtctaatctcttggattcgttt

SEQ ID NO: 210424 - DNA, 25 bp, SARS Virus
gtgtctaatctcctggattcgttta

SEQ ID NO: 210425 - DNA, 25 bp, SARS Virus
tgtctaatctctcggattcgtttat

SEQ ID NO: 210426 - DNA, 25 bp, SARS Virus
gtctaatctcttcgattcgtttatg

SEQ ID NO: 210427 - DNA, 25 bp, SARS Virus
tctaatctcttgcattcgtttatga

SEQ ID NO: 210428 - DNA, 25 bp, SARS Virus
ctaatctcttggcttcgtttatgaa

SEQ ID NO: 210429 - DNA, 25 bp, SARS Virus
taatctcttggactcgtttatgaat

SEQ ID NO: 210430 - DNA, 25 bp, SARS Virus
aatctcttggatccgtttatgaatt

SEQ ID NO: 210431 - DNA, 25 bp, SARS Virus
atctcttggattcgtttatgaattg

SEQ ID NO: 210432 - DNA, 25 bp, SARS Virus
tctcttggattcctttatgaattgt

SEQ ID NO: 210433 - DNA, 25 bp, SARS Virus
ctcttggattcgcttatgaattgtt

SEQ ID NO: 210434 - DNA, 25 bp, SARS Virus
tcttggattcgtctatgaattgttg

SEQ ID NO: 210435 - DNA, 25 bp, SARS Virus
cttggattcgttcatgaattgttgt

SEQ ID NO: 210436 - DNA, 25 bp, SARS Virus
ttggattcgtttctgaattgttgtt

SEQ ID NO: 210437 - DNA, 25 bp, SARS Virus
tggattcgtttacgaattgttgtta

SEQ ID NO: 210438 - DNA, 25 bp, SARS Virus
ggattcgtttatcaattgttgttat

SEQ ID NO: 210439 - DNA, 25 bp, SARS Virus
gattcgtttatgcattgttgttatc

SEQ ID NO: 210440 - DNA, 25 bp, SARS Virus
attcgtttatgacttgttgttatcg

SEQ ID NO: 210441 - DNA, 25 bp, SARS Virus
ttcgtttatgaactgttgttatcgg

SEQ ID NO: 210442 - DNA, 25 bp, SARS Virus
tcgtttatgaatcgttgttatcggt

SEQ ID NO: 210443 - DNA, 25 bp, SARS Virus
cgtttatgaattcttgttatcggtg

SEQ ID NO: 210444 - DNA, 25 bp, SARS Virus
gtttatgaattgctgttatcggtgt

SEQ ID NO: 210445 - DNA, 25 bp, SARS Virus
tttatgaattgtcgttatcggtgta

SEQ ID NO: 210446 - DNA, 25 bp, SARS Virus
ttatgaattgttcttatcggtgtat

SEQ ID NO: 210447 - DNA, 25 bp, SARS Virus
tatgaattgttgctatcggtgtatc

SEQ ID NO: 210448 - DNA, 25 bp, SARS Virus
atgaattgttgtcatcggtgtatcg

SEQ ID NO: 210449 - DNA, 25 bp, SARS Virus
tgaattgttgttctcggtgtatcgc

SEQ ID NO: 210450 - DNA, 25 bp, SARS Virus
gaattgttgttaccggtgtatcgct

SEQ ID NO: 210451 - DNA, 25 bp, SARS Virus
aattgttgttatcggtgtatcgcta

SEQ ID NO: 210452 - DNA, 25 bp, SARS Virus
attgttgttatccgtgtatcgctaa

SEQ ID NO: 210453 - DNA, 25 bp, SARS Virus
ttgttgttatcgctgtatcgctaac

SEQ ID NO: 210454 - DNA, 25 bp, SARS Virus
tgttgttatcggcgtatcgctaaca

SEQ ID NO: 210455 - DNA, 25 bp, SARS Virus
gttgttatcggtctatcgctaacac

SEQ ID NO: 210456 - DNA, 25 bp, SARS Virus
ttgttatcggtgcatcgctaacact

SEQ ID NO: 210457 - DNA, 25 bp, SARS Virus
tgttatcggtgtctcgctaacactt

SEQ ID NO: 210458 - DNA, 25 bp, SARS Virus
gttatcggtgtaccgctaacacttg

SEQ ID NO: 210459 - DNA, 25 bp, SARS Virus
ttatcggtgtatcgctaacacttgt

SEQ ID NO: 210460 - DNA, 25 bp, SARS Virus
tatcggtgtatccctaacacttgtt

SEQ ID NO: 210461 - DNA, 25 bp, SARS Virus
atcggtgtatcgctaacacttgtta

SEQ ID NO: 210462 - DNA, 25 bp, SARS Virus
tcggtgtatcgccaacacttgttaa

SEQ ID NO: 210463 - DNA, 25 bp, SARS Virus
cggtgtatcgctcacacttgttaaa

SEQ ID NO: 210464 - DNA, 25 bp, SARS Virus
ggtgtatcgctaccacttgttaaat

SEQ ID NO: 210465 - DNA, 25 bp, SARS Virus
gtgtatcgctaacacttgttaaatc

SEQ ID NO: 210466 - DNA, 25 bp, SARS Virus
tgtatcgctaacccttgttaaatct

SEQ ID NO: 210467 - DNA, 25 bp, SARS Virus
gtatcgctaacacttgttaaatctt

SEQ ID NO: 210468 - DNA, 25 bp, SARS Virus
tatcgctaacacctgttaaatcttt

SEQ ID NO: 210469 - DNA, 25 bp, SARS Virus
atcgctaacactcgttaaatctttt

SEQ ID NO: 210470 - DNA, 25 bp, SARS Virus
tcgctaacacttcttaaatctttta

SEQ ID NO: 210471 - DNA, 25 bp, SARS Virus
cgctaacacttgctaaatcttttaa

SEQ ID NO: 210472 - DNA, 25 bp, SARS Virus
gctaacacttgtcaaatcttttaaa

SEQ ID NO: 210473 - DNA, 25 bp, SARS Virus
ctaacacttgttcaatcttttaaac

SEQ ID NO: 210474 - DNA, 25 bp, SARS Virus
taacacttgttacatcttttaaacc

SEQ ID NO: 210475 - DNA, 25 bp, SARS Virus
aacacttgttaactcttttaaaccc

SEQ ID NO: 210476 - DNA, 25 bp, SARS Virus
acacttgttaaaccttttaaaccca

SEQ ID NO: 210477 - DNA, 25 bp, SARS Virus
cacttgttaaatcttttaaacccac

SEQ ID NO: 210478 - DNA, 25 bp, SARS Virus
acttgttaaatcctttaaacccact

SEQ ID NO: 210479 - DNA, 25 bp, SARS Virus
cttgttaaatctcttaaacccactg

SEQ ID NO: 210480 - DNA, 25 bp, SARS Virus
ttgttaaatcttctaaacccactga

SEQ ID NO: 210481 - DNA, 25 bp, SARS Virus
tgttaaatctttcaaacccactgaa

SEQ ID NO: 210482 - DNA, 25 bp, SARS Virus
gttaaatcttttcaacccactgaag

SEQ ID NO: 210483 - DNA, 25 bp, SARS Virus
ttaaatcttttacacccactgaagt

SEQ ID NO: 210484 - DNA, 25 bp, SARS Virus
taaatcttttaaccccactgaagtg

SEQ ID NO: 210485 - DNA, 25 bp, SARS Virus
aaatcttttaaacccactgaagtgt

SEQ ID NO: 210486 - DNA, 25 bp, SARS Virus
aatcttttaaacccactgaagtgta

SEQ ID NO: 210487 - DNA, 25 bp, SARS Virus
atcttttaaacccactgaagtgtat

SEQ ID NO: 210488 - DNA, 25 bp, SARS Virus
tcttttaaaccccctgaagtgtatt

SEQ ID NO: 210489 - DNA, 25 bp, SARS Virus
cttttaaacccactgaagtgtatta

SEQ ID NO: 210490 - DNA, 25 bp, SARS Virus
ttttaaacccaccgaagtgtattaa

SEQ ID NO: 210491 - DNA, 25 bp, SARS Virus
tttaaacccactcaagtgtattaat

SEQ ID NO: 210492 - DNA, 25 bp, SARS Virus
ttaaacccactgcagtgtattaatt

SEQ ID NO: 210493 - DNA, 25 bp, SARS Virus
taaacccactgacgtgtattaatta

SEQ ID NO: 210494 - DNA, 25 bp, SARS Virus
aaacccactgaactgtattaattac

SEQ ID NO: 210495 - DNA, 25 bp, SARS Virus
aacccactgaagcgtattaattacg

SEQ ID NO: 210496 - DNA, 25 bp, SARS Virus
acccactgaagtctattaattacgg

SEQ ID NO: 210497 - DNA, 25 bp, SARS Virus
cccactgaagtgcattaattacggc

SEQ ID NO: 210498 - DNA, 25 bp, SARS Virus
ccactgaagtgtcttaattacggcc

SEQ ID NO: 210499 - DNA, 25 bp, SARS Virus
cactgaagtgtactaattacggccg

SEQ ID NO: 210500 - DNA, 25 bp, SARS Virus
actgaagtgtatcaattacggccgt

SEQ ID NO: 210501 - DNA, 25 bp, SARS Virus
ctgaagtgtattcattacggccgta

SEQ ID NO: 210502 - DNA, 25 bp, SARS Virus
tgaagtgtattacttacggccgtag

SEQ ID NO: 210503 - DNA, 25 bp, SARS Virus
gaagtgtattaactacggccgtagg

SEQ ID NO: 210504 - DNA, 25 bp, SARS Virus
aagtgtattaatcacggccgtaggt

SEQ ID NO: 210505 - DNA, 25 bp, SARS Virus
agtgtattaattccggccgtaggtt

SEQ ID NO: 210506 - DNA, 25 bp, SARS Virus
gtgtattaattacggccgtaggttt

SEQ ID NO: 210507 - DNA, 25 bp, SARS Virus
tgtattaattaccgccgtaggtttg

SEQ ID NO: 210508 - DNA, 25 bp, SARS Virus
gtattaattacgcccgtaggtttgt

SEQ ID NO: 210509 - DNA, 25 bp, SARS Virus
tattaattacggccgtaggtttgta

SEQ ID NO: 210510 - DNA, 25 bp, SARS Virus
attaattacggccgtaggtttgtat

SEQ ID NO: 210511 - DNA, 25 bp, SARS Virus
ttaattacggccctaggtttgtatt

SEQ ID NO: 210512 - DNA, 25 bp, SARS Virus
taattacggccgcaggtttgtatta

SEQ ID NO: 210513 - DNA, 25 bp, SARS Virus
aattacggccgtcggtttgtattaa

SEQ ID NO: 210514 - DNA, 25 bp, SARS Virus
attacggccgtacgtttgtattaaa

SEQ ID NO: 210515 - DNA, 25 bp, SARS Virus
ttacggccgtagctttgtattaaat

SEQ ID NO: 210516 - DNA, 25 bp, SARS Virus
tacggccgtaggcttgtattaaatc

SEQ ID NO: 210517 - DNA, 25 bp, SARS Virus
acggccgtaggtctgtattaaatcg

SEQ ID NO: 210518 - DNA, 25 bp, SARS Virus
cggccgtaggttcgtattaaatcgt

SEQ ID NO: 210519 - DNA, 25 bp, SARS Virus
ggccgtaggtttctattaaatcgtt

SEQ ID NO: 210520 - DNA, 25 bp, SARS Virus
gccgtaggtttgcattaaatcgttg

SEQ ID NO: 210521 - DNA, 25 bp, SARS Virus
ccgtaggtttgtcttaaatcgttgt

SEQ ID NO: 210522 - DNA, 25 bp, SARS Virus
cgtaggtttgtactaaatcgttgtg

SEQ ID NO: 210523 - DNA, 25 bp, SARS Virus
gtaggtttgtatcaaatcgttgtga

SEQ ID NO: 210524 - DNA, 25 bp, SARS Virus
taggtttgtattcaatcgttgtgag

SEQ ID NO: 210525 - DNA, 25 bp, SARS Virus
aggtttgtattacatcgttgtgaga

SEQ ID NO: 210526 - DNA, 25 bp, SARS Virus
ggtttgtattaactcgttgtgagaa

SEQ ID NO: 210527 - DNA, 25 bp, SARS Virus
gtttgtattaaaccgttgtgagaat

SEQ ID NO: 210528 - DNA, 25 bp, SARS Virus
tttgtattaaatcgttgtgagaatt

SEQ ID NO: 210529 - DNA, 25 bp, SARS Virus
ttgtattaaatccttgtgagaattg

SEQ ID NO: 210530 - DNA, 25 bp, SARS Virus
tgtattaaatcgctgtgagaattgt

SEQ ID NO: 210531 - DNA, 25 bp, SARS Virus
gtattaaatcgtcgtgagaattgtg

SEQ ID NO: 210532 - DNA, 25 bp, SARS Virus
tattaaatcgttctgagaattgtga

SEQ ID NO: 210533 - DNA, 25 bp, SARS Virus
attaaatcgttgcgagaattgtgat

SEQ ID NO: 210534 - DNA, 25 bp, SARS Virus
ttaaatcgttgtcagaattgtgata

SEQ ID NO: 210535 - DNA, 25 bp, SARS Virus
taaatcgttgtgcgaattgtgataa

SEQ ID NO: 210536 - DNA, 25 bp, SARS Virus
aaatcgttgtgacaattgtgataaa

SEQ ID NO: 210537 - DNA, 25 bp, SARS Virus
aatcgttgtgagcattgtgataaaa

SEQ ID NO: 210538 - DNA, 25 bp, SARS Virus
atcgttgtgagacttgtgataaaaa

SEQ ID NO: 210539 - DNA, 25 bp, SARS Virus
tcgttgtgagaactgtgataaaaat

SEQ ID NO: 210540 - DNA, 25 bp, SARS Virus
cgttgtgagaatcgtgataaaaatc

SEQ ID NO: 210541 - DNA, 25 bp, SARS Virus
gttgtgagaattctgataaaaatcg

SEQ ID NO: 210542 - DNA, 25 bp, SARS Virus
ttgtgagaattgcgataaaaatcgt

SEQ ID NO: 210543 - DNA, 25 bp, SARS Virus
tgtgagaattgtcataaaaatcgtt

SEQ ID NO: 210544 - DNA, 25 bp, SARS Virus
gtgagaattgtgctaaaaatcgtta

SEQ ID NO: 210545 - DNA, 25 bp, SARS Virus
tgagaattgtgacaaaaatcgttat

SEQ ID NO: 210546 - DNA, 25 bp, SARS Virus
gagaattgtgatcaaaatcgttatc

SEQ ID NO: 210547 - DNA, 25 bp, SARS Virus
agaattgtgatacaaatcgttatca

SEQ ID NO: 210548 - DNA, 25 bp, SARS Virus
gaattgtgataacaatcgttatcaa

SEQ ID NO: 210549 - DNA, 25 bp, SARS Virus
aattgtgataaacatcgttatcaac

SEQ ID NO: 210550 - DNA, 25 bp, SARS Virus
attgtgataaaactcgttatcaaca

SEQ ID NO: 210551 - DNA, 25 bp, SARS Virus
ttgtgataaaaaccgttatcaacat

SEQ ID NO: 210552 - DNA, 25 bp, SARS Virus
tgtgataaaaatcgttatcaacatc

SEQ ID NO: 210553 - DNA, 25 bp, SARS Virus
gtgataaaaatccttatcaacatcc

SEQ ID NO: 210554 - DNA, 25 bp, SARS Virus
tgataaaaatcgctatcaacatcca

SEQ ID NO: 210555 - DNA, 25 bp, SARS Virus
gataaaaatcgtcatcaacatccat

SEQ ID NO: 210556 - DNA, 25 bp, SARS Virus
ataaaaatcgttctcaacatccatc

SEQ ID NO: 210557 - DNA, 25 bp, SARS Virus
taaaaatcgttaccaacatccatca

SEQ ID NO: 210558 - DNA, 25 bp, SARS Virus
aaaaatcgttatcaacatccatcac

SEQ ID NO: 210559 - DNA, 25 bp, SARS Virus
aaaatcgttatccacatccatcact

SEQ ID NO: 210560 - DNA, 25 bp, SARS Virus
aaatcgttatcaccatccatcactt

SEQ ID NO: 210561 - DNA, 25 bp, SARS Virus
aatcgttatcaacatccatcacttc

SEQ ID NO: 210562 - DNA, 25 bp, SARS Virus
atcgttatcaacctccatcacttcg

SEQ ID NO: 210563 - DNA, 25 bp, SARS Virus
tcgttatcaacacccatcacttcga

SEQ ID NO: 210564 - DNA, 25 bp, SARS Virus
cgttatcaacatccatcacttcgag

SEQ ID NO: 210565 - DNA, 25 bp, SARS Virus
gttatcaacatccatcacttcgaga

SEQ ID NO: 210566 - DNA, 25 bp, SARS Virus
ttatcaacatccctcacttcgagat

SEQ ID NO: 210567 - DNA, 25 bp, SARS Virus
tatcaacatccaccacttcgagatt

SEQ ID NO: 210568 - DNA, 25 bp, SARS Virus
atcaacatccatcacttcgagatta

SEQ ID NO: 210569 - DNA, 25 bp, SARS Virus
tcaacatccatcccttcgagattaa

SEQ ID NO: 210570 - DNA, 25 bp, SARS Virus
caacatccatcacttcgagattaag

SEQ ID NO: 210571 - DNA, 25 bp, SARS Virus
aacatccatcacctcgagattaaga

SEQ ID NO: 210572 - DNA, 25 bp, SARS Virus
acatccatcactccgagattaagat

SEQ ID NO: 210573 - DNA, 25 bp, SARS Virus
catccatcacttcgagattaagatc

SEQ ID NO: 210574 - DNA, 25 bp, SARS Virus
atccatcacttccagattaagatct

SEQ ID NO: 210575 - DNA, 25 bp, SARS Virus
tccatcacttcgcgattaagatctt

SEQ ID NO: 210576 - DNA, 25 bp, SARS Virus
ccatcacttcgacattaagatctta

SEQ ID NO: 210577 - DNA, 25 bp, SARS Virus
catcacttcgagcttaagatcttaa

SEQ ID NO: 210578 - DNA, 25 bp, SARS Virus
atcacttcgagactaagatcttaac

SEQ ID NO: 210579 - DNA, 25 bp, SARS Virus
tcacttcgagatcaagatcttaacc

SEQ ID NO: 210580 - DNA, 25 bp, SARS Virus
cacttcgagattcagatcttaacca

SEQ ID NO: 210581 - DNA, 25 bp, SARS Virus
acttcgagattacgatcttaaccat

SEQ ID NO: 210582 - DNA, 25 bp, SARS Virus
cttcgagattaacatcttaaccatg

SEQ ID NO: 210583 - DNA, 25 bp, SARS Virus
ttcgagattaagctcttaaccatga

SEQ ID NO: 210584 - DNA, 25 bp, SARS Virus
tcgagattaagaccttaaccatgaa

SEQ ID NO: 210585 - DNA, 25 bp, SARS Virus
cgagattaagatcttaaccatgaaa

SEQ ID NO: 210586 - DNA, 25 bp, SARS Virus
gagattaagatcctaaccatgaaaa

SEQ ID NO: 210587 - DNA, 25 bp, SARS Virus
agattaagatctcaaccatgaaaat

SEQ ID NO: 210588 - DNA, 25 bp, SARS Virus
gattaagatcttcaccatgaaaatc

SEQ ID NO: 210589 - DNA, 25 bp, SARS Virus
attaagatcttacccatgaaaatca

SEQ ID NO: 210590 - DNA, 25 bp, SARS Virus
ttaagatcttaaccatgaaaatcat

SEQ ID NO: 210591 - DNA, 25 bp, SARS Virus
taagatcttaaccatgaaaatcatt

SEQ ID NO: 210592 - DNA, 25 bp, SARS Virus
aagatcttaaccctgaaaatcattt

SEQ ID NO: 210593 - DNA, 25 bp, SARS Virus
agatcttaaccacgaaaatcatttt

SEQ ID NO: 210594 - DNA, 25 bp, SARS Virus
gatcttaaccatcaaaatcattttc

SEQ ID NO: 210595 - DNA, 25 bp, SARS Virus
atcttaaccatgcaaatcattttca

SEQ ID NO: 210596 - DNA, 25 bp, SARS Virus
tcttaaccatgacaatcattttcat

SEQ ID NO: 210597 - DNA, 25 bp, SARS Virus
cttaaccatgaacatcattttcatg

SEQ ID NO: 210598 - DNA, 25 bp, SARS Virus
ttaaccatgaaactcattttcatgt

SEQ ID NO: 210599 - DNA, 25 bp, SARS Virus
taaccatgaaaaccattttcatgtg

SEQ ID NO: 210600 - DNA, 25 bp, SARS Virus
aaccatgaaaatcattttcatgtgt

SEQ ID NO: 210601 - DNA, 25 bp, SARS Virus
accatgaaaatccttttcatgtgtt

SEQ ID NO: 210602 - DNA, 25 bp, SARS Virus
ccatgaaaatcactttcatgtgtta

SEQ ID NO: 210603 - DNA, 25 bp, SARS Virus
catgaaaatcatcttcatgtgttaa

SEQ ID NO: 210604 - DNA, 25 bp, SARS Virus
atgaaaatcattctcatgtgttaac

SEQ ID NO: 210605 - DNA, 25 bp, SARS Virus
tgaaaatcatttccatgtgttaacc

SEQ ID NO: 210606 - DNA, 25 bp, SARS Virus
gaaaatcattttcatgtgttaacct

SEQ ID NO: 210607 - DNA, 25 bp, SARS Virus
aaaatcattttcctgtgttaacctt

SEQ ID NO: 210608 - DNA, 25 bp, SARS Virus
aaatcattttcacgtgttaaccttg

SEQ ID NO: 210609 - DNA, 25 bp, SARS Virus
aatcattttcatctgttaaccttgt

SEQ ID NO: 210610 - DNA, 25 bp, SARS Virus
atcattttcatgcgttaaccttgtt

SEQ ID NO: 210611 - DNA, 25 bp, SARS Virus
tcattttcatgtcttaaccttgtta

SEQ ID NO: 210612 - DNA, 25 bp, SARS Virus
cattttcatgtgctaaccttgttat

SEQ ID NO: 210613 - DNA, 25 bp, SARS Virus
attttcatgtgtcaaccttgttatt

SEQ ID NO: 210614 - DNA, 25 bp, SARS Virus
ttttcatgtgttcaccttgttatta

SEQ ID NO: 210615 - DNA, 25 bp, SARS Virus
tttcatgtgttacccttgttattac

SEQ ID NO: 210616 - DNA, 25 bp, SARS Virus
ttcatgtgttaaccttgttattaca

SEQ ID NO: 210617 - DNA, 25 bp, SARS Virus
tcatgtgttaaccttgttattacat

SEQ ID NO: 210618 - DNA, 25 bp, SARS Virus
catgtgttaaccctgttattacatt

SEQ ID NO: 210619 - DNA, 25 bp, SARS Virus
atgtgttaacctcgttattacattt

SEQ ID NO: 210620 - DNA, 25 bp, SARS Virus
tgtgttaaccttcttattacatttg

SEQ ID NO: 210621 - DNA, 25 bp, SARS Virus
gtgttaaccttgctattacatttgt

SEQ ID NO: 210622 - DNA, 25 bp, SARS Virus
tgttaaccttgtcattacatttgtg

SEQ ID NO: 210623 - DNA, 25 bp, SARS Virus
gttaaccttgttcttacatttgtgt

SEQ ID NO: 210624 - DNA, 25 bp, SARS Virus
ttaaccttgttactacatttgtgta

SEQ ID NO: 210625 - DNA, 25 bp, SARS Virus
taaccttgttatcacatttgtgtat

SEQ ID NO: 210626 - DNA, 25 bp, SARS Virus
aaccttgttattccatttgtgtatt

SEQ ID NO: 210627 - DNA, 25 bp, SARS Virus
accttgttattacatttgtgtattc

SEQ ID NO: 210628 - DNA, 25 bp, SARS Virus
ccttgttattacctttgtgtattcc

SEQ ID NO: 210629 - DNA, 25 bp, SARS Virus
cttgttattacacttgtgtattccg

SEQ ID NO: 210630 - DNA, 25 bp, SARS Virus
ttgttattacatctgtgtattccgt

SEQ ID NO: 210631 - DNA, 25 bp, SARS Virus
tgttattacattcgtgtattccgta

SEQ ID NO: 210632 - DNA, 25 bp, SARS Virus
gttattacatttctgtattccgtat

SEQ ID NO: 210633 - DNA, 25 bp, SARS Virus
ttattacatttgcgtattccgtata

SEQ ID NO: 210634 - DNA, 25 bp, SARS Virus
tattacatttgtctattccgtatat

SEQ ID NO: 210635 - DNA, 25 bp, SARS Virus
attacatttgtgcattccgtatatt

SEQ ID NO: 210636 - DNA, 25 bp, SARS Virus
ttacatttgtgtcttccgtatatta

SEQ ID NO: 210637 - DNA, 25 bp, SARS Virus
tacatttgtgtactccgtatattaa

SEQ ID NO: 210638 - DNA, 25 bp, SARS Virus
acatttgtgtatcccgtatattaac

SEQ ID NO: 210639 - DNA, 25 bp, SARS Virus
catttgtgtattccgtatattaaca

SEQ ID NO: 210640 - DNA, 25 bp, SARS Virus
atttgtgtattccgtatattaacaa

SEQ ID NO: 210641 - DNA, 25 bp, SARS Virus
tttgtgtattccctatattaacaat

SEQ ID NO: 210642 - DNA, 25 bp, SARS Virus
ttgtgtattccgcatattaacaatt

SEQ ID NO: 210643 - DNA, 25 bp, SARS Virus
tgtgtattccgtctattaacaattt

SEQ ID NO: 210644 - DNA, 25 bp, SARS Virus
gtgtattccgtacattaacaatttg

SEQ ID NO: 210645 - DNA, 25 bp, SARS Virus
tgtattccgtatcttaacaatttgt

SEQ ID NO: 210646 - DNA, 25 bp, SARS Virus
gtattccgtatactaacaatttgtg

SEQ ID NO: 210647 - DNA, 25 bp, SARS Virus
tattccgtatatcaacaatttgtgt

SEQ ID NO: 210648 - DNA, 25 bp, SARS Virus
attccgtatattcacaatttgtgtg

SEQ ID NO: 210649 - DNA, 25 bp, SARS Virus
ttccgtatattaccaatttgtgtgc

SEQ ID NO: 210650 - DNA, 25 bp, SARS Virus
tccgtatattaacaatttgtgtgca

SEQ ID NO: 210651 - DNA, 25 bp, SARS Virus
ccgtatattaaccatttgtgtgcaa

SEQ ID NO: 210652 - DNA, 25 bp, SARS Virus
cgtatattaacactttgtgtgcaac

SEQ ID NO: 210653 - DNA, 25 bp, SARS Virus
gtatattaacaacttgtgtgcaaca

SEQ ID NO: 210654 - DNA, 25 bp, SARS Virus
tatattaacaatctgtgtgcaacac

SEQ ID NO: 210655 - DNA, 25 bp, SARS Virus
atattaacaattcgtgtgcaacacg

SEQ ID NO: 210656 - DNA, 25 bp, SARS Virus
tattaacaatttctgtgcaacacga

SEQ ID NO: 210657 - DNA, 25 bp, SARS Virus
attaacaatttgcgtgcaacacgat

SEQ ID NO: 210658 - DNA, 25 bp, SARS Virus
ttaacaatttgtctgcaacacgatt

SEQ ID NO: 210659 - DNA, 25 bp, SARS Virus
taacaatttgtgcgcaacacgatta

SEQ ID NO: 210660 - DNA, 25 bp, SARS Virus
aacaatttgtgtccaacacgattag

SEQ ID NO: 210661 - DNA, 25 bp, SARS Virus
acaatttgtgtgcaacacgattaga

SEQ ID NO: 210662 - DNA, 25 bp, SARS Virus
caatttgtgtgccacacgattagag

SEQ ID NO: 210663 - DNA, 25 bp, SARS Virus
aatttgtgtgcaccacgattagaga

SEQ ID NO: 210664 - DNA, 25 bp, SARS Virus
atttgtgtgcaacacgattagagaa

SEQ ID NO: 210665 - DNA, 25 bp, SARS Virus
tttgtgtgcaacccgattagagaat

SEQ ID NO: 210666 - DNA, 25 bp, SARS Virus
ttgtgtgcaacacgattagagaatc

SEQ ID NO: 210667 - DNA, 25 bp, SARS Virus
tgtgtgcaacaccattagagaatcg

SEQ ID NO: 210668 - DNA, 25 bp, SARS Virus
gtgtgcaacacgcttagagaatcgc

SEQ ID NO: 210669 - DNA, 25 bp, SARS Virus
tgtgcaacacgactagagaatcgcg

SEQ ID NO: 210670 - DNA, 25 bp, SARS Virus
gtgcaacacgatcagagaatcgcgt

SEQ ID NO: 210671 - DNA, 25 bp, SARS Virus
tgcaacacgattcgagaatcgcgtt

SEQ ID NO: 210672 - DNA, 25 bp, SARS Virus
gcaacacgattacagaatcgcgtta

SEQ ID NO: 210673 - DNA, 25 bp, SARS Virus
caacacgattagcgaatcgcgttaa

SEQ ID NO: 210674 - DNA, 25 bp, SARS Virus
aacacgattagacaatcgcgttaaa

SEQ ID NO: 210675 - DNA, 25 bp, SARS Virus
acacgattagagcatcgcgttaaac

SEQ ID NO: 210676 - DNA, 25 bp, SARS Virus
cacgattagagactcgcgttaaact

SEQ ID NO: 210677 - DNA, 25 bp, SARS Virus
acgattagagaaccgcgttaaacta

SEQ ID NO: 210678 - DNA, 25 bp, SARS Virus
cgattagagaatcgcgttaaactac

SEQ ID NO: 210679 - DNA, 25 bp, SARS Virus
gattagagaatcccgttaaactaca

SEQ ID NO: 210680 - DNA, 25 bp, SARS Virus
attagagaatcgcgttaaactacaa

SEQ ID NO: 210681 - DNA, 25 bp, SARS Virus
ttagagaatcgccttaaactacaac

SEQ ID NO: 210682 - DNA, 25 bp, SARS Virus
tagagaatcgcgctaaactacaaca

SEQ ID NO: 210683 - DNA, 25 bp, SARS Virus
agagaatcgcgtcaaactacaacat

SEQ ID NO: 210684 - DNA, 25 bp, SARS Virus
gagaatcgcgttcaactacaacatt

SEQ ID NO: 210685 - DNA, 25 bp, SARS Virus
agaatcgcgttacactacaacatta

SEQ ID NO: 210686 - DNA, 25 bp, SARS Virus
gaatcgcgttaacctacaacattaa

SEQ ID NO: 210687 - DNA, 25 bp, SARS Virus
aatcgcgttaaactacaacattaac

SEQ ID NO: 210688 - DNA, 25 bp, SARS Virus
atcgcgttaaaccacaacattaacg

SEQ ID NO: 210689 - DNA, 25 bp, SARS Virus
tcgcgttaaactccaacattaacga

SEQ ID NO: 210690 - DNA, 25 bp, SARS Virus
cgcgttaaactacaacattaacgac

SEQ ID NO: 210691 - DNA, 25 bp, SARS Virus
gcgttaaactaccacattaacgacg

SEQ ID NO: 210692 - DNA, 25 bp, SARS Virus
cgttaaactacaccattaacgacga

SEQ ID NO: 210693 - DNA, 25 bp, SARS Virus
gttaaactacaacattaacgacgaa

SEQ ID NO: 210694 - DNA, 25 bp, SARS Virus
ttaaactacaaccttaacgacgaac

SEQ ID NO: 210695 - DNA, 25 bp, SARS Virus
taaactacaacactaacgacgaaca

SEQ ID NO: 210696 - DNA, 25 bp, SARS Virus
aaactacaacatcaacgacgaacag

SEQ ID NO: 210697 - DNA, 25 bp, SARS Virus
aactacaacattcacgacgaacagg

SEQ ID NO: 210698 - DNA, 25 bp, SARS Virus
actacaacattaccgacgaacagga

SEQ ID NO: 210699 - DNA, 25 bp, SARS Virus
ctacaacattaacgacgaacaggat

SEQ ID NO: 210700 - DNA, 25 bp, SARS Virus
tacaacattaaccacgaacaggatt

SEQ ID NO: 210701 - DNA, 25 bp, SARS Virus
acaacattaacgccgaacaggattc

SEQ ID NO: 210702 - DNA, 25 bp, SARS Virus
caacattaacgacgaacaggattct

SEQ ID NO: 210703 - DNA, 25 bp, SARS Virus
aacattaacgaccaacaggattctt

SEQ ID NO: 210704 - DNA, 25 bp, SARS Virus
acattaacgacgcacaggattctta

SEQ ID NO: 210705 - DNA, 25 bp, SARS Virus
cattaacgacgaccaggattcttac

SEQ ID NO: 210706 - DNA, 25 bp, SARS Virus
attaacgacgaacaggattcttacc

SEQ ID NO: 210707 - DNA, 25 bp, SARS Virus
ttaacgacgaaccggattcttacca

SEQ ID NO: 210708 - DNA, 25 bp, SARS Virus
taacgacgaacacgattcttaccaa

SEQ ID NO: 210709 - DNA, 25 bp, SARS Virus
aacgacgaacagcattcttaccaaa

SEQ ID NO: 210710 - DNA, 25 bp, SARS Virus
acgacgaacaggcttcttaccaaac

SEQ ID NO: 210711 - DNA, 25 bp, SARS Virus
cgacgaacaggactcttaccaaact

SEQ ID NO: 210712 - DNA, 25 bp, SARS Virus
gacgaacaggatccttaccaaactg

SEQ ID NO: 210713 - DNA, 25 bp, SARS Virus
acgaacaggattcttaccaaactgt

SEQ ID NO: 210714 - DNA, 25 bp, SARS Virus
cgaacaggattcctaccaaactgta

SEQ ID NO: 210715 - DNA, 25 bp, SARS Virus
gaacaggattctcaccaaactgtat

SEQ ID NO: 210716 - DNA, 25 bp, SARS Virus
aacaggattcttcccaaactgtatt

SEQ ID NO: 210717 - DNA, 25 bp, SARS Virus
acaggattcttaccaaactgtattc

SEQ ID NO: 210718 - DNA, 25 bp, SARS Virus
caggattcttaccaaactgtattcg

SEQ ID NO: 210719 - DNA, 25 bp, SARS Virus
aggattcttacccaactgtattcgg

SEQ ID NO: 210720 - DNA, 25 bp, SARS Virus
ggattcttaccacactgtattcggt

SEQ ID NO: 210721 - DNA, 25 bp, SARS Virus
gattcttaccaacctgtattcggtt

SEQ ID NO: 210722 - DNA, 25 bp, SARS Virus
attcttaccaaactgtattcggttt

SEQ ID NO: 210723 - DNA, 25 bp, SARS Virus
ttcttaccaaaccgtattcggtttt

SEQ ID NO: 210724 - DNA, 25 bp, SARS Virus
tcttaccaaactctattcggtttta

SEQ ID NO: 210725 - DNA, 25 bp, SARS Virus
cttaccaaactgcattcggttttaa

SEQ ID NO: 210726 - DNA, 25 bp, SARS Virus
ttaccaaactgtcttcggttttaaa

SEQ ID NO: 210727 - DNA, 25 bp, SARS Virus
taccaaactgtactcggttttaaaa

SEQ ID NO: 210728 - DNA, 25 bp, SARS Virus
accaaactgtatccggttttaaaat

SEQ ID NO: 210729 - DNA, 25 bp, SARS Virus
ccaaactgtattcggttttaaaatg

SEQ ID NO: 210730 - DNA, 25 bp, SARS Virus
caaactgtattccgttttaaaatga

SEQ ID NO: 210731 - DNA, 25 bp, SARS Virus
aaactgtattcgcttttaaaatgag

SEQ ID NO: 210732 - DNA, 25 bp, SARS Virus
aactgtattcggctttaaaatgagg

SEQ ID NO: 210733 - DNA, 25 bp, SARS Virus
actgtattcggtcttaaaatgaggt

SEQ ID NO: 210734 - DNA, 25 bp, SARS Virus
ctgtattcggttctaaaatgaggtt

SEQ ID NO: 210735 - DNA, 25 bp, SARS Virus
tgtattcggtttcaaaatgaggttc

SEQ ID NO: 210736 - DNA, 25 bp, SARS Virus
gtattcggttttcaaatgaggttcc

SEQ ID NO: 210737 - DNA, 25 bp, SARS Virus
tattcggttttacaatgaggttcct

SEQ ID NO: 210738 - DNA, 25 bp, SARS Virus
attcggttttaacatgaggttcctt

SEQ ID NO: 210739 - DNA, 25 bp, SARS Virus
ttcggttttaaactgaggttccttg

SEQ ID NO: 210740 - DNA, 25 bp, SARS Virus
tcggttttaaaacgaggttccttgt

SEQ ID NO: 210741 - DNA, 25 bp, SARS Virus
cggttttaaaatcaggttccttgtg

SEQ ID NO: 210742 - DNA, 25 bp, SARS Virus
ggttttaaaatgcggttccttgtga

SEQ ID NO: 210743 - DNA, 25 bp, SARS Virus
gttttaaaatgacgttccttgtgat

SEQ ID NO: 210744 - DNA, 25 bp, SARS Virus
ttttaaaatgagcttccttgtgata

SEQ ID NO: 210745 - DNA, 25 bp, SARS Virus
tttaaaatgaggctccttgtgataa

SEQ ID NO: 210746 - DNA, 25 bp, SARS Virus
ttaaaatgaggtcccttgtgataat

SEQ ID NO: 210747 - DNA, 25 bp, SARS Virus
taaaatgaggttccttgtgataatt

SEQ ID NO: 210748 - DNA, 25 bp, SARS Virus
aaaatgaggttccttgtgataatta

SEQ ID NO: 210749 - DNA, 25 bp, SARS Virus
aaatgaggttccctgtgataattaa

SEQ ID NO: 210750 - DNA, 25 bp, SARS Virus
aatgaggttcctcgtgataattaac

SEQ ID NO: 210751 - DNA, 25 bp, SARS Virus
atgaggttccttctgataattaacg

SEQ ID NO: 210752 - DNA, 25 bp, SARS Virus
tgaggttccttgcgataattaacgt

SEQ ID NO: 210753 - DNA, 25 bp, SARS Virus
gaggttccttgtcataattaacgtc

SEQ ID NO: 210754 - DNA, 25 bp, SARS Virus
aggttccttgtgctaattaacgtcg

SEQ ID NO: 210755 - DNA, 25 bp, SARS Virus
ggttccttgtgacaattaacgtcgt

SEQ ID NO: 210756 - DNA, 25 bp, SARS Virus
gttccttgtgatcattaacgtcgtt

SEQ ID NO: 210757 - DNA, 25 bp, SARS Virus
ttccttgtgatacttaacgtcgtta

SEQ ID NO: 210758 - DNA, 25 bp, SARS Virus
tccttgtgataactaacgtcgttat

SEQ ID NO: 210759 - DNA, 25 bp, SARS Virus
ccttgtgataatcaacgtcgttatg

SEQ ID NO: 210760 - DNA, 25 bp, SARS Virus
cttgtgataattcacgtcgttatgg

SEQ ID NO: 210761 - DNA, 25 bp, SARS Virus
ttgtgataattaccgtcgttatggt

SEQ ID NO: 210762 - DNA, 25 bp, SARS Virus
tgtgataattaacgtcgttatggta

SEQ ID NO: 210763 - DNA, 25 bp, SARS Virus
gtgataattaacctcgttatggtac

SEQ ID NO: 210764 - DNA, 25 bp, SARS Virus
tgataattaacgccgttatggtact

SEQ ID NO: 210765 - DNA, 25 bp, SARS Virus
gataattaacgtcgttatggtactc

SEQ ID NO: 210766 - DNA, 25 bp, SARS Virus
ataattaacgtccttatggtactca

SEQ ID NO: 210767 - DNA, 25 bp, SARS Virus
taattaacgtcgctatggtactcac

SEQ ID NO: 210768 - DNA, 25 bp, SARS Virus
aattaacgtcgtcatggtactcacc

SEQ ID NO: 210769 - DNA, 25 bp, SARS Virus
attaacgtcgttctggtactcaccg

SEQ ID NO: 210770 - DNA, 25 bp, SARS Virus
ttaacgtcgttacggtactcaccgt

SEQ ID NO: 210771 - DNA, 25 bp, SARS Virus
taacgtcgttatcgtactcaccgtt

SEQ ID NO: 210772 - DNA, 25 bp, SARS Virus
aacgtcgttatgctactcaccgtta

SEQ ID NO: 210773 - DNA, 25 bp, SARS Virus
acgtcgttatggcactcaccgttaa

SEQ ID NO: 210774 - DNA, 25 bp, SARS Virus
cgtcgttatggtcctcaccgttaac

SEQ ID NO: 210775 - DNA, 25 bp, SARS Virus
gtcgttatggtactcaccgttaaca

SEQ ID NO: 210776 - DNA, 25 bp, SARS Virus
tcgttatggtacccaccgttaacaa

SEQ ID NO: 210777 - DNA, 25 bp, SARS Virus
cgttatggtactcaccgttaacaaa

SEQ ID NO: 210778 - DNA, 25 bp, SARS Virus
gttatggtactccccgttaacaaaa

SEQ ID NO: 210779 - DNA, 25 bp, SARS Virus
ttatggtactcaccgttaacaaaaa

SEQ ID NO: 210780 - DNA, 25 bp, SARS Virus
tatggtactcaccgttaacaaaaat

SEQ ID NO: 210781 - DNA, 25 bp, SARS Virus
atggtactcacccttaacaaaaatt

SEQ ID NO: 210782 - DNA, 25 bp, SARS Virus
tggtactcaccgctaacaaaaattt

SEQ ID NO: 210783 - DNA, 25 bp, SARS Virus
ggtactcaccgtcaacaaaaatttg

SEQ ID NO: 210784 - DNA, 25 bp, SARS Virus
gtactcaccgttcacaaaaatttgg

SEQ ID NO: 210785 - DNA, 25 bp, SARS Virus
tactcaccgttaccaaaaatttgga

SEQ ID NO: 210786 - DNA, 25 bp, SARS Virus
actcaccgttaacaaaaatttggat

SEQ ID NO: 210787 - DNA, 25 bp, SARS Virus
ctcaccgttaaccaaaatttggatt

SEQ ID NO: 210788 - DNA, 25 bp, SARS Virus
tcaccgttaacacaaatttggattc

SEQ ID NO: 210789 - DNA, 25 bp, SARS Virus
caccgttaacaacaatttggattcc

SEQ ID NO: 210790 - DNA, 25 bp, SARS Virus
accgttaacaaacatttggattccg

SEQ ID NO: 210791 - DNA, 25 bp, SARS Virus
ccgttaacaaaactttggattccga

SEQ ID NO: 210792 - DNA, 25 bp, SARS Virus
cgttaacaaaaacttggattccgat

SEQ ID NO: 210793 - DNA, 25 bp, SARS Virus
gttaacaaaaatctggattccgatc

SEQ ID NO: 210794 - DNA, 25 bp, SARS Virus
ttaacaaaaattcggattccgatca

SEQ ID NO: 210795 - DNA, 25 bp, SARS Virus
taacaaaaatttcgattccgatcac

SEQ ID NO: 210796 - DNA, 25 bp, SARS Virus
aacaaaaatttgcattccgatcact

SEQ ID NO: 210797 - DNA, 25 bp, SARS Virus
acaaaaatttggcttccgatcactt

SEQ ID NO: 210798 - DNA, 25 bp, SARS Virus
caaaaatttggactccgatcacttt

SEQ ID NO: 210799 - DNA, 25 bp, SARS Virus
aaaaatttggatcccgatcactttc

SEQ ID NO: 210800 - DNA, 25 bp, SARS Virus
aaaatttggattccgatcactttcg

SEQ ID NO: 210801 - DNA, 25 bp, SARS Virus
aaatttggattccgatcactttcga

SEQ ID NO: 210802 - DNA, 25 bp, SARS Virus
aatttggattcccatcactttcgag

SEQ ID NO: 210803 - DNA, 25 bp, SARS Virus
atttggattccgctcactttcgagt

SEQ ID NO: 210804 - DNA, 25 bp, SARS Virus
tttggattccgaccactttcgagta

SEQ ID NO: 210805 - DNA, 25 bp, SARS Virus
ttggattccgatcactttcgagtaa

SEQ ID NO: 210806 - DNA, 25 bp, SARS Virus
tggattccgatccctttcgagtaat

SEQ ID NO: 210807 - DNA, 25 bp, SARS Virus
ggattccgatcactttcgagtaatc

SEQ ID NO: 210808 - DNA, 25 bp, SARS Virus
gattccgatcaccttcgagtaatcc

SEQ ID NO: 210809 - DNA, 25 bp, SARS Virus
attccgatcactctcgagtaatcca

SEQ ID NO: 210810 - DNA, 25 bp, SARS Virus
ttccgatcacttccgagtaatccaa

SEQ ID NO: 210811 - DNA, 25 bp, SARS Virus
tccgatcactttcgagtaatccaaa

SEQ ID NO: 210812 - DNA, 25 bp, SARS Virus
ccgatcactttccagtaatccaaag

SEQ ID NO: 210813 - DNA, 25 bp, SARS Virus
cgatcactttcgcgtaatccaaaga

SEQ ID NO: 210814 - DNA, 25 bp, SARS Virus
gatcactttcgactaatccaaagaa

SEQ ID NO: 210815 - DNA, 25 bp, SARS Virus
atcactttcgagcaatccaaagaat

SEQ ID NO: 210816 - DNA, 25 bp, SARS Virus
tcactttcgagtcatccaaagaatt

SEQ ID NO: 210817 - DNA, 25 bp, SARS Virus
cactttcgagtactccaaagaatta

SEQ ID NO: 210818 - DNA, 25 bp, SARS Virus
actttcgagtaacccaaagaattac

SEQ ID NO: 210819 - DNA, 25 bp, SARS Virus
ctttcgagtaatccaaagaattacc

SEQ ID NO: 210820 - DNA, 25 bp, SARS Virus
tttcgagtaatccaaagaattacca

SEQ ID NO: 210821 - DNA, 25 bp, SARS Virus
ttcgagtaatcccaagaattaccat

SEQ ID NO: 210822 - DNA, 25 bp, SARS Virus
tcgagtaatccacagaattaccatt

SEQ ID NO: 210823 - DNA, 25 bp, SARS Virus
cgagtaatccaacgaattaccatta

SEQ ID NO: 210824 - DNA, 25 bp, SARS Virus
gagtaatccaaacaattaccattac

SEQ ID NO: 210825 - DNA, 25 bp, SARS Virus
agtaatccaaagcattaccattacg

SEQ ID NO: 210826 - DNA, 25 bp, SARS Virus
gtaatccaaagacttaccattacga

SEQ ID NO: 210827 - DNA, 25 bp, SARS Virus
taatccaaagaactaccattacgaa

SEQ ID NO: 210828 - DNA, 25 bp, SARS Virus
aatccaaagaatcaccattacgaac

SEQ ID NO: 210829 - DNA, 25 bp, SARS Virus
atccaaagaattcccattacgaaca

SEQ ID NO: 210830 - DNA, 25 bp, SARS Virus
tccaaagaattaccattacgaacac

SEQ ID NO: 210831 - DNA, 25 bp, SARS Virus
ccaaagaattaccattacgaacaca

SEQ ID NO: 210832 - DNA, 25 bp, SARS Virus
caaagaattacccttacgaacacaa

SEQ ID NO: 210833 - DNA, 25 bp, SARS Virus
aaagaattaccactacgaacacaaa

SEQ ID NO: 210834 - DNA, 25 bp, SARS Virus
aagaattaccatcacgaacacaaaa

SEQ ID NO: 210835 - DNA, 25 bp, SARS Virus
agaattaccattccgaacacaaaag

SEQ ID NO: 210836 - DNA, 25 bp, SARS Virus
gaattaccattacgaacacaaaagg

SEQ ID NO: 210837 - DNA, 25 bp, SARS Virus
aattaccattaccaacacaaaaggt

SEQ ID NO: 210838 - DNA, 25 bp, SARS Virus
attaccattacgcacacaaaaggtg

SEQ ID NO: 210839 - DNA, 25 bp, SARS Virus
ttaccattacgaccacaaaaggtgt

SEQ ID NO: 210840 - DNA, 25 bp, SARS Virus
taccattacgaacacaaaaggtgta

SEQ ID NO: 210841 - DNA, 25 bp, SARS Virus
accattacgaacccaaaaggtgtat

SEQ ID NO: 210842 - DNA, 25 bp, SARS Virus
ccattacgaacacaaaaggtgtatt

SEQ ID NO: 210843 - DNA, 25 bp, SARS Virus
cattacgaacaccaaaggtgtattc

SEQ ID NO: 210844 - DNA, 25 bp, SARS Virus
attacgaacacacaaggtgtattcg

SEQ ID NO: 210845 - DNA, 25 bp, SARS Virus
ttacgaacacaacaggtgtattcgt

SEQ ID NO: 210846 - DNA, 25 bp, SARS Virus
tacgaacacaaacggtgtattcgtc

SEQ ID NO: 210847 - DNA, 25 bp, SARS Virus
acgaacacaaaacgtgtattcgtcg

SEQ ID NO: 210848 - DNA, 25 bp, SARS Virus
cgaacacaaaagctgtattcgtcgg

SEQ ID NO: 210849 - DNA, 25 bp, SARS Virus
attgcggtaatggtattcttcctcg

SEQ ID NO: 210850 - DNA, 25 bp, SARS Virus
ttgcggtaatgtgattcttcctcgt

SEQ ID NO: 210851 - DNA, 25 bp, SARS Virus
tgcggtaatgttgttcttcctcgtg

SEQ ID NO: 210852 - DNA, 25 bp, SARS Virus
gcggtaatgttagtcttcctcgtgg

SEQ ID NO: 210853 - DNA, 25 bp, SARS Virus
cggtaatgttatgcttcctcgtggt

SEQ ID NO: 210854 - DNA, 25 bp, SARS Virus
ggtaatgttattgttcctcgtggtt

SEQ ID NO: 210855 - DNA, 25 bp, SARS Virus
gtaatgttattcgtcctcgtggttt

SEQ ID NO: 210856 - DNA, 25 bp, SARS Virus
taatgttattctgcctcgtggtttt

SEQ ID NO: 210857 - DNA, 25 bp, SARS Virus
aatgttattcttgctcgtggtttta

SEQ ID NO: 210858 - DNA, 25 bp, SARS Virus
atgttattcttcgtcgtggttttaa

SEQ ID NO: 210859 - DNA, 25 bp, SARS Virus
tgttattcttccgcgtggttttaat

SEQ ID NO: 210860 - DNA, 25 bp, SARS Virus
gttattcttcctggtggttttaatc

SEQ ID NO: 210861 - DNA, 25 bp, SARS Virus
ttattcttcctcgtggttttaatct

SEQ ID NO: 210862 - DNA, 25 bp, SARS Virus
tattcttcctcggggttttaatcta

SEQ ID NO: 210863 - DNA, 25 bp, SARS Virus
attcttcctcgtggttttaatctat

SEQ ID NO: 210864 - DNA, 25 bp, SARS Virus
ttcttcctcgtggttttaatctatt

SEQ ID NO: 210865 - DNA, 25 bp, SARS Virus
tcttcctcgtgggtttaatctattc

SEQ ID NO: 210866 - DNA, 25 bp, SARS Virus
cttcctcgtggtgttaatctattct

SEQ ID NO: 210867 - DNA, 25 bp, SARS Virus
ttcctcgtggttgtaatctattctc

SEQ ID NO: 210868 - DNA, 25 bp, SARS Virus
tcctcgtggtttgaatctattctca

SEQ ID NO: 210869 - DNA, 25 bp, SARS Virus
cctcgtggttttgatctattctcat

SEQ ID NO: 210870 - DNA, 25 bp, SARS Virus
ctcgtggttttagtctattctcatg

SEQ ID NO: 210871 - DNA, 25 bp, SARS Virus
tcgtggttttaagctattctcatgt

SEQ ID NO: 210872 - DNA, 25 bp, SARS Virus
cgtggttttaatgtattctcatgtg

SEQ ID NO: 210873 - DNA, 25 bp, SARS Virus
gtggttttaatcgattctcatgtgg

SEQ ID NO: 210874 - DNA, 25 bp, SARS Virus
tggttttaatctgttctcatgtggt

SEQ ID NO: 210875 - DNA, 25 bp, SARS Virus
ggttttaatctagtctcatgtggtt

SEQ ID NO: 210876 - DNA, 25 bp, SARS Virus
gttttaatctatgctcatgtggttt

SEQ ID NO: 210877 - DNA, 25 bp, SARS Virus
ttttaatctattgtcatgtggtttt

SEQ ID NO: 210878 - DNA, 25 bp, SARS Virus
tttaatctattcgcatgtggttttc

SEQ ID NO: 210879 - DNA, 25 bp, SARS Virus
ttaatctattctgatgtggttttcg

SEQ ID NO: 210880 - DNA, 25 bp, SARS Virus
taatctattctcgtgtggttttcgt

SEQ ID NO: 210881 - DNA, 25 bp, SARS Virus
aatctattctcaggtggttttcgtc

SEQ ID NO: 210882 - DNA, 25 bp, SARS Virus
atctattctcatgtggttttcgtcg

SEQ ID NO: 210883 - DNA, 25 bp, SARS Virus
tctattctcatggggttttcgtcgt

SEQ ID NO: 210884 - DNA, 25 bp, SARS Virus
ctattctcatgtggttttcgtcgtc

SEQ ID NO: 210885 - DNA, 25 bp, SARS Virus
tattctcatgtggttttcgtcgtca

SEQ ID NO: 210886 - DNA, 25 bp, SARS Virus
attctcatgtgggtttcgtcgtcaa

SEQ ID NO: 210887 - DNA, 25 bp, SARS Virus
ttctcatgtggtgttcgtcgtcaat

SEQ ID NO: 210888 - DNA, 25 bp, SARS Virus
tctcatgtggttgtcgtcgtcaatg

SEQ ID NO: 210889 - DNA, 25 bp, SARS Virus
ctcatgtggtttgcgtcgtcaatgt

SEQ ID NO: 210890 - DNA, 25 bp, SARS Virus
tcatgtggttttggtcgtcaatgtg

SEQ ID NO: 210891 - DNA, 25 bp, SARS Virus
catgtggttttcgtcgtcaatgtgt

SEQ ID NO: 210892 - DNA, 25 bp, SARS Virus
atgtggttttcggcgtcaatgtgtc

SEQ ID NO: 210893 - DNA, 25 bp, SARS Virus
tgtggttttcgtggtcaatgtgtct

SEQ ID NO: 210894 - DNA, 25 bp, SARS Virus
gtggttttcgtcgtcaatgtgtcta

SEQ ID NO: 210895 - DNA, 25 bp, SARS Virus
tggttttcgtcggcaatgtgtctaa

SEQ ID NO: 210896 - DNA, 25 bp, SARS Virus
ggttttcgtcgtgaatgtgtctaat

SEQ ID NO: 210897 - DNA, 25 bp, SARS Virus
gttttcgtcgtcgatgtgtctaatc

SEQ ID NO: 210898 - DNA, 25 bp, SARS Virus
ttttcgtcgtcagtgtgtctaatct

SEQ ID NO: 210899 - DNA, 25 bp, SARS Virus
tttcgtcgtcaaggtgtctaatctc

SEQ ID NO: 210900 - DNA, 25 bp, SARS Virus
ttcgtcgtcaatgtgtctaatctct

SEQ ID NO: 210901 - DNA, 25 bp, SARS Virus
tcgtcgtcaatgggtctaatctctt

SEQ ID NO: 210902 - DNA, 25 bp, SARS Virus
cgtcgtcaatgtgtctaatctcttg

SEQ ID NO: 210903 - DNA, 25 bp, SARS Virus
gtcgtcaatgtggctaatctcttgg

SEQ ID NO: 210904 - DNA, 25 bp, SARS Virus
tcgtcaatgtgtgtaatctcttgga

SEQ ID NO: 210905 - DNA, 25 bp, SARS Virus
cgtcaatgtgtcgaatctcttggat

SEQ ID NO: 210906 - DNA, 25 bp, SARS Virus
gtcaatgtgtctgatctcttggatt

SEQ ID NO: 210907 - DNA, 25 bp, SARS Virus
tcaatgtgtctagtctcttggattc

SEQ ID NO: 210908 - DNA, 25 bp, SARS Virus
caatgtgtctaagctcttggattcg

SEQ ID NO: 210909 - DNA, 25 bp, SARS Virus
aatgtgtctaatgtcttggattcgt

SEQ ID NO: 210910 - DNA, 25 bp, SARS Virus
atgtgtctaatcgcttggattcgtt

SEQ ID NO: 210911 - DNA, 25 bp, SARS Virus
tgtgtctaatctgttggattcgttt

SEQ ID NO: 210912 - DNA, 25 bp, SARS Virus
gtgtctaatctcgtggattcgttta

SEQ ID NO: 210913 - DNA, 25 bp, SARS Virus
tgtctaatctctgggattcgtttat

SEQ ID NO: 210914 - DNA, 25 bp, SARS Virus
gtctaatctcttggattcgtttatg

SEQ ID NO: 210915 - DNA, 25 bp, SARS Virus
tctaatctcttggattcgtttatga

SEQ ID NO: 210916 - DNA, 25 bp, SARS Virus
ctaatctcttgggttcgtttatgaa

SEQ ID NO: 210917 - DNA, 25 bp, SARS Virus
taatctcttggagtcgtttatgaat

SEQ ID NO: 210918 - DNA, 25 bp, SARS Virus
aatctcttggatgcgtttatgaatt

SEQ ID NO: 210919 - DNA, 25 bp, SARS Virus
atctcttggattggtttatgaattg

SEQ ID NO: 210920 - DNA, 25 bp, SARS Virus
tctcttggattcgtttatgaattgt

SEQ ID NO: 210921 - DNA, 25 bp, SARS Virus
ctcttggattcggttatgaattgtt

SEQ ID NO: 210922 - DNA, 25 bp, SARS Virus
tcttggattcgtgtatgaattgttg

SEQ ID NO: 210923 - DNA, 25 bp, SARS Virus
cttggattcgttgatgaattgttgt

SEQ ID NO: 210924 - DNA, 25 bp, SARS Virus
ttggattcgtttgtgaattgttgtt

SEQ ID NO: 210925 - DNA, 25 bp, SARS Virus
tggattcgtttaggaattgttgtta

SEQ ID NO: 210926 - DNA, 25 bp, SARS Virus
ggattcgtttatgaattgttgttat

SEQ ID NO: 210927 - DNA, 25 bp, SARS Virus
gattcgtttatggattgttgttatc

SEQ ID NO: 210928 - DNA, 25 bp, SARS Virus
attcgtttatgagttgttgttatcg

SEQ ID NO: 210929 - DNA, 25 bp, SARS Virus
ttcgtttatgaagtgttgttatcgg

SEQ ID NO: 210930 - DNA, 25 bp, SARS Virus
tcgtttatgaatggttgttatcggt

SEQ ID NO: 210931 - DNA, 25 bp, SARS Virus
cgtttatgaattgttgttatcggtg

SEQ ID NO: 210932 - DNA, 25 bp, SARS Virus
gtttatgaattggtgttatcggtgt

SEQ ID NO: 210933 - DNA, 25 bp, SARS Virus
tttatgaattgtggttatcggtgta

SEQ ID NO: 210934 - DNA, 25 bp, SARS Virus
ttatgaattgttgttatcggtgtat

SEQ ID NO: 210935 - DNA, 25 bp, SARS Virus
tatgaattgttggtatcggtgtatc

SEQ ID NO: 210936 - DNA, 25 bp, SARS Virus
atgaattgttgtgatcggtgtatcg

SEQ ID NO: 210937 - DNA, 25 bp, SARS Virus
tgaattgttgttgtcggtgtatcgc

SEQ ID NO: 210938 - DNA, 25 bp, SARS Virus
gaattgttgttagcggtgtatcgct

SEQ ID NO: 210939 - DNA, 25 bp, SARS Virus
aattgttgttatgggtgtatcgcta

SEQ ID NO: 210940 - DNA, 25 bp, SARS Virus
attgttgttatcggtgtatcgctaa

SEQ ID NO: 210941 - DNA, 25 bp, SARS Virus
ttgttgttatcggtgtatcgctaac

SEQ ID NO: 210942 - DNA, 25 bp, SARS Virus
tgttgttatcggggtatcgctaaca

SEQ ID NO: 210943 - DNA, 25 bp, SARS Virus
gttgttatcggtgtatcgctaacac

SEQ ID NO: 210944 - DNA, 25 bp, SARS Virus
ttgttatcggtggatcgctaacact

SEQ ID NO: 210945 - DNA, 25 bp, SARS Virus
tgttatcggtgtgtcgctaacactt

SEQ ID NO: 210946 - DNA, 25 bp, SARS Virus
gttatcggtgtagcgctaacacttg

SEQ ID NO: 210947 - DNA, 25 bp, SARS Virus
ttatcggtgtatggctaacacttgt

SEQ ID NO: 210948 - DNA, 25 bp, SARS Virus
tatcggtgtatcgctaacacttgtt

SEQ ID NO: 210949 - DNA, 25 bp, SARS Virus
atcggtgtatcggtaacacttgtta

SEQ ID NO: 210950 - DNA, 25 bp, SARS Virus
tcggtgtatcgcgaacacttgttaa

SEQ ID NO: 210951 - DNA, 25 bp, SARS Virus
cggtgtatcgctgacacttgttaaa

SEQ ID NO: 210952 - DNA, 25 bp, SARS Virus
ggtgtatcgctagcacttgttaaat

SEQ ID NO: 210953 - DNA, 25 bp, SARS Virus
gtgtatcgctaagacttgttaaatc

SEQ ID NO: 210954 - DNA, 25 bp, SARS Virus
tgtatcgctaacgcttgttaaatct

SEQ ID NO: 210955 - DNA, 25 bp, SARS Virus
gtatcgctaacagttgttaaatctt

SEQ ID NO: 210956 - DNA, 25 bp, SARS Virus
tatcgctaacacgtgttaaatcttt

SEQ ID NO: 210957 - DNA, 25 bp, SARS Virus
atcgctaacactggttaaatctttt

SEQ ID NO: 210958 - DNA, 25 bp, SARS Virus
tcgctaacacttgttaaatctttta

SEQ ID NO: 210959 - DNA, 25 bp, SARS Virus
cgctaacacttggtaaatcttttaa

SEQ ID NO: 210960 - DNA, 25 bp, SARS Virus
gctaacacttgtgaaatcttttaaa

SEQ ID NO: 210961 - DNA, 25 bp, SARS Virus
ctaacacttgttgaatcttttaaac

SEQ ID NO: 210962 - DNA, 25 bp, SARS Virus
taacacttgttagatcttttaaacc

SEQ ID NO: 210963 - DNA, 25 bp, SARS Virus
aacacttgttaagtcttttaaaccc

SEQ ID NO: 210964 - DNA, 25 bp, SARS Virus
acacttgttaaagcttttaaaccca

SEQ ID NO: 210965 - DNA, 25 bp, SARS Virus
cacttgttaaatgttttaaacccac

SEQ ID NO: 210966 - DNA, 25 bp, SARS Virus
acttgttaaatcgtttaaacccact

SEQ ID NO: 210967 - DNA, 25 bp, SARS Virus
cttgttaaatctgttaaacccactg

SEQ ID NO: 210968 - DNA, 25 bp, SARS Virus
ttgttaaatcttgtaaacccactga

SEQ ID NO: 210969 - DNA, 25 bp, SARS Virus
tgttaaatctttgaaacccactgaa

SEQ ID NO: 210970 - DNA, 25 bp, SARS Virus
gttaaatcttttgaacccactgaag

SEQ ID NO: 210971 - DNA, 25 bp, SARS Virus
ttaaatcttttagacccactgaagt

SEQ ID NO: 210972 - DNA, 25 bp, SARS Virus
taaatcttttaagcccactgaagtg

SEQ ID NO: 210973 - DNA, 25 bp, SARS Virus
aaatcttttaaagccactgaagtgt

SEQ ID NO: 210974 - DNA, 25 bp, SARS Virus
aatcttttaaacgcactgaagtgta

SEQ ID NO: 210975 - DNA, 25 bp, SARS Virus
atcttttaaaccgactgaagtgtat

SEQ ID NO: 210976 - DNA, 25 bp, SARS Virus
tcttttaaacccgctgaagtgtatt

SEQ ID NO: 210977 - DNA, 25 bp, SARS Virus
cttttaaacccagtgaagtgtatta

SEQ ID NO: 210978 - DNA, 25 bp, SARS Virus
ttttaaacccacggaagtgtattaa

SEQ ID NO: 210979 - DNA, 25 bp, SARS Virus
tttaaacccactgaagtgtattaat

SEQ ID NO: 210980 - DNA, 25 bp, SARS Virus
ttaaacccactggagtgtattaatt

SEQ ID NO: 210981 - DNA, 25 bp, SARS Virus
taaacccactgaggtgtattaatta

SEQ ID NO: 210982 - DNA, 25 bp, SARS Virus
aaacccactgaagtgtattaattac

SEQ ID NO: 210983 - DNA, 25 bp, SARS Virus
aacccactgaagggtattaattacg

SEQ ID NO: 210984 - DNA, 25 bp, SARS Virus
acccactgaagtgtattaattacgg

SEQ ID NO: 210985 - DNA, 25 bp, SARS Virus
cccactgaagtggattaattacggc

SEQ ID NO: 210986 - DNA, 25 bp, SARS Virus
ccactgaagtgtgttaattacggcc

SEQ ID NO: 210987 - DNA, 25 bp, SARS Virus
cactgaagtgtagtaattacggccg

SEQ ID NO: 210988 - DNA, 25 bp, SARS Virus
actgaagtgtatgaattacggccgt

SEQ ID NO: 210989 - DNA, 25 bp, SARS Virus
ctgaagtgtattgattacggccgta

SEQ ID NO: 210990 - DNA, 25 bp, SARS Virus
tgaagtgtattagttacggccgtag

SEQ ID NO: 210991 - DNA, 25 bp, SARS Virus
gaagtgtattaagtacggccgtagg

SEQ ID NO: 210992 - DNA, 25 bp, SARS Virus
aagtgtattaatgacggccgtaggt

SEQ ID NO: 210993 - DNA, 25 bp, SARS Virus
agtgtattaattgcggccgtaggtt

SEQ ID NO: 210994 - DNA, 25 bp, SARS Virus
gtgtattaattagggccgtaggttt

SEQ ID NO: 210995 - DNA, 25 bp, SARS Virus
tgtattaattacggccgtaggtttg

SEQ ID NO: 210996 - DNA, 25 bp, SARS Virus
gtattaattacggccgtaggtttgt

SEQ ID NO: 210997 - DNA, 25 bp, SARS Virus
tattaattacgggcgtaggtttgta

SEQ ID NO: 210998 - DNA, 25 bp, SARS Virus
attaattacggcggtaggtttgtat

SEQ ID NO: 210999 - DNA, 25 bp, SARS Virus
ttaattacggccgtaggtttgtatt

SEQ ID NO: 211000 - DNA, 25 bp, SARS Virus
taattacggccggaggtttgtatta

SEQ ID NO: 211001 - DNA, 25 bp, SARS Virus
aattacggccgtgggtttgtattaa

SEQ ID NO: 211002 - DNA, 25 bp, SARS Virus
attacggccgtaggtttgtattaaa

SEQ ID NO: 211003 - DNA, 25 bp, SARS Virus
ttacggccgtaggtttgtattaaat

SEQ ID NO: 211004 - DNA, 25 bp, SARS Virus
tacggccgtagggttgtattaaatc

SEQ ID NO: 211005 - DNA, 25 bp, SARS Virus
acggccgtaggtgtgtattaaatcg

SEQ ID NO: 211006 - DNA, 25 bp, SARS Virus
cggccgtaggttggtattaaatcgt

SEQ ID NO: 211007 - DNA, 25 bp, SARS Virus
ggccgtaggtttgtattaaatcgtt

SEQ ID NO: 211008 - DNA, 25 bp, SARS Virus
gccgtaggtttggattaaatcgttg

SEQ ID NO: 211009 - DNA, 25 bp, SARS Virus
ccgtaggtttgtgttaaatcgttgt

SEQ ID NO: 211010 - DNA, 25 bp, SARS Virus
cgtaggtttgtagtaaatcgttgtg

SEQ ID NO: 211011 - DNA, 25 bp, SARS Virus
gtaggtttgtatgaaatcgttgtga

SEQ ID NO: 211012 - DNA, 25 bp, SARS Virus
taggtttgtattgaatcgttgtgag

SEQ ID NO: 211013 - DNA, 25 bp, SARS Virus
aggtttgtattagatcgttgtgaga

SEQ ID NO: 211014 - DNA, 25 bp, SARS Virus
ggtttgtattaagtcgttgtgagaa

SEQ ID NO: 211015 - DNA, 25 bp, SARS Virus
gtttgtattaaagcgttgtgagaat

SEQ ID NO: 211016 - DNA, 25 bp, SARS Virus
tttgtattaaatggttgtgagaatt

SEQ ID NO: 211017 - DNA, 25 bp, SARS Virus
ttgtattaaatcgttgtgagaattg

SEQ ID NO: 211018 - DNA, 25 bp, SARS Virus
tgtattaaatcggtgtgagaattgt

SEQ ID NO: 211019 - DNA, 25 bp, SARS Virus
gtattaaatcgtggtgagaattgtg

SEQ ID NO: 211020 - DNA, 25 bp, SARS Virus
tattaaatcgttgtgagaattgtga

SEQ ID NO: 211021 - DNA, 25 bp, SARS Virus
attaaatcgttgggagaattgtgat

SEQ ID NO: 211022 - DNA, 25 bp, SARS Virus
ttaaatcgttgtgagaattgtgata

SEQ ID NO: 211023 - DNA, 25 bp, SARS Virus
taaatcgttgtgggaattgtgataa

SEQ ID NO: 211024 - DNA, 25 bp, SARS Virus
aaatcgttgtgagaattgtgataaa

SEQ ID NO: 211025 - DNA, 25 bp, SARS Virus
aatcgttgtgaggattgtgataaaa

SEQ ID NO: 211026 - DNA, 25 bp, SARS Virus
atcgttgtgagagttgtgataaaaa

SEQ ID NO: 211027 - DNA, 25 bp, SARS Virus
tcgttgtgagaagtgtgataaaaat

SEQ ID NO: 211028 - DNA, 25 bp, SARS Virus
cgttgtgagaatggtgataaaaatc

SEQ ID NO: 211029 - DNA, 25 bp, SARS Virus
gttgtgagaattgtgataaaaatcg

SEQ ID NO: 211030 - DNA, 25 bp, SARS Virus
ttgtgagaattgggataaaaatcgt

SEQ ID NO: 211031 - DNA, 25 bp, SARS Virus
tgtgagaattgtgataaaaatcgtt

SEQ ID NO: 211032 - DNA, 25 bp, SARS Virus
gtgagaattgtggtaaaaatcgtta

SEQ ID NO: 211033 - DNA, 25 bp, SARS Virus
tgagaattgtgagaaaaatcgttat

SEQ ID NO: 211034 - DNA, 25 bp, SARS Virus
gagaattgtgatgaaaatcgttatc

SEQ ID NO: 211035 - DNA, 25 bp, SARS Virus
agaattgtgatagaaatcgttatca

SEQ ID NO: 211036 - DNA, 25 bp, SARS Virus
gaattgtgataagaatcgttatcaa

SEQ ID NO: 211037 - DNA, 25 bp, SARS Virus
aattgtgataaagatcgttatcaac

SEQ ID NO: 211038 - DNA, 25 bp, SARS Virus
attgtgataaaagtcgttatcaaca

SEQ ID NO: 211039 - DNA, 25 bp, SARS Virus
ttgtgataaaaagcgttatcaacat

SEQ ID NO: 211040 - DNA, 25 bp, SARS Virus
tgtgataaaaatggttatcaacatc

SEQ ID NO: 211041 - DNA, 25 bp, SARS Virus
gtgataaaaatcgttatcaacatcc

SEQ ID NO: 211042 - DNA, 25 bp, SARS Virus
tgataaaaatcggtatcaacatcca

SEQ ID NO: 211043 - DNA, 25 bp, SARS Virus
gataaaaatcgtgatcaacatccat

SEQ ID NO: 211044 - DNA, 25 bp, SARS Virus
ataaaaatcgttgtcaacatccatc

SEQ ID NO: 211045 - DNA, 25 bp, SARS Virus
taaaaatcgttagcaacatccatca

SEQ ID NO: 211046 - DNA, 25 bp, SARS Virus
aaaaatcgttatgaacatccatcac

SEQ ID NO: 211047 - DNA, 25 bp, SARS Virus
aaaatcgttatcgacatccatcact

SEQ ID NO: 211048 - DNA, 25 bp, SARS Virus
aaatcgttatcagcatccatcactt

SEQ ID NO: 211049 - DNA, 25 bp, SARS Virus
aatcgttatcaagatccatcacttc

SEQ ID NO: 211050 - DNA, 25 bp, SARS Virus
atcgttatcaacgtccatcacttcg

SEQ ID NO: 211051 - DNA, 25 bp, SARS Virus
tcgttatcaacagccatcacttcga

SEQ ID NO: 211052 - DNA, 25 bp, SARS Virus
cgttatcaacatgcatcacttcgag

SEQ ID NO: 211053 - DNA, 25 bp, SARS Virus
gttatcaacatcgatcacttcgaga

SEQ ID NO: 211054 - DNA, 25 bp, SARS Virus
ttatcaacatccgtcacttcgagat

SEQ ID NO: 211055 - DNA, 25 bp, SARS Virus
tatcaacatccagcacttcgagatt

SEQ ID NO: 211056 - DNA, 25 bp, SARS Virus
atcaacatccatgacttcgagatta

SEQ ID NO: 211057 - DNA, 25 bp, SARS Virus
tcaacatccatcgcttcgagattaa

SEQ ID NO: 211058 - DNA, 25 bp, SARS Virus
caacatccatcagttcgagattaag

SEQ ID NO: 211059 - DNA, 25 bp, SARS Virus
aacatccatcacgtcgagattaaga

SEQ ID NO: 211060 - DNA, 25 bp, SARS Virus
acatccatcactgcgagattaagat

SEQ ID NO: 211061 - DNA, 25 bp, SARS Virus
catccatcacttggagattaagatc

SEQ ID NO: 211062 - DNA, 25 bp, SARS Virus
atccatcacttcgagattaagatct

SEQ ID NO: 211063 - DNA, 25 bp, SARS Virus
tccatcacttcgggattaagatctt

SEQ ID NO: 211064 - DNA, 25 bp, SARS Virus
ccatcacttcgagattaagatctta

SEQ ID NO: 211065 - DNA, 25 bp, SARS Virus
catcacttcgaggttaagatcttaa

SEQ ID NO: 211066 - DNA, 25 bp, SARS Virus
atcacttcgagagtaagatcttaac

SEQ ID NO: 211067 - DNA, 25 bp, SARS Virus
tcacttcgagatgaagatcttaacc

SEQ ID NO: 211068 - DNA, 25 bp, SARS Virus
cacttcgagattgagatcttaacca

SEQ ID NO: 211069 - DNA, 25 bp, SARS Virus
acttcgagattaggatcttaaccat

SEQ ID NO: 211070 - DNA, 25 bp, SARS Virus
cttcgagattaagatcttaaccatg

SEQ ID NO: 211071 - DNA, 25 bp, SARS Virus
ttcgagattaaggtcttaaccatga

SEQ ID NO: 211072 - DNA, 25 bp, SARS Virus
tcgagattaagagcttaaccatgaa

SEQ ID NO: 211073 - DNA, 25 bp, SARS Virus
cgagattaagatgttaaccatgaaa

SEQ ID NO: 211074 - DNA, 25 bp, SARS Virus
gagattaagatcgtaaccatgaaaa

SEQ ID NO: 211075 - DNA, 25 bp, SARS Virus
agattaagatctgaaccatgaaaat

SEQ ID NO: 211076 - DNA, 25 bp, SARS Virus
gattaagatcttgaccatgaaaatc

SEQ ID NO: 211077 - DNA, 25 bp, SARS Virus
attaagatcttagccatgaaaatca

SEQ ID NO: 211078 - DNA, 25 bp, SARS Virus
ttaagatcttaagcatgaaaatcat

SEQ ID NO: 211079 - DNA, 25 bp, SARS Virus
taagatcttaacgatgaaaatcatt

SEQ ID NO: 211080 - DNA, 25 bp, SARS Virus
aagatcttaaccgtgaaaatcattt

SEQ ID NO: 211081 - DNA, 25 bp, SARS Virus
agatcttaaccaggaaaatcatttt

SEQ ID NO: 211082 - DNA, 25 bp, SARS Virus
gatcttaaccatgaaaatcattttc

SEQ ID NO: 211083 - DNA, 25 bp, SARS Virus
atcttaaccatggaaatcattttca

SEQ ID NO: 211084 - DNA, 25 bp, SARS Virus
tcttaaccatgagaatcattttcat

SEQ ID NO: 211085 - DNA, 25 bp, SARS Virus
cttaaccatgaagatcattttcatg

SEQ ID NO: 211086 - DNA, 25 bp, SARS Virus
ttaaccatgaaagtcattttcatgt

SEQ ID NO: 211087 - DNA, 25 bp, SARS Virus
taaccatgaaaagcattttcatgtg

SEQ ID NO: 211088 - DNA, 25 bp, SARS Virus
aaccatgaaaatgattttcatgtgt

SEQ ID NO: 211089 - DNA, 25 bp, SARS Virus
accatgaaaatcgttttcatgtgtt

SEQ ID NO: 211090 - DNA, 25 bp, SARS Virus
ccatgaaaatcagtttcatgtgtta

SEQ ID NO: 211091 - DNA, 25 bp, SARS Virus
catgaaaatcatgttcatgtgttaa

SEQ ID NO: 211092 - DNA, 25 bp, SARS Virus
atgaaaatcattgtcatgtgttaac

SEQ ID NO: 211093 - DNA, 25 bp, SARS Virus
tgaaaatcatttgcatgtgttaacc

SEQ ID NO: 211094 - DNA, 25 bp, SARS Virus
gaaaatcattttgatgtgttaacct

SEQ ID NO: 211095 - DNA, 25 bp, SARS Virus
aaaatcattttcgtgtgttaacctt

SEQ ID NO: 211096 - DNA, 25 bp, SARS Virus
aaatcattttcaggtgttaaccttg

SEQ ID NO: 211097 - DNA, 25 bp, SARS Virus
aatcattttcatgtgttaaccttgt

SEQ ID NO: 211098 - DNA, 25 bp, SARS Virus
atcattttcatgggttaaccttgtt

SEQ ID NO: 211099 - DNA, 25 bp, SARS Virus
tcattttcatgtgttaaccttgtta

SEQ ID NO: 211100 - DNA, 25 bp, SARS Virus
cattttcatgtggtaaccttgttat

SEQ ID NO: 211101 - DNA, 25 bp, SARS Virus
attttcatgtgtgaaccttgttatt

SEQ ID NO: 211102 - DNA, 25 bp, SARS Virus
ttttcatgtgttgaccttgttatta

SEQ ID NO: 211103 - DNA, 25 bp, SARS Virus
tttcatgtgttagccttgttattac

SEQ ID NO: 211104 - DNA, 25 bp, SARS Virus
ttcatgtgttaagcttgttattaca

SEQ ID NO: 211105 - DNA, 25 bp, SARS Virus
tcatgtgttaacgttgttattacat

SEQ ID NO: 211106 - DNA, 25 bp, SARS Virus
catgtgttaaccgtgttattacatt

SEQ ID NO: 211107 - DNA, 25 bp, SARS Virus
atgtgttaacctggttattacattt

SEQ ID NO: 211108 - DNA, 25 bp, SARS Virus
tgtgttaaccttgttattacatttg

SEQ ID NO: 211109 - DNA, 25 bp, SARS Virus
gtgttaaccttggtattacatttgt

SEQ ID NO: 211110 - DNA, 25 bp, SARS Virus
tgttaaccttgtgattacatttgtg

SEQ ID NO: 211111 - DNA, 25 bp, SARS Virus
gttaaccttgttgttacatttgtgt

SEQ ID NO: 211112 - DNA, 25 bp, SARS Virus
ttaaccttgttagtacatttgtgta

SEQ ID NO: 211113 - DNA, 25 bp, SARS Virus
taaccttgttatgacatttgtgtat

SEQ ID NO: 211114 - DNA, 25 bp, SARS Virus
aaccttgttattgcatttgtgtatt

SEQ ID NO: 211115 - DNA, 25 bp, SARS Virus
accttgttattagatttgtgtattc

SEQ ID NO: 211116 - DNA, 25 bp, SARS Virus
ccttgttattacgtttgtgtattcc

SEQ ID NO: 211117 - DNA, 25 bp, SARS Virus
cttgttattacagttgtgtattccg

SEQ ID NO: 211118 - DNA, 25 bp, SARS Virus
ttgttattacatgtgtgtattccgt

SEQ ID NO: 211119 - DNA, 25 bp, SARS Virus
tgttattacattggtgtattccgta

SEQ ID NO: 211120 - DNA, 25 bp, SARS Virus
gttattacatttgtgtattccgtat

SEQ ID NO: 211121 - DNA, 25 bp, SARS Virus
ttattacatttgggtattccgtata

SEQ ID NO: 211122 - DNA, 25 bp, SARS Virus
tattacatttgtgtattccgtatat

SEQ ID NO: 211123 - DNA, 25 bp, SARS Virus
attacatttgtggattccgtatatt

SEQ ID NO: 211124 - DNA, 25 bp, SARS Virus
ttacatttgtgtgttccgtatatta

SEQ ID NO: 211125 - DNA, 25 bp, SARS Virus
tacatttgtgtagtccgtatattaa

SEQ ID NO: 211126 - DNA, 25 bp, SARS Virus
acatttgtgtatgccgtatattaac

SEQ ID NO: 211127 - DNA, 25 bp, SARS Virus
catttgtgtattgcgtatattaaca

SEQ ID NO: 211128 - DNA, 25 bp, SARS Virus
atttgtgtattcggtatattaacaa

SEQ ID NO: 211129 - DNA, 25 bp, SARS Virus
tttgtgtattccgtatattaacaat

SEQ ID NO: 211130 - DNA, 25 bp, SARS Virus
ttgtgtattccggatattaacaatt

SEQ ID NO: 211131 - DNA, 25 bp, SARS Virus
tgtgtattccgtgtattaacaattt

SEQ ID NO: 211132 - DNA, 25 bp, SARS Virus
gtgtattccgtagattaacaatttg

SEQ ID NO: 211133 - DNA, 25 bp, SARS Virus
tgtattccgtatgttaacaatttgt

SEQ ID NO: 211134 - DNA, 25 bp, SARS Virus
gtattccgtatagtaacaatttgtg

SEQ ID NO: 211135 - DNA, 25 bp, SARS Virus
tattccgtatatgaacaatttgtgt

SEQ ID NO: 211136 - DNA, 25 bp, SARS Virus
attccgtatattgacaatttgtgtg

SEQ ID NO: 211137 - DNA, 25 bp, SARS Virus
ttccgtatattagcaatttgtgtgc

SEQ ID NO: 211138 - DNA, 25 bp, SARS Virus
tccgtatattaagaatttgtgtgca

SEQ ID NO: 211139 - DNA, 25 bp, SARS Virus
ccgtatattaacgatttgtgtgcaa

SEQ ID NO: 211140 - DNA, 25 bp, SARS Virus
cgtatattaacagtttgtgtgcaac

SEQ ID NO: 211141 - DNA, 25 bp, SARS Virus
gtatattaacaagttgtgtgcaaca

SEQ ID NO: 211142 - DNA, 25 bp, SARS Virus
tatattaacaatgtgtgtgcaacac

SEQ ID NO: 211143 - DNA, 25 bp, SARS Virus
atattaacaattggtgtgcaacacg

SEQ ID NO: 211144 - DNA, 25 bp, SARS Virus
tattaacaatttgtgtgcaacacga

SEQ ID NO: 211145 - DNA, 25 bp, SARS Virus
attaacaatttgggtgcaacacgat

SEQ ID NO: 211146 - DNA, 25 bp, SARS Virus
ttaacaatttgtgtgcaacacgatt

SEQ ID NO: 211147 - DNA, 25 bp, SARS Virus
taacaatttgtgggcaacacgatta

SEQ ID NO: 211148 - DNA, 25 bp, SARS Virus
aacaatttgtgtgcaacacgattag

SEQ ID NO: 211149 - DNA, 25 bp, SARS Virus
acaatttgtgtggaacacgattaga

SEQ ID NO: 211150 - DNA, 25 bp, SARS Virus
caatttgtgtgcgacacgattagag

SEQ ID NO: 211151 - DNA, 25 bp, SARS Virus
aatttgtgtgcagcacgattagaga

SEQ ID NO: 211152 - DNA, 25 bp, SARS Virus
atttgtgtgcaagacgattagagaa

SEQ ID NO: 211153 - DNA, 25 bp, SARS Virus
tttgtgtgcaacgcgattagagaat

SEQ ID NO: 211154 - DNA, 25 bp, SARS Virus
ttgtgtgcaacaggattagagaatc

SEQ ID NO: 211155 - DNA, 25 bp, SARS Virus
tgtgtgcaacacgattagagaatcg

SEQ ID NO: 211156 - DNA, 25 bp, SARS Virus
gtgtgcaacacggttagagaatcgc

SEQ ID NO: 211157 - DNA, 25 bp, SARS Virus
tgtgcaacacgagtagagaatcgcg

SEQ ID NO: 211158 - DNA, 25 bp, SARS Virus
gtgcaacacgatgagagaatcgcgt

SEQ ID NO: 211159 - DNA, 25 bp, SARS Virus
tgcaacacgattggagaatcgcgtt

SEQ ID NO: 211160 - DNA, 25 bp, SARS Virus
gcaacacgattagagaatcgcgtta

SEQ ID NO: 211161 - DNA, 25 bp, SARS Virus
caacacgattagggaatcgcgttaa

SEQ ID NO: 211162 - DNA, 25 bp, SARS Virus
aacacgattagagaatcgcgttaaa

SEQ ID NO: 211163 - DNA, 25 bp, SARS Virus
acacgattagaggatcgcgttaaac

SEQ ID NO: 211164 - DNA, 25 bp, SARS Virus
cacgattagagagtcgcgttaaact

SEQ ID NO: 211165 - DNA, 25 bp, SARS Virus
acgattagagaagcgcgttaaacta

SEQ ID NO: 211166 - DNA, 25 bp, SARS Virus
cgattagagaatggcgttaaactac

SEQ ID NO: 211167 - DNA, 25 bp, SARS Virus
gattagagaatcgcgttaaactaca

SEQ ID NO: 211168 - DNA, 25 bp, SARS Virus
attagagaatcgggttaaactacaa

SEQ ID NO: 211169 - DNA, 25 bp, SARS Virus
ttagagaatcgcgttaaactacaac

SEQ ID NO: 211170 - DNA, 25 bp, SARS Virus
tagagaatcgcggtaaactacaaca

SEQ ID NO: 211171 - DNA, 25 bp, SARS Virus
agagaatcgcgtgaaactacaacat

SEQ ID NO: 211172 - DNA, 25 bp, SARS Virus
gagaatcgcgttgaactacaacatt

SEQ ID NO: 211173 - DNA, 25 bp, SARS Virus
agaatcgcgttagactacaacatta

SEQ ID NO: 211174 - DNA, 25 bp, SARS Virus
gaatcgcgttaagctacaacattaa

SEQ ID NO: 211175 - DNA, 25 bp, SARS Virus
aatcgcgttaaagtacaacattaac

SEQ ID NO: 211176 - DNA, 25 bp, SARS Virus
atcgcgttaaacgacaacattaacg

SEQ ID NO: 211177 - DNA, 25 bp, SARS Virus
tcgcgttaaactgcaacattaacga

SEQ ID NO: 211178 - DNA, 25 bp, SARS Virus
cgcgttaaactagaacattaacgac

SEQ ID NO: 211179 - DNA, 25 bp, SARS Virus
gcgttaaactacgacattaacgacg

SEQ ID NO: 211180 - DNA, 25 bp, SARS Virus
cgttaaactacagcattaacgacga

SEQ ID NO: 211181 - DNA, 25 bp, SARS Virus
gttaaactacaagattaacgacgaa

SEQ ID NO: 211182 - DNA, 25 bp, SARS Virus
ttaaactacaacgttaacgacgaac

SEQ ID NO: 211183 - DNA, 25 bp, SARS Virus
taaactacaacagtaacgacgaaca

SEQ ID NO: 211184 - DNA, 25 bp, SARS Virus
aaactacaacatgaacgacgaacag

SEQ ID NO: 211185 - DNA, 25 bp, SARS Virus
aactacaacattgacgacgaacagg

SEQ ID NO: 211186 - DNA, 25 bp, SARS Virus
actacaacattagcgacgaacagga

SEQ ID NO: 211187 - DNA, 25 bp, SARS Virus
ctacaacattaaggacgaacaggat

SEQ ID NO: 211188 - DNA, 25 bp, SARS Virus
tacaacattaacgacgaacaggatt

SEQ ID NO: 211189 - DNA, 25 bp, SARS Virus
acaacattaacggcgaacaggattc

SEQ ID NO: 211190 - DNA, 25 bp, SARS Virus
caacattaacgaggaacaggattct

SEQ ID NO: 211191 - DNA, 25 bp, SARS Virus
aacattaacgacgaacaggattctt

SEQ ID NO: 211192 - DNA, 25 bp, SARS Virus
acattaacgacggacaggattctta

SEQ ID NO: 211193 - DNA, 25 bp, SARS Virus
cattaacgacgagcaggattcttac

SEQ ID NO: 211194 - DNA, 25 bp, SARS Virus
attaacgacgaagaggattcttacc

SEQ ID NO: 211195 - DNA, 25 bp, SARS Virus
ttaacgacgaacgggattcttacca

SEQ ID NO: 211196 - DNA, 25 bp, SARS Virus
taacgacgaacaggattcttaccaa

SEQ ID NO: 211197 - DNA, 25 bp, SARS Virus
aacgacgaacaggattcttaccaaa

SEQ ID NO: 211198 - DNA, 25 bp, SARS Virus
acgacgaacagggttcttaccaaac

SEQ ID NO: 211199 - DNA, 25 bp, SARS Virus
cgacgaacaggagtcttaccaaact

SEQ ID NO: 211200 - DNA, 25 bp, SARS Virus
gacgaacaggatgcttaccaaactg

SEQ ID NO: 211201 - DNA, 25 bp, SARS Virus
acgaacaggattgttaccaaactgt

SEQ ID NO: 211202 - DNA, 25 bp, SARS Virus
cgaacaggattcgtaccaaactgta

SEQ ID NO: 211203 - DNA, 25 bp, SARS Virus
gaacaggattctgaccaaactgtat

SEQ ID NO: 211204 - DNA, 25 bp, SARS Virus
aacaggattcttgccaaactgtatt

SEQ ID NO: 211205 - DNA, 25 bp, SARS Virus
acaggattcttagcaaactgtattc

SEQ ID NO: 211206 - DNA, 25 bp, SARS Virus
caggattcttacgaaactgtattcg

SEQ ID NO: 211207 - DNA, 25 bp, SARS Virus
aggattcttaccgaactgtattcgg

SEQ ID NO: 211208 - DNA, 25 bp, SARS Virus
ggattcttaccagactgtattcggt

SEQ ID NO: 211209 - DNA, 25 bp, SARS Virus
gattcttaccaagctgtattcggtt

SEQ ID NO: 211210 - DNA, 25 bp, SARS Virus
attcttaccaaagtgtattcggttt

SEQ ID NO: 211211 - DNA, 25 bp, SARS Virus
ttcttaccaaacggtattcggtttt

SEQ ID NO: 211212 - DNA, 25 bp, SARS Virus
tcttaccaaactgtattcggtttta

SEQ ID NO: 211213 - DNA, 25 bp, SARS Virus
cttaccaaactggattcggttttaa

SEQ ID NO: 211214 - DNA, 25 bp, SARS Virus
ttaccaaactgtgttcggttttaaa

SEQ ID NO: 211215 - DNA, 25 bp, SARS Virus
taccaaactgtagtcggttttaaaa

SEQ ID NO: 211216 - DNA, 25 bp, SARS Virus
accaaactgtatgcggttttaaaat

SEQ ID NO: 211217 - DNA, 25 bp, SARS Virus
ccaaactgtattgggttttaaaatg

SEQ ID NO: 211218 - DNA, 25 bp, SARS Virus
caaactgtattcggttttaaaatga

SEQ ID NO: 211219 - DNA, 25 bp, SARS Virus
aaactgtattcggttttaaaatgag

SEQ ID NO: 211220 - DNA, 25 bp, SARS Virus
aactgtattcgggtttaaaatgagg

SEQ ID NO: 211221 - DNA, 25 bp, SARS Virus
actgtattcggtgttaaaatgaggt

SEQ ID NO: 211222 - DNA, 25 bp, SARS Virus
ctgtattcggttgtaaaatgaggtt

SEQ ID NO: 211223 - DNA, 25 bp, SARS Virus
tgtattcggtttgaaaatgaggttc

SEQ ID NO: 211224 - DNA, 25 bp, SARS Virus
gtattcggttttgaaatgaggttcc

SEQ ID NO: 211225 - DNA, 25 bp, SARS Virus
tattcggttttagaatgaggttcct

SEQ ID NO: 211226 - DNA, 25 bp, SARS Virus
attcggttttaagatgaggttcctt

SEQ ID NO: 211227 - DNA, 25 bp, SARS Virus
ttcggttttaaagtgaggttccttg

SEQ ID NO: 211228 - DNA, 25 bp, SARS Virus
tcggttttaaaaggaggttccttgt

SEQ ID NO: 211229 - DNA, 25 bp, SARS Virus
cggttttaaaatgaggttccttgtg

SEQ ID NO: 211230 - DNA, 25 bp, SARS Virus
ggttttaaaatggggttccttgtga

SEQ ID NO: 211231 - DNA, 25 bp, SARS Virus
gttttaaaatgaggttccttgtgat

SEQ ID NO: 211232 - DNA, 25 bp, SARS Virus
ttttaaaatgaggttccttgtgata

SEQ ID NO: 211233 - DNA, 25 bp, SARS Virus
tttaaaatgagggtccttgtgataa

SEQ ID NO: 211234 - DNA, 25 bp, SARS Virus
ttaaaatgaggtgccttgtgataat

SEQ ID NO: 211235 - DNA, 25 bp, SARS Virus
taaaatgaggttgcttgtgataatt

SEQ ID NO: 211236 - DNA, 25 bp, SARS Virus
aaaatgaggttcgttgtgataatta

SEQ ID NO: 211237 - DNA, 25 bp, SARS Virus
aaatgaggttccgtgtgataattaa

SEQ ID NO: 211238 - DNA, 25 bp, SARS Virus
aatgaggttcctggtgataattaac

SEQ ID NO: 211239 - DNA, 25 bp, SARS Virus
atgaggttccttgtgataattaacg

SEQ ID NO: 211240 - DNA, 25 bp, SARS Virus
tgaggttccttgggataattaacgt

SEQ ID NO: 211241 - DNA, 25 bp, SARS Virus
gaggttccttgtgataattaacgtc

SEQ ID NO: 211242 - DNA, 25 bp, SARS Virus
aggttccttgtggtaattaacgtcg

SEQ ID NO: 211243 - DNA, 25 bp, SARS Virus
ggttccttgtgagaattaacgtcgt

SEQ ID NO: 211244 - DNA, 25 bp, SARS Virus
gttccttgtgatgattaacgtcgtt

SEQ ID NO: 211245 - DNA, 25 bp, SARS Virus
ttccttgtgatagttaacgtcgtta

SEQ ID NO: 211246 - DNA, 25 bp, SARS Virus
tccttgtgataagtaacgtcgttat

SEQ ID NO: 211247 - DNA, 25 bp, SARS Virus
ccttgtgataatgaacgtcgttatg

SEQ ID NO: 211248 - DNA, 25 bp, SARS Virus
cttgtgataattgacgtcgttatgg

SEQ ID NO: 211249 - DNA, 25 bp, SARS Virus
ttgtgataattagcgtcgttatggt

SEQ ID NO: 211250 - DNA, 25 bp, SARS Virus
tgtgataattaaggtcgttatggta

SEQ ID NO: 211251 - DNA, 25 bp, SARS Virus
gtgataattaacgtcgttatggtac

SEQ ID NO: 211252 - DNA, 25 bp, SARS Virus
tgataattaacggcgttatggtact

SEQ ID NO: 211253 - DNA, 25 bp, SARS Virus
gataattaacgtggttatggtactc

SEQ ID NO: 211254 - DNA, 25 bp, SARS Virus
ataattaacgtcgttatggtactca

SEQ ID NO: 211255 - DNA, 25 bp, SARS Virus
taattaacgtcggtatggtactcac

SEQ ID NO: 211256 - DNA, 25 bp, SARS Virus
aattaacgtcgtgatggtactcacc

SEQ ID NO: 211257 - DNA, 25 bp, SARS Virus
attaacgtcgttgtggtactcaccg

SEQ ID NO: 211258 - DNA, 25 bp, SARS Virus
ttaacgtcgttagggtactcaccgt

SEQ ID NO: 211259 - DNA, 25 bp, SARS Virus
taacgtcgttatggtactcaccgtt

SEQ ID NO: 211260 - DNA, 25 bp, SARS Virus
aacgtcgttatggtactcaccgtta

SEQ ID NO: 211261 - DNA, 25 bp, SARS Virus
acgtcgttatgggactcaccgttaa

SEQ ID NO: 211262 - DNA, 25 bp, SARS Virus
cgtcgttatggtgctcaccgttaac

SEQ ID NO: 211263 - DNA, 25 bp, SARS Virus
gtcgttatggtagtcaccgttaaca

SEQ ID NO: 211264 - DNA, 25 bp, SARS Virus
tcgttatggtacgcaccgttaacaa

SEQ ID NO: 211265 - DNA, 25 bp, SARS Virus
cgttatggtactgaccgttaacaaa

SEQ ID NO: 211266 - DNA, 25 bp, SARS Virus
gttatggtactcgccgttaacaaaa

SEQ ID NO: 211267 - DNA, 25 bp, SARS Virus
ttatggtactcagcgttaacaaaaa

SEQ ID NO: 211268 - DNA, 25 bp, SARS Virus
tatggtactcacggttaacaaaaat

SEQ ID NO: 211269 - DNA, 25 bp, SARS Virus
atggtactcaccgttaacaaaaatt

SEQ ID NO: 211270 - DNA, 25 bp, SARS Virus
tggtactcaccggtaacaaaaattt

SEQ ID NO: 211271 - DNA, 25 bp, SARS Virus
ggtactcaccgtgaacaaaaatttg

SEQ ID NO: 211272 - DNA, 25 bp, SARS Virus
gtactcaccgttgacaaaaatttgg

SEQ ID NO: 211273 - DNA, 25 bp, SARS Virus
tactcaccgttagcaaaaatttgga

SEQ ID NO: 211274 - DNA, 25 bp, SARS Virus
actcaccgttaagaaaaatttggat

SEQ ID NO: 211275 - DNA, 25 bp, SARS Virus
ctcaccgttaacgaaaatttggatt

SEQ ID NO: 211276 - DNA, 25 bp, SARS Virus
tcaccgttaacagaaatttggattc

SEQ ID NO: 211277 - DNA, 25 bp, SARS Virus
caccgttaacaagaatttggattcc

SEQ ID NO: 211278 - DNA, 25 bp, SARS Virus
accgttaacaaagatttggattccg

SEQ ID NO: 211279 - DNA, 25 bp, SARS Virus
ccgttaacaaaagtttggattccga

SEQ ID NO: 211280 - DNA, 25 bp, SARS Virus
cgttaacaaaaagttggattccgat

SEQ ID NO: 211281 - DNA, 25 bp, SARS Virus
gttaacaaaaatgtggattccgatc

SEQ ID NO: 211282 - DNA, 25 bp, SARS Virus
ttaacaaaaattgggattccgatca

SEQ ID NO: 211283 - DNA, 25 bp, SARS Virus
taacaaaaatttggattccgatcac

SEQ ID NO: 211284 - DNA, 25 bp, SARS Virus
aacaaaaatttggattccgatcact

SEQ ID NO: 211285 - DNA, 25 bp, SARS Virus
acaaaaatttgggttccgatcactt

SEQ ID NO: 211286 - DNA, 25 bp, SARS Virus
caaaaatttggagtccgatcacttt

SEQ ID NO: 211287 - DNA, 25 bp, SARS Virus
aaaaatttggatgccgatcactttc

SEQ ID NO: 211288 - DNA, 25 bp, SARS Virus
aaaatttggattgcgatcactttcg

SEQ ID NO: 211289 - DNA, 25 bp, SARS Virus
aaatttggattcggatcactttcga

SEQ ID NO: 211290 - DNA, 25 bp, SARS Virus
aatttggattccgatcactttcgag

SEQ ID NO: 211291 - DNA, 25 bp, SARS Virus
atttggattccggtcactttcgagt

SEQ ID NO: 211292 - DNA, 25 bp, SARS Virus
tttggattccgagcactttcgagta

SEQ ID NO: 211293 - DNA, 25 bp, SARS Virus
ttggattccgatgactttcgagtaa

SEQ ID NO: 211294 - DNA, 25 bp, SARS Virus
tggattccgatcgctttcgagtaat

SEQ ID NO: 211295 - DNA, 25 bp, SARS Virus
ggattccgatcagtttcgagtaatc

SEQ ID NO: 211296 - DNA, 25 bp, SARS Virus
gattccgatcacgttcgagtaatcc

SEQ ID NO: 211297 - DNA, 25 bp, SARS Virus
attccgatcactgtcgagtaatcca

SEQ ID NO: 211298 - DNA, 25 bp, SARS Virus
ttccgatcacttgcgagtaatccaa

SEQ ID NO: 211299 - DNA, 25 bp, SARS Virus
tccgatcactttggagtaatccaaa

SEQ ID NO: 211300 - DNA, 25 bp, SARS Virus
ccgatcactttcgagtaatccaaag

SEQ ID NO: 211301 - DNA, 25 bp, SARS Virus
cgatcactttcgggtaatccaaaga

SEQ ID NO: 211302 - DNA, 25 bp, SARS Virus
gatcactttcgagtaatccaaagaa

SEQ ID NO: 211303 - DNA, 25 bp, SARS Virus
atcactttcgaggaatccaaagaat

SEQ ID NO: 211304 - DNA, 25 bp, SARS Virus
tcactttcgagtgatccaaagaatt

SEQ ID NO: 211305 - DNA, 25 bp, SARS Virus
cactttcgagtagtccaaagaatta

SEQ ID NO: 211306 - DNA, 25 bp, SARS Virus
actttcgagtaagccaaagaattac

SEQ ID NO: 211307 - DNA, 25 bp, SARS Virus
ctttcgagtaatgcaaagaattacc

SEQ ID NO: 211308 - DNA, 25 bp, SARS Virus
tttcgagtaatcgaaagaattacca

SEQ ID NO: 211309 - DNA, 25 bp, SARS Virus
ttcgagtaatccgaagaattaccat

SEQ ID NO: 211310 - DNA, 25 bp, SARS Virus
tcgagtaatccagagaattaccatt

SEQ ID NO: 211311 - DNA, 25 bp, SARS Virus
cgagtaatccaaggaattaccatta

SEQ ID NO: 211312 - DNA, 25 bp, SARS Virus
gagtaatccaaagaattaccattac

SEQ ID NO: 211313 - DNA, 25 bp, SARS Virus
agtaatccaaaggattaccattacg

SEQ ID NO: 211314 - DNA, 25 bp, SARS Virus
gtaatccaaagagttaccattacga

SEQ ID NO: 211315 - DNA, 25 bp, SARS Virus
taatccaaagaagtaccattacgaa

SEQ ID NO: 211316 - DNA, 25 bp, SARS Virus
aatccaaagaatgaccattacgaac

SEQ ID NO: 211317 - DNA, 25 bp, SARS Virus
atccaaagaattgccattacgaaca

SEQ ID NO: 211318 - DNA, 25 bp, SARS Virus
tccaaagaattagcattacgaacac

SEQ ID NO: 211319 - DNA, 25 bp, SARS Virus
ccaaagaattacgattacgaacaca

SEQ ID NO: 211320 - DNA, 25 bp, SARS Virus
caaagaattaccgttacgaacacaa

SEQ ID NO: 211321 - DNA, 25 bp, SARS Virus
aaagaattaccagtacgaacacaaa

SEQ ID NO: 211322 - DNA, 25 bp, SARS Virus
aagaattaccatgacgaacacaaaa

SEQ ID NO: 211323 - DNA, 25 bp, SARS Virus
agaattaccattgcgaacacaaaag

SEQ ID NO: 211324 - DNA, 25 bp, SARS Virus
gaattaccattaggaacacaaaagg

SEQ ID NO: 211325 - DNA, 25 bp, SARS Virus
aattaccattacgaacacaaaaggt

SEQ ID NO: 211326 - DNA, 25 bp, SARS Virus
attaccattacggacacaaaaggtg

SEQ ID NO: 211327 - DNA, 25 bp, SARS Virus
ttaccattacgagcacaaaaggtgt

SEQ ID NO: 211328 - DNA, 25 bp, SARS Virus
taccattacgaagacaaaaggtgta

SEQ ID NO: 211329 - DNA, 25 bp, SARS Virus
accattacgaacgcaaaaggtgtat

SEQ ID NO: 211330 - DNA, 25 bp, SARS Virus
ccattacgaacagaaaaggtgtatt

SEQ ID NO: 211331 - DNA, 25 bp, SARS Virus
cattacgaacacgaaaggtgtattc

SEQ ID NO: 211332 - DNA, 25 bp, SARS Virus
attacgaacacagaaggtgtattcg

SEQ ID NO: 211333 - DNA, 25 bp, SARS Virus
ttacgaacacaagaggtgtattcgt

SEQ ID NO: 211334 - DNA, 25 bp, SARS Virus
tacgaacacaaagggtgtattcgtc

SEQ ID NO: 211335 - DNA, 25 bp, SARS Virus
acgaacacaaaaggtgtattcgtcg

SEQ ID NO: 211336 - DNA, 25 bp, SARS Virus
cgaacacaaaaggtgtattcgtcgg

SEQ ID NO: 211337 - DNA, 25 bp, SARS Virus
attgcggtaatgttattcttcctcg

SEQ ID NO: 211338 - DNA, 25 bp, SARS Virus
ttgcggtaatgttattcttcctcgt

SEQ ID NO: 211339 - DNA, 25 bp, SARS Virus
tgcggtaatgtttttcttcctcgtg

SEQ ID NO: 211340 - DNA, 25 bp, SARS Virus
gcggtaatgttattcttcctcgtgg

SEQ ID NO: 211341 - DNA, 25 bp, SARS Virus
cggtaatgttattcttcctcgtggt

SEQ ID NO: 211342 - DNA, 25 bp, SARS Virus
ggtaatgttatttttcctcgtggtt

SEQ ID NO: 211343 - DNA, 25 bp, SARS Virus
gtaatgttattcttcctcgtggttt

SEQ ID NO: 211344 - DNA, 25 bp, SARS Virus
taatgttattcttcctcgtggtttt

SEQ ID NO: 211345 - DNA, 25 bp, SARS Virus
aatgttattctttctcgtggtttta

SEQ ID NO: 211346 - DNA, 25 bp, SARS Virus
atgttattcttcttcgtggttttaa

SEQ ID NO: 211347 - DNA, 25 bp, SARS Virus
tgttattcttcctcgtggttttaat

SEQ ID NO: 211348 - DNA, 25 bp, SARS Virus
gttattcttccttgtggttttaatc

SEQ ID NO: 211349 - DNA, 25 bp, SARS Virus
ttattcttcctcttggttttaatct

SEQ ID NO: 211350 - DNA, 25 bp, SARS Virus
tattcttcctcgtggttttaatcta

SEQ ID NO: 211351 - DNA, 25 bp, SARS Virus
attcttcctcgttgttttaatctat

SEQ ID NO: 211352 - DNA, 25 bp, SARS Virus
ttcttcctcgtgtttttaatctatt

SEQ ID NO: 211353 - DNA, 25 bp, SARS Virus
tcttcctcgtggttttaatctattc

SEQ ID NO: 211354 - DNA, 25 bp, SARS Virus
cttcctcgtggttttaatctattct

SEQ ID NO: 211355 - DNA, 25 bp, SARS Virus
ttcctcgtggttttaatctattctc

SEQ ID NO: 211356 - DNA, 25 bp, SARS Virus
tcctcgtggttttaatctattctca

SEQ ID NO: 211357 - DNA, 25 bp, SARS Virus
cctcgtggtttttatctattctcat

SEQ ID NO: 211358 - DNA, 25 bp, SARS Virus
ctcgtggttttattctattctcatg

SEQ ID NO: 211359 - DNA, 25 bp, SARS Virus
tcgtggttttaatctattctcatgt

SEQ ID NO: 211360 - DNA, 25 bp, SARS Virus
cgtggttttaatttattctcatgtg

SEQ ID NO: 211361 - DNA, 25 bp, SARS Virus
gtggttttaatctattctcatgtgg

SEQ ID NO: 211362 - DNA, 25 bp, SARS Virus
tggttttaatcttttctcatgtggt

SEQ ID NO: 211363 - DNA, 25 bp, SARS Virus
ggttttaatctattctcatgtggtt

SEQ ID NO: 211364 - DNA, 25 bp, SARS Virus
gttttaatctattctcatgtggttt

SEQ ID NO: 211365 - DNA, 25 bp, SARS Virus
ttttaatctattttcatgtggtttt

SEQ ID NO: 211366 - DNA, 25 bp, SARS Virus
tttaatctattctcatgtggttttc

SEQ ID NO: 211367 - DNA, 25 bp, SARS Virus
ttaatctattcttatgtggttttcg

SEQ ID NO: 211368 - DNA, 25 bp, SARS Virus
taatctattctcttgtggttttcgt

SEQ ID NO: 211369 - DNA, 25 bp, SARS Virus
aatctattctcatgtggttttcgtc

SEQ ID NO: 211370 - DNA, 25 bp, SARS Virus
atctattctcatttggttttcgtcg

SEQ ID NO: 211371 - DNA, 25 bp, SARS Virus
tctattctcatgtggttttcgtcgt

SEQ ID NO: 211372 - DNA, 25 bp, SARS Virus
ctattctcatgttgttttcgtcgtc

SEQ ID NO: 211373 - DNA, 25 bp, SARS Virus
tattctcatgtgtttttcgtcgtca

SEQ ID NO: 211374 - DNA, 25 bp, SARS Virus
attctcatgtggttttcgtcgtcaa

SEQ ID NO: 211375 - DNA, 25 bp, SARS Virus
ttctcatgtggttttcgtcgtcaat

SEQ ID NO: 211376 - DNA, 25 bp, SARS Virus
tctcatgtggttttcgtcgtcaatg

SEQ ID NO: 211377 - DNA, 25 bp, SARS Virus
ctcatgtggttttcgtcgtcaatgt

SEQ ID NO: 211378 - DNA, 25 bp, SARS Virus
tcatgtggtttttgtcgtcaatgtg

SEQ ID NO: 211379 - DNA, 25 bp, SARS Virus
catgtggttttcttcgtcaatgtgt

SEQ ID NO: 211380 - DNA, 25 bp, SARS Virus
atgtggttttcgtcgtcaatgtgtc

SEQ ID NO: 211381 - DNA, 25 bp, SARS Virus
tgtggttttcgttgtcaatgtgtct

SEQ ID NO: 211382 - DNA, 25 bp, SARS Virus
gtggttttcgtcttcaatgtgtcta

SEQ ID NO: 211383 - DNA, 25 bp, SARS Virus
tggttttcgtcgtcaatgtgtctaa

SEQ ID NO: 211384 - DNA, 25 bp, SARS Virus
ggttttcgtcgttaatgtgtctaat

SEQ ID NO: 211385 - DNA, 25 bp, SARS Virus
gttttcgtcgtctatgtgtctaatc

SEQ ID NO: 211386 - DNA, 25 bp, SARS Virus
ttttcgtcgtcattgtgtctaatct

SEQ ID NO: 211387 - DNA, 25 bp, SARS Virus
tttcgtcgtcaatgtgtctaatctc

SEQ ID NO: 211388 - DNA, 25 bp, SARS Virus
ttcgtcgtcaatttgtctaatctct

SEQ ID NO: 211389 - DNA, 25 bp, SARS Virus
tcgtcgtcaatgtgtctaatctctt

SEQ ID NO: 211390 - DNA, 25 bp, SARS Virus
cgtcgtcaatgtttctaatctcttg

SEQ ID NO: 211391 - DNA, 25 bp, SARS Virus
gtcgtcaatgtgtctaatctcttgg

SEQ ID NO: 211392 - DNA, 25 bp, SARS Virus
tcgtcaatgtgtttaatctcttgga

SEQ ID NO: 211393 - DNA, 25 bp, SARS Virus
cgtcaatgtgtctaatctcttggat

SEQ ID NO: 211394 - DNA, 25 bp, SARS Virus
gtcaatgtgtcttatctcttggatt

SEQ ID NO: 211395 - DNA, 25 bp, SARS Virus
tcaatgtgtctattctcttggattc

SEQ ID NO: 211396 - DNA, 25 bp, SARS Virus
caatgtgtctaatctcttggattcg

SEQ ID NO: 211397 - DNA, 25 bp, SARS Virus
aatgtgtctaatttcttggattcgt

SEQ ID NO: 211398 - DNA, 25 bp, SARS Virus
atgtgtctaatctcttggattcgtt

SEQ ID NO: 211399 - DNA, 25 bp, SARS Virus
tgtgtctaatcttttggattcgttt

SEQ ID NO: 211400 - DNA, 25 bp, SARS Virus
gtgtctaatctcttggattcgttta

SEQ ID NO: 211401 - DNA, 25 bp, SARS Virus
tgtctaatctcttggattcgtttat

SEQ ID NO: 211402 - DNA, 25 bp, SARS Virus
gtctaatctctttgattcgtttatg

SEQ ID NO: 211403 - DNA, 25 bp, SARS Virus
tctaatctcttgtattcgtttatga

SEQ ID NO: 211404 - DNA, 25 bp, SARS Virus
ctaatctcttggtttcgtttatgaa

SEQ ID NO: 211405 - DNA, 25 bp, SARS Virus
taatctcttggattcgtttatgaat

SEQ ID NO: 211406 - DNA, 25 bp, SARS Virus
aatctcttggattcgtttatgaatt

SEQ ID NO: 211407 - DNA, 25 bp, SARS Virus
atctcttggatttgtttatgaattg

SEQ ID NO: 211408 - DNA, 25 bp, SARS Virus
tctcttggattcttttatgaattgt

SEQ ID NO: 211409 - DNA, 25 bp, SARS Virus
ctcttggattcgtttatgaattgtt

SEQ ID NO: 211410 - DNA, 25 bp, SARS Virus
tcttggattcgtttatgaattgttg

SEQ ID NO: 211411 - DNA, 25 bp, SARS Virus
cttggattcgtttatgaattgttgt

SEQ ID NO: 211412 - DNA, 25 bp, SARS Virus
ttggattcgtttttgaattgttgtt

SEQ ID NO: 211413 - DNA, 25 bp, SARS Virus
tggattcgtttatgaattgttgtta

SEQ ID NO: 211414 - DNA, 25 bp, SARS Virus
ggattcgtttattaattgttgttat

SEQ ID NO: 211415 - DNA, 25 bp, SARS Virus
gattcgtttatgtattgttgttatc

SEQ ID NO: 211416 - DNA, 25 bp, SARS Virus
attcgtttatgatttgttgttatcg

SEQ ID NO: 211417 - DNA, 25 bp, SARS Virus
ttcgtttatgaattgttgttatcgg

SEQ ID NO: 211418 - DNA, 25 bp, SARS Virus
tcgtttatgaattgttgttatcggt

SEQ ID NO: 211419 - DNA, 25 bp, SARS Virus
cgtttatgaatttttgttatcggtg

SEQ ID NO: 211420 - DNA, 25 bp, SARS Virus
gtttatgaattgttgttatcggtgt

SEQ ID NO: 211421 - DNA, 25 bp, SARS Virus
tttatgaattgttgttatcggtgta

SEQ ID NO: 211422 - DNA, 25 bp, SARS Virus
ttatgaattgtttttatcggtgtat

SEQ ID NO: 211423 - DNA, 25 bp, SARS Virus
tatgaattgttgttatcggtgtatc

SEQ ID NO: 211424 - DNA, 25 bp, SARS Virus
atgaattgttgttatcggtgtatcg

SEQ ID NO: 211425 - DNA, 25 bp, SARS Virus
tgaattgttgttttcggtgtatcgc

SEQ ID NO: 211426 - DNA, 25 bp, SARS Virus
gaattgttgttatcggtgtatcgct

SEQ ID NO: 211427 - DNA, 25 bp, SARS Virus
aattgttgttattggtgtatcgcta

SEQ ID NO: 211428 - DNA, 25 bp, SARS Virus
attgttgttatctgtgtatcgctaa

SEQ ID NO: 211429 - DNA, 25 bp, SARS Virus
ttgttgttatcgttgtatcgctaac

SEQ ID NO: 211430 - DNA, 25 bp, SARS Virus
tgttgttatcggtgtatcgctaaca

SEQ ID NO: 211431 - DNA, 25 bp, SARS Virus
gttgttatcggtttatcgctaacac

SEQ ID NO: 211432 - DNA, 25 bp, SARS Virus
ttgttatcggtgtatcgctaacact

SEQ ID NO: 211433 - DNA, 25 bp, SARS Virus
tgttatcggtgtttcgctaacactt

SEQ ID NO: 211434 - DNA, 25 bp, SARS Virus
gttatcggtgtatcgctaacacttg

SEQ ID NO: 211435 - DNA, 25 bp, SARS Virus
ttatcggtgtattgctaacacttgt

SEQ ID NO: 211436 - DNA, 25 bp, SARS Virus
tatcggtgtatctctaacacttgtt

SEQ ID NO: 211437 - DNA, 25 bp, SARS Virus
atcggtgtatcgttaacacttgtta

SEQ ID NO: 211438 - DNA, 25 bp, SARS Virus
tcggtgtatcgctaacacttgttaa

SEQ ID NO: 211439 - DNA, 25 bp, SARS Virus
cggtgtatcgcttacacttgttaaa

SEQ ID NO: 211440 - DNA, 25 bp, SARS Virus
ggtgtatcgctatcacttgttaaat

SEQ ID NO: 211441 - DNA, 25 bp, SARS Virus
gtgtatcgctaatacttgttaaatc

SEQ ID NO: 211442 - DNA, 25 bp, SARS Virus
tgtatcgctaactcttgttaaatct

SEQ ID NO: 211443 - DNA, 25 bp, SARS Virus
gtatcgctaacatttgttaaatctt

SEQ ID NO: 211444 - DNA, 25 bp, SARS Virus
tatcgctaacacttgttaaatcttt

SEQ ID NO: 211445 - DNA, 25 bp, SARS Virus
atcgctaacacttgttaaatctttt

SEQ ID NO: 211446 - DNA, 25 bp, SARS Virus
tcgctaacactttttaaatctttta

SEQ ID NO: 211447 - DNA, 25 bp, SARS Virus
cgctaacacttgttaaatcttttaa

SEQ ID NO: 211448 - DNA, 25 bp, SARS Virus
gctaacacttgttaaatcttttaaa

SEQ ID NO: 211449 - DNA, 25 bp, SARS Virus
ctaacacttgtttaatcttttaaac

SEQ ID NO: 211450 - DNA, 25 bp, SARS Virus
taacacttgttatatcttttaaacc

SEQ ID NO: 211451 - DNA, 25 bp, SARS Virus
aacacttgttaattcttttaaaccc

SEQ ID NO: 211452 - DNA, 25 bp, SARS Virus
acacttgttaaatcttttaaaccca

SEQ ID NO: 211453 - DNA, 25 bp, SARS Virus
cacttgttaaattttttaaacccac

SEQ ID NO: 211454 - DNA, 25 bp, SARS Virus
acttgttaaatcttttaaacccact

SEQ ID NO: 211455 - DNA, 25 bp, SARS Virus
cttgttaaatcttttaaacccactg

SEQ ID NO: 211456 - DNA, 25 bp, SARS Virus
ttgttaaatcttttaaacccactga

SEQ ID NO: 211457 - DNA, 25 bp, SARS Virus
tgttaaatcttttaaacccactgaa

SEQ ID NO: 211458 - DNA, 25 bp, SARS Virus
gttaaatctttttaacccactgaag

SEQ ID NO: 211459 - DNA, 25 bp, SARS Virus
ttaaatcttttatacccactgaagt

SEQ ID NO: 211460 - DNA, 25 bp, SARS Virus
taaatcttttaatcccactgaagtg

SEQ ID NO: 211461 - DNA, 25 bp, SARS Virus
aaatcttttaaatccactgaagtgt

SEQ ID NO: 211462 - DNA, 25 bp, SARS Virus
aatcttttaaactcactgaagtgta

SEQ ID NO: 211463 - DNA, 25 bp, SARS Virus
atcttttaaacctactgaagtgtat

SEQ ID NO: 211464 - DNA, 25 bp, SARS Virus
tcttttaaaccctctgaagtgtatt

SEQ ID NO: 211465 - DNA, 25 bp, SARS Virus
cttttaaacccattgaagtgtatta

SEQ ID NO: 211466 - DNA, 25 bp, SARS Virus
ttttaaacccactgaagtgtattaa

SEQ ID NO: 211467 - DNA, 25 bp, SARS Virus
tttaaacccacttaagtgtattaat

SEQ ID NO: 211468 - DNA, 25 bp, SARS Virus
ttaaacccactgtagtgtattaatt

SEQ ID NO: 211469 - DNA, 25 bp, SARS Virus
taaacccactgatgtgtattaatta

SEQ ID NO: 211470 - DNA, 25 bp, SARS Virus
aaacccactgaattgtattaattac

SEQ ID NO: 211471 - DNA, 25 bp, SARS Virus
aacccactgaagtgtattaattacg

SEQ ID NO: 211472 - DNA, 25 bp, SARS Virus
acccactgaagtttattaattacgg

SEQ ID NO: 211473 - DNA, 25 bp, SARS Virus
cccactgaagtgtattaattacggc

SEQ ID NO: 211474 - DNA, 25 bp, SARS Virus
ccactgaagtgttttaattacggcc

SEQ ID NO: 211475 - DNA, 25 bp, SARS Virus
cactgaagtgtattaattacggccg

SEQ ID NO: 211476 - DNA, 25 bp, SARS Virus
actgaagtgtattaattacggccgt

SEQ ID NO: 211477 - DNA, 25 bp, SARS Virus
ctgaagtgtatttattacggccgta

SEQ ID NO: 211478 - DNA, 25 bp, SARS Virus
tgaagtgtattatttacggccgtag

SEQ ID NO: 211479 - DNA, 25 bp, SARS Virus
gaagtgtattaattacggccgtagg

SEQ ID NO: 211480 - DNA, 25 bp, SARS Virus
aagtgtattaattacggccgtaggt

SEQ ID NO: 211481 - DNA, 25 bp, SARS Virus
agtgtattaatttcggccgtaggtt

SEQ ID NO: 211482 - DNA, 25 bp, SARS Virus
gtgtattaattatggccgtaggttt

SEQ ID NO: 211483 - DNA, 25 bp, SARS Virus
tgtattaattactgccgtaggtttg

SEQ ID NO: 211484 - DNA, 25 bp, SARS Virus
gtattaattacgtccgtaggtttgt

SEQ ID NO: 211485 - DNA, 25 bp, SARS Virus
tattaattacggtcgtaggtttgta

SEQ ID NO: 211486 - DNA, 25 bp, SARS Virus
attaattacggctgtaggtttgtat

SEQ ID NO: 211487 - DNA, 25 bp, SARS Virus
ttaattacggccttaggtttgtatt

SEQ ID NO: 211488 - DNA, 25 bp, SARS Virus
taattacggccgtaggtttgtatta

SEQ ID NO: 211489 - DNA, 25 bp, SARS Virus
aattacggccgttggtttgtattaa

SEQ ID NO: 211490 - DNA, 25 bp, SARS Virus
attacggccgtatgtttgtattaaa

SEQ ID NO: 211491 - DNA, 25 bp, SARS Virus
ttacggccgtagttttgtattaaat

SEQ ID NO: 211492 - DNA, 25 bp, SARS Virus
tacggccgtaggtttgtattaaatc

SEQ ID NO: 211493 - DNA, 25 bp, SARS Virus
acggccgtaggtttgtattaaatcg

SEQ ID NO: 211494 - DNA, 25 bp, SARS Virus
cggccgtaggtttgtattaaatcgt

SEQ ID NO: 211495 - DNA, 25 bp, SARS Virus
ggccgtaggtttttattaaatcgtt

SEQ ID NO: 211496 - DNA, 25 bp, SARS Virus
gccgtaggtttgtattaaatcgttg

SEQ ID NO: 211497 - DNA, 25 bp, SARS Virus
ccgtaggtttgttttaaatcgttgt

SEQ ID NO: 211498 - DNA, 25 bp, SARS Virus
cgtaggtttgtattaaatcgttgtg

SEQ ID NO: 211499 - DNA, 25 bp, SARS Virus
gtaggtttgtattaaatcgttgtga

SEQ ID NO: 211500 - DNA, 25 bp, SARS Virus
taggtttgtatttaatcgttgtgag

SEQ ID NO: 211501 - DNA, 25 bp, SARS Virus
aggtttgtattatatcgttgtgaga

SEQ ID NO: 211502 - DNA, 25 bp, SARS Virus
ggtttgtattaattcgttgtgagaa

SEQ ID NO: 211503 - DNA, 25 bp, SARS Virus
gtttgtattaaatcgttgtgagaat

SEQ ID NO: 211504 - DNA, 25 bp, SARS Virus
tttgtattaaattgttgtgagaatt

SEQ ID NO: 211505 - DNA, 25 bp, SARS Virus
ttgtattaaatctttgtgagaattg

SEQ ID NO: 211506 - DNA, 25 bp, SARS Virus
tgtattaaatcgttgtgagaattgt

SEQ ID NO: 211507 - DNA, 25 bp, SARS Virus
gtattaaatcgttgtgagaattgtg

SEQ ID NO: 211508 - DNA, 25 bp, SARS Virus
tattaaatcgttttgagaattgtga

SEQ ID NO: 211509 - DNA, 25 bp, SARS Virus
attaaatcgttgtgagaattgtgat

SEQ ID NO: 211510 - DNA, 25 bp, SARS Virus
ttaaatcgttgttagaattgtgata

SEQ ID NO: 211511 - DNA, 25 bp, SARS Virus
taaatcgttgtgtgaattgtgataa

SEQ ID NO: 211512 - DNA, 25 bp, SARS Virus
aaatcgttgtgataattgtgataaa

SEQ ID NO: 211513 - DNA, 25 bp, SARS Virus
aatcgttgtgagtattgtgataaaa

SEQ ID NO: 211514 - DNA, 25 bp, SARS Virus
atcgttgtgagatttgtgataaaaa

SEQ ID NO: 211515 - DNA, 25 bp, SARS Virus
tcgttgtgagaattgtgataaaaat

SEQ ID NO: 211516 - DNA, 25 bp, SARS Virus
cgttgtgagaattgtgataaaaatc

SEQ ID NO: 211517 - DNA, 25 bp, SARS Virus
gttgtgagaattttgataaaaatcg

SEQ ID NO: 211518 - DNA, 25 bp, SARS Virus
ttgtgagaattgtgataaaaatcgt

SEQ ID NO: 211519 - DNA, 25 bp, SARS Virus
tgtgagaattgttataaaaatcgtt

SEQ ID NO: 211520 - DNA, 25 bp, SARS Virus
gtgagaattgtgttaaaaatcgtta

SEQ ID NO: 211521 - DNA, 25 bp, SARS Virus
tgagaattgtgataaaaatcgttat

SEQ ID NO: 211522 - DNA, 25 bp, SARS Virus
gagaattgtgattaaaatcgttatc

SEQ ID NO: 211523 - DNA, 25 bp, SARS Virus
agaattgtgatataaatcgttatca

SEQ ID NO: 211524 - DNA, 25 bp, SARS Virus
gaattgtgataataatcgttatcaa

SEQ ID NO: 211525 - DNA, 25 bp, SARS Virus
aattgtgataaatatcgttatcaac

SEQ ID NO: 211526 - DNA, 25 bp, SARS Virus
attgtgataaaattcgttatcaaca

SEQ ID NO: 211527 - DNA, 25 bp, SARS Virus
ttgtgataaaaatcgttatcaacat

SEQ ID NO: 211528 - DNA, 25 bp, SARS Virus
tgtgataaaaattgttatcaacatc

SEQ ID NO: 211529 - DNA, 25 bp, SARS Virus
gtgataaaaatctttatcaacatcc

SEQ ID NO: 211530 - DNA, 25 bp, SARS Virus
tgataaaaatcgttatcaacatcca

SEQ ID NO: 211531 - DNA, 25 bp, SARS Virus
gataaaaatcgttatcaacatccat

SEQ ID NO: 211532 - DNA, 25 bp, SARS Virus
ataaaaatcgttttcaacatccatc

SEQ ID NO: 211533 - DNA, 25 bp, SARS Virus
taaaaatcgttatcaacatccatca

SEQ ID NO: 211534 - DNA, 25 bp, SARS Virus
aaaaatcgttattaacatccatcac

SEQ ID NO: 211535 - DNA, 25 bp, SARS Virus
aaaatcgttatctacatccatcact

SEQ ID NO: 211536 - DNA, 25 bp, SARS Virus
aaatcgttatcatcatccatcactt

SEQ ID NO: 211537 - DNA, 25 bp, SARS Virus
aatcgttatcaatatccatcacttc

SEQ ID NO: 211538 - DNA, 25 bp, SARS Virus
atcgttatcaacttccatcacttcg

SEQ ID NO: 211539 - DNA, 25 bp, SARS Virus
tcgttatcaacatccatcacttcga

SEQ ID NO: 211540 - DNA, 25 bp, SARS Virus
cgttatcaacattcatcacttcgag

SEQ ID NO: 211541 - DNA, 25 bp, SARS Virus
gttatcaacatctatcacttcgaga

SEQ ID NO: 211542 - DNA, 25 bp, SARS Virus
ttatcaacatccttcacttcgagat

SEQ ID NO: 211543 - DNA, 25 bp, SARS Virus
tatcaacatccatcacttcgagatt

SEQ ID NO: 211544 - DNA, 25 bp, SARS Virus
atcaacatccattacttcgagatta

SEQ ID NO: 211545 - DNA, 25 bp, SARS Virus
tcaacatccatctcttcgagattaa

SEQ ID NO: 211546 - DNA, 25 bp, SARS Virus
caacatccatcatttcgagattaag

SEQ ID NO: 211547 - DNA, 25 bp, SARS Virus
aacatccatcacttcgagattaaga

SEQ ID NO: 211548 - DNA, 25 bp, SARS Virus
acatccatcacttcgagattaagat

SEQ ID NO: 211549 - DNA, 25 bp, SARS Virus
catccatcactttgagattaagatc

SEQ ID NO: 211550 - DNA, 25 bp, SARS Virus
atccatcacttctagattaagatct

SEQ ID NO: 211551 - DNA, 25 bp, SARS Virus
tccatcacttcgtgattaagatctt

SEQ ID NO: 211552 - DNA, 25 bp, SARS Virus
ccatcacttcgatattaagatctta

SEQ ID NO: 211553 - DNA, 25 bp, SARS Virus
catcacttcgagtttaagatcttaa

SEQ ID NO: 211554 - DNA, 25 bp, SARS Virus
atcacttcgagattaagatcttaac

SEQ ID NO: 211555 - DNA, 25 bp, SARS Virus
tcacttcgagattaagatcttaacc

SEQ ID NO: 211556 - DNA, 25 bp, SARS Virus
cacttcgagatttagatcttaacca

SEQ ID NO: 211557 - DNA, 25 bp, SARS Virus
acttcgagattatgatcttaaccat

SEQ ID NO: 211558 - DNA, 25 bp, SARS Virus
cttcgagattaatatcttaaccatg

SEQ ID NO: 211559 - DNA, 25 bp, SARS Virus
ttcgagattaagttcttaaccatga

SEQ ID NO: 211560 - DNA, 25 bp, SARS Virus
tcgagattaagatcttaaccatgaa

SEQ ID NO: 211561 - DNA, 25 bp, SARS Virus
cgagattaagattttaaccatgaaa

SEQ ID NO: 211562 - DNA, 25 bp, SARS Virus
gagattaagatcttaaccatgaaaa

SEQ ID NO: 211563 - DNA, 25 bp, SARS Virus
agattaagatcttaaccatgaaaat

SEQ ID NO: 211564 - DNA, 25 bp, SARS Virus
gattaagatctttaccatgaaaatc

SEQ ID NO: 211565 - DNA, 25 bp, SARS Virus
attaagatcttatccatgaaaatca

SEQ ID NO: 211566 - DNA, 25 bp, SARS Virus
ttaagatcttaatcatgaaaatcat

SEQ ID NO: 211567 - DNA, 25 bp, SARS Virus
taagatcttaactatgaaaatcatt

SEQ ID NO: 211568 - DNA, 25 bp, SARS Virus
aagatcttaaccttgaaaatcattt

SEQ ID NO: 211569 - DNA, 25 bp, SARS Virus
agatcttaaccatgaaaatcatttt

SEQ ID NO: 211570 - DNA, 25 bp, SARS Virus
gatcttaaccattaaaatcattttc

SEQ ID NO: 211571 - DNA, 25 bp, SARS Virus
atcttaaccatgtaaatcattttca

SEQ ID NO: 211572 - DNA, 25 bp, SARS Virus
tcttaaccatgataatcattttcat

SEQ ID NO: 211573 - DNA, 25 bp, SARS Virus
cttaaccatgaatatcattttcatg

SEQ ID NO: 211574 - DNA, 25 bp, SARS Virus
ttaaccatgaaattcattttcatgt

SEQ ID NO: 211575 - DNA, 25 bp, SARS Virus
taaccatgaaaatcattttcatgtg

SEQ ID NO: 211576 - DNA, 25 bp, SARS Virus
aaccatgaaaattattttcatgtgt

SEQ ID NO: 211577 - DNA, 25 bp, SARS Virus
accatgaaaatctttttcatgtgtt

SEQ ID NO: 211578 - DNA, 25 bp, SARS Virus
ccatgaaaatcattttcatgtgtta

SEQ ID NO: 211579 - DNA, 25 bp, SARS Virus
catgaaaatcattttcatgtgttaa

SEQ ID NO: 211580 - DNA, 25 bp, SARS Virus
atgaaaatcattttcatgtgttaac

SEQ ID NO: 211581 - DNA, 25 bp, SARS Virus
tgaaaatcattttcatgtgttaacc

SEQ ID NO: 211582 - DNA, 25 bp, SARS Virus
gaaaatcatttttatgtgttaacct

SEQ ID NO: 211583 - DNA, 25 bp, SARS Virus
aaaatcattttcttgtgttaacctt

SEQ ID NO: 211584 - DNA, 25 bp, SARS Virus
aaatcattttcatgtgttaaccttg

SEQ ID NO: 211585 - DNA, 25 bp, SARS Virus
aatcattttcatttgttaaccttgt

SEQ ID NO: 211586 - DNA, 25 bp, SARS Virus
atcattttcatgtgttaaccttgtt

SEQ ID NO: 211587 - DNA, 25 bp, SARS Virus
tcattttcatgttttaaccttgtta

SEQ ID NO: 211588 - DNA, 25 bp, SARS Virus
cattttcatgtgttaaccttgttat

SEQ ID NO: 211589 - DNA, 25 bp, SARS Virus
attttcatgtgttaaccttgttatt

SEQ ID NO: 211590 - DNA, 25 bp, SARS Virus
ttttcatgtgtttaccttgttatta

SEQ ID NO: 211591 - DNA, 25 bp, SARS Virus
tttcatgtgttatccttgttattac

SEQ ID NO: 211592 - DNA, 25 bp, SARS Virus
ttcatgtgttaatcttgttattaca

SEQ ID NO: 211593 - DNA, 25 bp, SARS Virus
tcatgtgttaactttgttattacat

SEQ ID NO: 211594 - DNA, 25 bp, SARS Virus
catgtgttaaccttgttattacatt

SEQ ID NO: 211595 - DNA, 25 bp, SARS Virus
atgtgttaaccttgttattacattt

SEQ ID NO: 211596 - DNA, 25 bp, SARS Virus
tgtgttaacctttttattacatttg

SEQ ID NO: 211597 - DNA, 25 bp, SARS Virus
gtgttaaccttgttattacatttgt

SEQ ID NO: 211598 - DNA, 25 bp, SARS Virus
tgttaaccttgttattacatttgtg

SEQ ID NO: 211599 - DNA, 25 bp, SARS Virus
gttaaccttgtttttacatttgtgt

SEQ ID NO: 211600 - DNA, 25 bp, SARS Virus
ttaaccttgttattacatttgtgta

SEQ ID NO: 211601 - DNA, 25 bp, SARS Virus
taaccttgttattacatttgtgtat

SEQ ID NO: 211602 - DNA, 25 bp, SARS Virus
aaccttgttatttcatttgtgtatt

SEQ ID NO: 211603 - DNA, 25 bp, SARS Virus
accttgttattatatttgtgtattc

SEQ ID NO: 211604 - DNA, 25 bp, SARS Virus
ccttgttattacttttgtgtattcc

SEQ ID NO: 211605 - DNA, 25 bp, SARS Virus
cttgttattacatttgtgtattccg

SEQ ID NO: 211606 - DNA, 25 bp, SARS Virus
ttgttattacatttgtgtattccgt

SEQ ID NO: 211607 - DNA, 25 bp, SARS Virus
tgttattacatttgtgtattccgta

SEQ ID NO: 211608 - DNA, 25 bp, SARS Virus
gttattacatttttgtattccgtat

SEQ ID NO: 211609 - DNA, 25 bp, SARS Virus
ttattacatttgtgtattccgtata

SEQ ID NO: 211610 - DNA, 25 bp, SARS Virus
tattacatttgtttattccgtatat

SEQ ID NO: 211611 - DNA, 25 bp, SARS Virus
attacatttgtgtattccgtatatt

SEQ ID NO: 211612 - DNA, 25 bp, SARS Virus
ttacatttgtgttttccgtatatta

SEQ ID NO: 211613 - DNA, 25 bp, SARS Virus
tacatttgtgtattccgtatattaa

SEQ ID NO: 211614 - DNA, 25 bp, SARS Virus
acatttgtgtattccgtatattaac

SEQ ID NO: 211615 - DNA, 25 bp, SARS Virus
catttgtgtatttcgtatattaaca

SEQ ID NO: 211616 - DNA, 25 bp, SARS Virus
atttgtgtattctgtatattaacaa

SEQ ID NO: 211617 - DNA, 25 bp, SARS Virus
tttgtgtattccttatattaacaat

SEQ ID NO: 211618 - DNA, 25 bp, SARS Virus
ttgtgtattccgtatattaacaatt

SEQ ID NO: 211619 - DNA, 25 bp, SARS Virus
tgtgtattccgtttattaacaattt

SEQ ID NO: 211620 - DNA, 25 bp, SARS Virus
gtgtattccgtatattaacaatttg

SEQ ID NO: 211621 - DNA, 25 bp, SARS Virus
tgtattccgtattttaacaatttgt

SEQ ID NO: 211622 - DNA, 25 bp, SARS Virus
gtattccgtatattaacaatttgtg

SEQ ID NO: 211623 - DNA, 25 bp, SARS Virus
tattccgtatattaacaatttgtgt

SEQ ID NO: 211624 - DNA, 25 bp, SARS Virus
attccgtatatttacaatttgtgtg

SEQ ID NO: 211625 - DNA, 25 bp, SARS Virus
ttccgtatattatcaatttgtgtgc

SEQ ID NO: 211626 - DNA, 25 bp, SARS Virus
tccgtatattaataatttgtgtgca

SEQ ID NO: 211627 - DNA, 25 bp, SARS Virus
ccgtatattaactatttgtgtgcaa

SEQ ID NO: 211628 - DNA, 25 bp, SARS Virus
cgtatattaacattttgtgtgcaac

SEQ ID NO: 211629 - DNA, 25 bp, SARS Virus
gtatattaacaatttgtgtgcaaca

SEQ ID NO: 211630 - DNA, 25 bp, SARS Virus
tatattaacaatttgtgtgcaacac

SEQ ID NO: 211631 - DNA, 25 bp, SARS Virus
atattaacaatttgtgtgcaacacg

SEQ ID NO: 211632 - DNA, 25 bp, SARS Virus
tattaacaatttttgtgcaacacga

SEQ ID NO: 211633 - DNA, 25 bp, SARS Virus
attaacaatttgtgtgcaacacgat

SEQ ID NO: 211634 - DNA, 25 bp, SARS Virus
ttaacaatttgtttgcaacacgatt

SEQ ID NO: 211635 - DNA, 25 bp, SARS Virus
taacaatttgtgtgcaacacgatta

SEQ ID NO: 211636 - DNA, 25 bp, SARS Virus
aacaatttgtgttcaacacgattag

SEQ ID NO: 211637 - DNA, 25 bp, SARS Virus
acaatttgtgtgtaacacgattaga

SEQ ID NO: 211638 - DNA, 25 bp, SARS Virus
caatttgtgtgctacacgattagag

SEQ ID NO: 211639 - DNA, 25 bp, SARS Virus
aatttgtgtgcatcacgattagaga

SEQ ID NO: 211640 - DNA, 25 bp, SARS Virus
atttgtgtgcaatacgattagagaa

SEQ ID NO: 211641 - DNA, 25 bp, SARS Virus
tttgtgtgcaactcgattagagaat

SEQ ID NO: 211642 - DNA, 25 bp, SARS Virus
ttgtgtgcaacatgattagagaatc

SEQ ID NO: 211643 - DNA, 25 bp, SARS Virus
tgtgtgcaacactattagagaatcg

SEQ ID NO: 211644 - DNA, 25 bp, SARS Virus
gtgtgcaacacgtttagagaatcgc

SEQ ID NO: 211645 - DNA, 25 bp, SARS Virus
tgtgcaacacgattagagaatcgcg

SEQ ID NO: 211646 - DNA, 25 bp, SARS Virus
gtgcaacacgattagagaatcgcgt

SEQ ID NO: 211647 - DNA, 25 bp, SARS Virus
tgcaacacgatttgagaatcgcgtt

SEQ ID NO: 211648 - DNA, 25 bp, SARS Virus
gcaacacgattatagaatcgcgtta

SEQ ID NO: 211649 - DNA, 25 bp, SARS Virus
caacacgattagtgaatcgcgttaa

SEQ ID NO: 211650 - DNA, 25 bp, SARS Virus
aacacgattagataatcgcgttaaa

SEQ ID NO: 211651 - DNA, 25 bp, SARS Virus
acacgattagagtatcgcgttaaac

SEQ ID NO: 211652 - DNA, 25 bp, SARS Virus
cacgattagagattcgcgttaaact

SEQ ID NO: 211653 - DNA, 25 bp, SARS Virus
acgattagagaatcgcgttaaacta

SEQ ID NO: 211654 - DNA, 25 bp, SARS Virus
cgattagagaattgcgttaaactac

SEQ ID NO: 211655 - DNA, 25 bp, SARS Virus
gattagagaatctcgttaaactaca

SEQ ID NO: 211656 - DNA, 25 bp, SARS Virus
attagagaatcgtgttaaactacaa

SEQ ID NO: 211657 - DNA, 25 bp, SARS Virus
ttagagaatcgctttaaactacaac

SEQ ID NO: 211658 - DNA, 25 bp, SARS Virus
tagagaatcgcgttaaactacaaca

SEQ ID NO: 211659 - DNA, 25 bp, SARS Virus
agagaatcgcgttaaactacaacat

SEQ ID NO: 211660 - DNA, 25 bp, SARS Virus
gagaatcgcgtttaactacaacatt

SEQ ID NO: 211661 - DNA, 25 bp, SARS Virus
agaatcgcgttatactacaacatta

SEQ ID NO: 211662 - DNA, 25 bp, SARS Virus
gaatcgcgttaatctacaacattaa

SEQ ID NO: 211663 - DNA, 25 bp, SARS Virus
aatcgcgttaaattacaacattaac

SEQ ID NO: 211664 - DNA, 25 bp, SARS Virus
atcgcgttaaactacaacattaacg

SEQ ID NO: 211665 - DNA, 25 bp, SARS Virus
tcgcgttaaacttcaacattaacga

SEQ ID NO: 211666 - DNA, 25 bp, SARS Virus
cgcgttaaactataacattaacgac

SEQ ID NO: 211667 - DNA, 25 bp, SARS Virus
gcgttaaactactacattaacgacg

SEQ ID NO: 211668 - DNA, 25 bp, SARS Virus
cgttaaactacatcattaacgacga

SEQ ID NO: 211669 - DNA, 25 bp, SARS Virus
gttaaactacaatattaacgacgaa

SEQ ID NO: 211670 - DNA, 25 bp, SARS Virus
ttaaactacaactttaacgacgaac

SEQ ID NO: 211671 - DNA, 25 bp, SARS Virus
taaactacaacattaacgacgaaca

SEQ ID NO: 211672 - DNA, 25 bp, SARS Virus
aaactacaacattaacgacgaacag

SEQ ID NO: 211673 - DNA, 25 bp, SARS Virus
aactacaacatttacgacgaacagg

SEQ ID NO: 211674 - DNA, 25 bp, SARS Virus
actacaacattatcgacgaacagga

SEQ ID NO: 211675 - DNA, 25 bp, SARS Virus
ctacaacattaatgacgaacaggat

SEQ ID NO: 211676 - DNA, 25 bp, SARS Virus
tacaacattaactacgaacaggatt

SEQ ID NO: 211677 - DNA, 25 bp, SARS Virus
acaacattaacgtcgaacaggattc

SEQ ID NO: 211678 - DNA, 25 bp, SARS Virus
caacattaacgatgaacaggattct

SEQ ID NO: 211679 - DNA, 25 bp, SARS Virus
aacattaacgactaacaggattctt

SEQ ID NO: 211680 - DNA, 25 bp, SARS Virus
acattaacgacgtacaggattctta

SEQ ID NO: 211681 - DNA, 25 bp, SARS Virus
cattaacgacgatcaggattcttac

SEQ ID NO: 211682 - DNA, 25 bp, SARS Virus
attaacgacgaataggattcttacc

SEQ ID NO: 211683 - DNA, 25 bp, SARS Virus
ttaacgacgaactggattcttacca

SEQ ID NO: 211684 - DNA, 25 bp, SARS Virus
taacgacgaacatgattcttaccaa

SEQ ID NO: 211685 - DNA, 25 bp, SARS Virus
aacgacgaacagtattcttaccaaa

SEQ ID NO: 211686 - DNA, 25 bp, SARS Virus
acgacgaacaggtttcttaccaaac

SEQ ID NO: 211687 - DNA, 25 bp, SARS Virus
cgacgaacaggattcttaccaaact

SEQ ID NO: 211688 - DNA, 25 bp, SARS Virus
gacgaacaggattcttaccaaactg

SEQ ID NO: 211689 - DNA, 25 bp, SARS Virus
acgaacaggatttttaccaaactgt

SEQ ID NO: 211690 - DNA, 25 bp, SARS Virus
cgaacaggattcttaccaaactgta

SEQ ID NO: 211691 - DNA, 25 bp, SARS Virus
gaacaggattcttaccaaactgtat

SEQ ID NO: 211692 - DNA, 25 bp, SARS Virus
aacaggattctttccaaactgtatt

SEQ ID NO: 211693 - DNA, 25 bp, SARS Virus
acaggattcttatcaaactgtattc

SEQ ID NO: 211694 - DNA, 25 bp, SARS Virus
caggattcttactaaactgtattcg

SEQ ID NO: 211695 - DNA, 25 bp, SARS Virus
aggattcttacctaactgtattcgg

SEQ ID NO: 211696 - DNA, 25 bp, SARS Virus
ggattcttaccatactgtattcggt

SEQ ID NO: 211697 - DNA, 25 bp, SARS Virus
gattcttaccaatctgtattcggtt

SEQ ID NO: 211698 - DNA, 25 bp, SARS Virus
attcttaccaaattgtattcggttt

SEQ ID NO: 211699 - DNA, 25 bp, SARS Virus
ttcttaccaaactgtattcggtttt

SEQ ID NO: 211700 - DNA, 25 bp, SARS Virus
tcttaccaaactttattcggtttta

SEQ ID NO: 211701 - DNA, 25 bp, SARS Virus
cttaccaaactgtattcggttttaa

SEQ ID NO: 211702 - DNA, 25 bp, SARS Virus
ttaccaaactgttttcggttttaaa

SEQ ID NO: 211703 - DNA, 25 bp, SARS Virus
taccaaactgtattcggttttaaaa

SEQ ID NO: 211704 - DNA, 25 bp, SARS Virus
accaaactgtattcggttttaaaat

SEQ ID NO: 211705 - DNA, 25 bp, SARS Virus
ccaaactgtatttggttttaaaatg

SEQ ID NO: 211706 - DNA, 25 bp, SARS Virus
caaactgtattctgttttaaaatga

SEQ ID NO: 211707 - DNA, 25 bp, SARS Virus
aaactgtattcgtttttaaaatgag

SEQ ID NO: 211708 - DNA, 25 bp, SARS Virus
aactgtattcggttttaaaatgagg

SEQ ID NO: 211709 - DNA, 25 bp, SARS Virus
actgtattcggttttaaaatgaggt

SEQ ID NO: 211710 - DNA, 25 bp, SARS Virus
ctgtattcggttttaaaatgaggtt

SEQ ID NO: 211711 - DNA, 25 bp, SARS Virus
tgtattcggttttaaaatgaggttc

SEQ ID NO: 211712 - DNA, 25 bp, SARS Virus
gtattcggtttttaaatgaggttcc

SEQ ID NO: 211713 - DNA, 25 bp, SARS Virus
tattcggttttataatgaggttcct

SEQ ID NO: 211714 - DNA, 25 bp, SARS Virus
attcggttttaatatgaggttcctt

SEQ ID NO: 211715 - DNA, 25 bp, SARS Virus
ttcggttttaaattgaggttccttg

SEQ ID NO: 211716 - DNA, 25 bp, SARS Virus
tcggttttaaaatgaggttccttgt

SEQ ID NO: 211717 - DNA, 25 bp, SARS Virus
cggttttaaaattaggttccttgtg

SEQ ID NO: 211718 - DNA, 25 bp, SARS Virus
ggttttaaaatgtggttccttgtga

SEQ ID NO: 211719 - DNA, 25 bp, SARS Virus
gttttaaaatgatgttccttgtgat

SEQ ID NO: 211720 - DNA, 25 bp, SARS Virus
ttttaaaatgagtttccttgtgata

SEQ ID NO: 211721 - DNA, 25 bp, SARS Virus
tttaaaatgaggttccttgtgataa

SEQ ID NO: 211722 - DNA, 25 bp, SARS Virus
ttaaaatgaggttccttgtgataat

SEQ ID NO: 211723 - DNA, 25 bp, SARS Virus
taaaatgaggtttcttgtgataatt

SEQ ID NO: 211724 - DNA, 25 bp, SARS Virus
aaaatgaggttctttgtgataatta

SEQ ID NO: 211725 - DNA, 25 bp, SARS Virus
aaatgaggttccttgtgataattaa

SEQ ID NO: 211726 - DNA, 25 bp, SARS Virus
aatgaggttccttgtgataattaac

SEQ ID NO: 211727 - DNA, 25 bp, SARS Virus
atgaggttccttttgataattaacg

SEQ ID NO: 211728 - DNA, 25 bp, SARS Virus
tgaggttccttgtgataattaacgt

SEQ ID NO: 211729 - DNA, 25 bp, SARS Virus
gaggttccttgttataattaacgtc

SEQ ID NO: 211730 - DNA, 25 bp, SARS Virus
aggttccttgtgttaattaacgtcg

SEQ ID NO: 211731 - DNA, 25 bp, SARS Virus
ggttccttgtgataattaacgtcgt

SEQ ID NO: 211732 - DNA, 25 bp, SARS Virus
gttccttgtgattattaacgtcgtt

SEQ ID NO: 211733 - DNA, 25 bp, SARS Virus
ttccttgtgatatttaacgtcgtta

SEQ ID NO: 211734 - DNA, 25 bp, SARS Virus
tccttgtgataattaacgtcgttat

SEQ ID NO: 211735 - DNA, 25 bp, SARS Virus
ccttgtgataattaacgtcgttatg

SEQ ID NO: 211736 - DNA, 25 bp, SARS Virus
cttgtgataatttacgtcgttatgg

SEQ ID NO: 211737 - DNA, 25 bp, SARS Virus
ttgtgataattatcgtcgttatggt

SEQ ID NO: 211738 - DNA, 25 bp, SARS Virus
tgtgataattaatgtcgttatggta

SEQ ID NO: 211739 - DNA, 25 bp, SARS Virus
gtgataattaacttcgttatggtac

SEQ ID NO: 211740 - DNA, 25 bp, SARS Virus
tgataattaacgtcgttatggtact

SEQ ID NO: 211741 - DNA, 25 bp, SARS Virus
gataattaacgttgttatggtactc

SEQ ID NO: 211742 - DNA, 25 bp, SARS Virus
ataattaacgtctttatggtactca

SEQ ID NO: 211743 - DNA, 25 bp, SARS Virus
taattaacgtcgttatggtactcac

SEQ ID NO: 211744 - DNA, 25 bp, SARS Virus
aattaacgtcgttatggtactcacc

SEQ ID NO: 211745 - DNA, 25 bp, SARS Virus
attaacgtcgttttggtactcaccg

SEQ ID NO: 211746 - DNA, 25 bp, SARS Virus
ttaacgtcgttatggtactcaccgt

SEQ ID NO: 211747 - DNA, 25 bp, SARS Virus
taacgtcgttattgtactcaccgtt

SEQ ID NO: 211748 - DNA, 25 bp, SARS Virus
aacgtcgttatgttactcaccgtta

SEQ ID NO: 211749 - DNA, 25 bp, SARS Virus
acgtcgttatggtactcaccgttaa

SEQ ID NO: 211750 - DNA, 25 bp, SARS Virus
cgtcgttatggttctcaccgttaac

SEQ ID NO: 211751 - DNA, 25 bp, SARS Virus
gtcgttatggtattcaccgttaaca

SEQ ID NO: 211752 - DNA, 25 bp, SARS Virus
tcgttatggtactcaccgttaacaa

SEQ ID NO: 211753 - DNA, 25 bp, SARS Virus
cgttatggtacttaccgttaacaaa

SEQ ID NO: 211754 - DNA, 25 bp, SARS Virus
gttatggtactctccgttaacaaaa

SEQ ID NO: 211755 - DNA, 25 bp, SARS Virus
ttatggtactcatcgttaacaaaaa

SEQ ID NO: 211756 - DNA, 25 bp, SARS Virus
tatggtactcactgttaacaaaaat

SEQ ID NO: 211757 - DNA, 25 bp, SARS Virus
atggtactcacctttaacaaaaatt

SEQ ID NO: 211758 - DNA, 25 bp, SARS Virus
tggtactcaccgttaacaaaaattt

SEQ ID NO: 211759 - DNA, 25 bp, SARS Virus
ggtactcaccgttaacaaaaatttg

SEQ ID NO: 211760 - DNA, 25 bp, SARS Virus
gtactcaccgtttacaaaaatttgg

SEQ ID NO: 211761 - DNA, 25 bp, SARS Virus
tactcaccgttatcaaaaatttgga

SEQ ID NO: 211762 - DNA, 25 bp, SARS Virus
actcaccgttaataaaaatttggat

SEQ ID NO: 211763 - DNA, 25 bp, SARS Virus
ctcaccgttaactaaaatttggatt

SEQ ID NO: 211764 - DNA, 25 bp, SARS Virus
tcaccgttaacataaatttggattc

SEQ ID NO: 211765 - DNA, 25 bp, SARS Virus
caccgttaacaataatttggattcc

SEQ ID NO: 211766 - DNA, 25 bp, SARS Virus
accgttaacaaatatttggattccg

SEQ ID NO: 211767 - DNA, 25 bp, SARS Virus
ccgttaacaaaattttggattccga

SEQ ID NO: 211768 - DNA, 25 bp, SARS Virus
cgttaacaaaaatttggattccgat

SEQ ID NO: 211769 - DNA, 25 bp, SARS Virus
gttaacaaaaatttggattccgatc

SEQ ID NO: 211770 - DNA, 25 bp, SARS Virus
ttaacaaaaatttggattccgatca

SEQ ID NO: 211771 - DNA, 25 bp, SARS Virus
taacaaaaattttgattccgatcac

SEQ ID NO: 211772 - DNA, 25 bp, SARS Virus
aacaaaaatttgtattccgatcact

SEQ ID NO: 211773 - DNA, 25 bp, SARS Virus
acaaaaatttggtttccgatcactt

SEQ ID NO: 211774 - DNA, 25 bp, SARS Virus
caaaaatttggattccgatcacttt

SEQ ID NO: 211775 - DNA, 25 bp, SARS Virus
aaaaatttggattccgatcactttc

SEQ ID NO: 211776 - DNA, 25 bp, SARS Virus
aaaatttggatttcgatcactttcg

SEQ ID NO: 211777 - DNA, 25 bp, SARS Virus
aaatttggattctgatcactttcga

SEQ ID NO: 211778 - DNA, 25 bp, SARS Virus
aatttggattcctatcactttcgag

SEQ ID NO: 211779 - DNA, 25 bp, SARS Virus
atttggattccgttcactttcgagt

SEQ ID NO: 211780 - DNA, 25 bp, SARS Virus
tttggattccgatcactttcgagta

SEQ ID NO: 211781 - DNA, 25 bp, SARS Virus
ttggattccgattactttcgagtaa

SEQ ID NO: 211782 - DNA, 25 bp, SARS Virus
tggattccgatctctttcgagtaat

SEQ ID NO: 211783 - DNA, 25 bp, SARS Virus
ggattccgatcattttcgagtaatc

SEQ ID NO: 211784 - DNA, 25 bp, SARS Virus
gattccgatcactttcgagtaatcc

SEQ ID NO: 211785 - DNA, 25 bp, SARS Virus
attccgatcactttcgagtaatcca

SEQ ID NO: 211786 - DNA, 25 bp, SARS Virus
ttccgatcactttcgagtaatccaa

SEQ ID NO: 211787 - DNA, 25 bp, SARS Virus
tccgatcacttttgagtaatccaaa

SEQ ID NO: 211788 - DNA, 25 bp, SARS Virus
ccgatcactttctagtaatccaaag

SEQ ID NO: 211789 - DNA, 25 bp, SARS Virus
cgatcactttcgtgtaatccaaaga

SEQ ID NO: 211790 - DNA, 25 bp, SARS Virus
gatcactttcgattaatccaaagaa

SEQ ID NO: 211791 - DNA, 25 bp, SARS Virus
atcactttcgagtaatccaaagaat

SEQ ID NO: 211792 - DNA, 25 bp, SARS Virus
tcactttcgagttatccaaagaatt

SEQ ID NO: 211793 - DNA, 25 bp, SARS Virus
cactttcgagtattccaaagaatta

SEQ ID NO: 211794 - DNA, 25 bp, SARS Virus
actttcgagtaatccaaagaattac

SEQ ID NO: 211795 - DNA, 25 bp, SARS Virus
ctttcgagtaattcaaagaattacc

SEQ ID NO: 211796 - DNA, 25 bp, SARS Virus
tttcgagtaatctaaagaattacca

SEQ ID NO: 211797 - DNA, 25 bp, SARS Virus
ttcgagtaatcctaagaattaccat

SEQ ID NO: 211798 - DNA, 25 bp, SARS Virus
tcgagtaatccatagaattaccatt

SEQ ID NO: 211799 - DNA, 25 bp, SARS Virus
cgagtaatccaatgaattaccatta

SEQ ID NO: 211800 - DNA, 25 bp, SARS Virus
gagtaatccaaataattaccattac

SEQ ID NO: 211801 - DNA, 25 bp, SARS Virus
agtaatccaaagtattaccattacg

SEQ ID NO: 211802 - DNA, 25 bp, SARS Virus
gtaatccaaagatttaccattacga

SEQ ID NO: 211803 - DNA, 25 bp, SARS Virus
taatccaaagaattaccattacgaa

SEQ ID NO: 211804 - DNA, 25 bp, SARS Virus
aatccaaagaattaccattacgaac

SEQ ID NO: 211805 - DNA, 25 bp, SARS Virus
atccaaagaatttccattacgaaca

SEQ ID NO: 211806 - DNA, 25 bp, SARS Virus
tccaaagaattatcattacgaacac

SEQ ID NO: 211807 - DNA, 25 bp, SARS Virus
ccaaagaattactattacgaacaca

SEQ ID NO: 211808 - DNA, 25 bp, SARS Virus
caaagaattacctttacgaacacaa

SEQ ID NO: 211809 - DNA, 25 bp, SARS Virus
aaagaattaccattacgaacacaaa

SEQ ID NO: 211810 - DNA, 25 bp, SARS Virus
aagaattaccattacgaacacaaaa

SEQ ID NO: 211811 - DNA, 25 bp, SARS Virus
agaattaccatttcgaacacaaaag

SEQ ID NO: 211812 - DNA, 25 bp, SARS Virus
gaattaccattatgaacacaaaagg

SEQ ID NO: 211813 - DNA, 25 bp, SARS Virus
aattaccattactaacacaaaaggt

SEQ ID NO: 211814 - DNA, 25 bp, SARS Virus
attaccattacgtacacaaaaggtg

SEQ ID NO: 211815 - DNA, 25 bp, SARS Virus
ttaccattacgatcacaaaaggtgt

SEQ ID NO: 211816 - DNA, 25 bp, SARS Virus
taccattacgaatacaaaaggtgta

SEQ ID NO: 211817 - DNA, 25 bp, SARS Virus
accattacgaactcaaaaggtgtat

SEQ ID NO: 211818 - DNA, 25 bp, SARS Virus
ccattacgaacataaaaggtgtatt

SEQ ID NO: 211819 - DNA, 25 bp, SARS Virus
cattacgaacactaaaggtgtattc

SEQ ID NO: 211820 - DNA, 25 bp, SARS Virus
attacgaacacataaggtgtattcg

SEQ ID NO: 211821 - DNA, 25 bp, SARS Virus
ttacgaacacaataggtgtattcgt

SEQ ID NO: 211822 - DNA, 25 bp, SARS Virus
tacgaacacaaatggtgtattcgtc

SEQ ID NO: 211823 - DNA, 25 bp, SARS Virus
acgaacacaaaatgtgtattcgtcg

SEQ ID NO: 211824 - DNA, 25 bp, SARS Virus
cgaacacaaaagttgtattcgtcgg

SEQ ID NO: 211825 - DNA, 25 bp, SARS Virus
gaacacaaaaggagtattcgtcggt

SEQ ID NO: 211826 - DNA, 25 bp, SARS Virus
aacacaaaaggtatattcgtcggta

SEQ ID NO: 211827 - DNA, 25 bp, SARS Virus
acacaaaaggtgaattcgtcggtat

SEQ ID NO: 211828 - DNA, 25 bp, SARS Virus
cacaaaaggtgtattcgtcggtatt

SEQ ID NO: 211829 - DNA, 25 bp, SARS Virus
acaaaaggtgtaatcgtcggtattc

SEQ ID NO: 211830 - DNA, 25 bp, SARS Virus
caaaaggtgtatacgtcggtattct

SEQ ID NO: 211831 - DNA, 25 bp, SARS Virus
aaaaggtgtattagtcggtattcta

SEQ ID NO: 211832 - DNA, 25 bp, SARS Virus
aaaggtgtattcatcggtattctag

SEQ ID NO: 211833 - DNA, 25 bp, SARS Virus
aaggtgtattcgacggtattctagg

SEQ ID NO: 211834 - DNA, 25 bp, SARS Virus
aggtgtattcgtaggtattctagga

SEQ ID NO: 211835 - DNA, 25 bp, SARS Virus
ggtgtattcgtcagtattctaggag

SEQ ID NO: 211836 - DNA, 25 bp, SARS Virus
gtgtattcgtcgatattctaggagt

SEQ ID NO: 211837 - DNA, 25 bp, SARS Virus
tgtattcgtcggaattctaggagta

SEQ ID NO: 211838 - DNA, 25 bp, SARS Virus
gtattcgtcggtattctaggagtac

SEQ ID NO: 211839 - DNA, 25 bp, SARS Virus
tattcgtcggtaatctaggagtact

SEQ ID NO: 211840 - DNA, 25 bp, SARS Virus
attcgtcggtatactaggagtactg

SEQ ID NO: 211841 - DNA, 25 bp, SARS Virus
ttcgtcggtattataggagtactgg

SEQ ID NO: 211842 - DNA, 25 bp, SARS Virus
tcgtcggtattcaaggagtactgga

SEQ ID NO: 211843 - DNA, 25 bp, SARS Virus
cgtcggtattctaggagtactggat

SEQ ID NO: 211844 - DNA, 25 bp, SARS Virus
gtcggtattctaagagtactggatt

SEQ ID NO: 211845 - DNA, 25 bp, SARS Virus
tcggtattctagaagtactggattg

SEQ ID NO: 211846 - DNA, 25 bp, SARS Virus
cggtattctaggagtactggattga

SEQ ID NO: 211847 - DNA, 25 bp, SARS Virus
ggtattctaggaatactggattgag

SEQ ID NO: 211848 - DNA, 25 bp, SARS Virus
gtattctaggagaactggattgaga

SEQ ID NO: 211849 - DNA, 25 bp, SARS Virus
tattctaggagtactggattgagaa

SEQ ID NO: 211850 - DNA, 25 bp, SARS Virus
attctaggagtaatggattgagaac

SEQ ID NO: 211851 - DNA, 25 bp, SARS Virus
ttctaggagtacaggattgagaaca

SEQ ID NO: 211852 - DNA, 25 bp, SARS Virus
tctaggagtactagattgagaacac

SEQ ID NO: 211853 - DNA, 25 bp, SARS Virus
ctaggagtactgaattgagaacaca

SEQ ID NO: 211854 - DNA, 25 bp, SARS Virus
taggagtactggattgagaacacaa

SEQ ID NO: 211855 - DNA, 25 bp, SARS Virus
aggagtactggaatgagaacacaat

SEQ ID NO: 211856 - DNA, 25 bp, SARS Virus
ggagtactggatagagaacacaatg

SEQ ID NO: 211857 - DNA, 25 bp, SARS Virus
gagtactggattaagaacacaatga

SEQ ID NO: 211858 - DNA, 25 bp, SARS Virus
agtactggattgagaacacaatgaa

SEQ ID NO: 211859 - DNA, 25 bp, SARS Virus
gtactggattgaaaacacaatgaaa

SEQ ID NO: 211860 - DNA, 25 bp, SARS Virus
tactggattgagaacacaatgaaat

SEQ ID NO: 211861 - DNA, 25 bp, SARS Virus
actggattgagaacacaatgaaatt

SEQ ID NO: 211862 - DNA, 25 bp, SARS Virus
ctggattgagaaaacaatgaaattg

SEQ ID NO: 211863 - DNA, 25 bp, SARS Virus
tggattgagaacacaatgaaattgt

SEQ ID NO: 211864 - DNA, 25 bp, SARS Virus
ggattgagaacaaaatgaaattgtg

SEQ ID NO: 211865 - DNA, 25 bp, SARS Virus
gattgagaacacaatgaaattgtgg

SEQ ID NO: 211866 - DNA, 25 bp, SARS Virus
attgagaacacaatgaaattgtgga

SEQ ID NO: 211867 - DNA, 25 bp, SARS Virus
ttgagaacacaaagaaattgtggaa

SEQ ID NO: 211868 - DNA, 25 bp, SARS Virus
tgagaacacaataaaattgtggaag

SEQ ID NO: 211869 - DNA, 25 bp, SARS Virus
gagaacacaatgaaattgtggaagt

SEQ ID NO: 211870 - DNA, 25 bp, SARS Virus
agaacacaatgaaattgtggaagta

SEQ ID NO: 211871 - DNA, 25 bp, SARS Virus
gaacacaatgaaattgtggaagtag

SEQ ID NO: 211872 - DNA, 25 bp, SARS Virus
aacacaatgaaaatgtggaagtaga

SEQ ID NO: 211873 - DNA, 25 bp, SARS Virus
acacaatgaaatagtggaagtagac

SEQ ID NO: 211874 - DNA, 25 bp, SARS Virus
cacaatgaaattatggaagtagact

SEQ ID NO: 211875 - DNA, 25 bp, SARS Virus
acaatgaaattgaggaagtagacta

SEQ ID NO: 211876 - DNA, 25 bp, SARS Virus
caatgaaattgtagaagtagactac

SEQ ID NO: 211877 - DNA, 25 bp, SARS Virus
aatgaaattgtgaaagtagactacc

SEQ ID NO: 211878 - DNA, 25 bp, SARS Virus
atgaaattgtggaagtagactacca

SEQ ID NO: 211879 - DNA, 25 bp, SARS Virus
tgaaattgtggaagtagactaccaa

SEQ ID NO: 211880 - DNA, 25 bp, SARS Virus
gaaattgtggaaatagactaccaaa

SEQ ID NO: 211881 - DNA, 25 bp, SARS Virus
aaattgtggaagaagactaccaaat

SEQ ID NO: 211882 - DNA, 25 bp, SARS Virus
aattgtggaagtagactaccaaatt

SEQ ID NO: 211883 - DNA, 25 bp, SARS Virus
attgtggaagtaaactaccaaattc

SEQ ID NO: 211884 - DNA, 25 bp, SARS Virus
ttgtggaagtagactaccaaattca

SEQ ID NO: 211885 - DNA, 25 bp, SARS Virus
tgtggaagtagaataccaaattcat

SEQ ID NO: 211886 - DNA, 25 bp, SARS Virus
gtggaagtagacaaccaaattcata

SEQ ID NO: 211887 - DNA, 25 bp, SARS Virus
tggaagtagactaccaaattcatac

SEQ ID NO: 211888 - DNA, 25 bp, SARS Virus
ggaagtagactaacaaattcatact

SEQ ID NO: 211889 - DNA, 25 bp, SARS Virus
gaagtagactacaaaattcatactg

SEQ ID NO: 211890 - DNA, 25 bp, SARS Virus
aagtagactaccaaattcatactgt

SEQ ID NO: 211891 - DNA, 25 bp, SARS Virus
agtagactaccaaattcatactgta

SEQ ID NO: 211892 - DNA, 25 bp, SARS Virus
gtagactaccaaattcatactgtaa

SEQ ID NO: 211893 - DNA, 25 bp, SARS Virus
tagactaccaaaatcatactgtaac

SEQ ID NO: 211894 - DNA, 25 bp, SARS Virus
agactaccaaatacatactgtaacg

SEQ ID NO: 211895 - DNA, 25 bp, SARS Virus
gactaccaaattaatactgtaacgg

SEQ ID NO: 211896 - DNA, 25 bp, SARS Virus
actaccaaattcatactgtaacgga

SEQ ID NO: 211897 - DNA, 25 bp, SARS Virus
ctaccaaattcaaactgtaacggat

SEQ ID NO: 211898 - DNA, 25 bp, SARS Virus
taccaaattcatactgtaacggatg

SEQ ID NO: 211899 - DNA, 25 bp, SARS Virus
accaaattcataatgtaacggatgt

SEQ ID NO: 211900 - DNA, 25 bp, SARS Virus
ccaaattcatacagtaacggatgtt

SEQ ID NO: 211901 - DNA, 25 bp, SARS Virus
caaattcatactataacggatgttg

SEQ ID NO: 211902 - DNA, 25 bp, SARS Virus
aaattcatactgaaacggatgttga

SEQ ID NO: 211903 - DNA, 25 bp, SARS Virus
aattcatactgtaacggatgttgaa

SEQ ID NO: 211904 - DNA, 25 bp, SARS Virus
attcatactgtaacggatgttgaag

SEQ ID NO: 211905 - DNA, 25 bp, SARS Virus
ttcatactgtaaaggatgttgaagc

SEQ ID NO: 211906 - DNA, 25 bp, SARS Virus
tcatactgtaacagatgttgaagcc

SEQ ID NO: 211907 - DNA, 25 bp, SARS Virus
catactgtaacgaatgttgaagcca

SEQ ID NO: 211908 - DNA, 25 bp, SARS Virus
atactgtaacggatgttgaagccat

SEQ ID NO: 211909 - DNA, 25 bp, SARS Virus
tactgtaacggaagttgaagccatc

SEQ ID NO: 211910 - DNA, 25 bp, SARS Virus
actgtaacggatattgaagccatca

SEQ ID NO: 211911 - DNA, 25 bp, SARS Virus
ctgtaacggatgatgaagccatcaa

SEQ ID NO: 211912 - DNA, 25 bp, SARS Virus
tgtaacggatgtagaagccatcaaa

SEQ ID NO: 211913 - DNA, 25 bp, SARS Virus
gtaacggatgttaaagccatcaaaa

SEQ ID NO: 211914 - DNA, 25 bp, SARS Virus
taacggatgttgaagccatcaaaag

SEQ ID NO: 211915 - DNA, 25 bp, SARS Virus
aacggatgttgaagccatcaaaagt

SEQ ID NO: 211916 - DNA, 25 bp, SARS Virus
acggatgttgaaaccatcaaaagtg

SEQ ID NO: 211917 - DNA, 25 bp, SARS Virus
cggatgttgaagacatcaaaagtgc

SEQ ID NO: 211918 - DNA, 25 bp, SARS Virus
ggatgttgaagcaatcaaaagtgca

SEQ ID NO: 211919 - DNA, 25 bp, SARS Virus
gatgttgaagccatcaaaagtgcag

SEQ ID NO: 211920 - DNA, 25 bp, SARS Virus
atgttgaagccaacaaaagtgcagt

SEQ ID NO: 211921 - DNA, 25 bp, SARS Virus
tgttgaagccataaaaagtgcagtg

SEQ ID NO: 211922 - DNA, 25 bp, SARS Virus
gttgaagccatcaaaagtgcagtgt

SEQ ID NO: 211923 - DNA, 25 bp, SARS Virus
ttgaagccatcaaaagtgcagtgtg

SEQ ID NO: 211924 - DNA, 25 bp, SARS Virus
tgaagccatcaaaagtgcagtgtga

SEQ ID NO: 211925 - DNA, 25 bp, SARS Virus
gaagccatcaaaagtgcagtgtgag

SEQ ID NO: 211926 - DNA, 25 bp, SARS Virus
aagccatcaaaaatgcagtgtgaga

SEQ ID NO: 211927 - DNA, 25 bp, SARS Virus
agccatcaaaagagcagtgtgagat

SEQ ID NO: 211928 - DNA, 25 bp, SARS Virus
gccatcaaaagtacagtgtgagata

SEQ ID NO: 211929 - DNA, 25 bp, SARS Virus
ccatcaaaagtgaagtgtgagatac

SEQ ID NO: 211930 - DNA, 25 bp, SARS Virus
catcaaaagtgcagtgtgagatact

SEQ ID NO: 211931 - DNA, 25 bp, SARS Virus
atcaaaagtgcaatgtgagatactg

SEQ ID NO: 211932 - DNA, 25 bp, SARS Virus
tcaaaagtgcagagtgagatactga

SEQ ID NO: 211933 - DNA, 25 bp, SARS Virus
caaaagtgcagtatgagatactgaa

SEQ ID NO: 211934 - DNA, 25 bp, SARS Virus
aaaagtgcagtgagagatactgaag

SEQ ID NO: 211935 - DNA, 25 bp, SARS Virus
aaagtgcagtgtaagatactgaagg

SEQ ID NO: 211936 - DNA, 25 bp, SARS Virus
aagtgcagtgtgagatactgaagga

SEQ ID NO: 211937 - DNA, 25 bp, SARS Virus
agtgcagtgtgaaatactgaaggaa

SEQ ID NO: 211938 - DNA, 25 bp, SARS Virus
gtgcagtgtgagatactgaaggaag

SEQ ID NO: 211939 - DNA, 25 bp, SARS Virus
tgcagtgtgagaaactgaaggaaga

SEQ ID NO: 211940 - DNA, 25 bp, SARS Virus
gcagtgtgagatactgaaggaagac

SEQ ID NO: 211941 - DNA, 25 bp, SARS Virus
cagtgtgagataatgaaggaagaca

SEQ ID NO: 211942 - DNA, 25 bp, SARS Virus
agtgtgagatacagaaggaagacat

SEQ ID NO: 211943 - DNA, 25 bp, SARS Virus
gtgtgagatactaaaggaagacata

SEQ ID NO: 211944 - DNA, 25 bp, SARS Virus
tgtgagatactgaaggaagacatac

SEQ ID NO: 211945 - DNA, 25 bp, SARS Virus
gtgagatactgaaggaagacatacc

SEQ ID NO: 211946 - DNA, 25 bp, SARS Virus
tgagatactgaaagaagacatacca

SEQ ID NO: 211947 - DNA, 25 bp, SARS Virus
gagatactgaagaaagacataccat

SEQ ID NO: 211948 - DNA, 25 bp, SARS Virus
agatactgaaggaagacataccatc

SEQ ID NO: 211949 - DNA, 25 bp, SARS Virus
gatactgaaggaagacataccatcc

SEQ ID NO: 211950 - DNA, 25 bp, SARS Virus
atactgaaggaaaacataccatcct

SEQ ID NO: 211951 - DNA, 25 bp, SARS Virus
tactgaaggaagacataccatccta

SEQ ID NO: 211952 - DNA, 25 bp, SARS Virus
actgaaggaagaaataccatcctaa

SEQ ID NO: 211953 - DNA, 25 bp, SARS Virus
ctgaaggaagacataccatcctaaa

SEQ ID NO: 211954 - DNA, 25 bp, SARS Virus
tgaaggaagacaaaccatcctaaaa

SEQ ID NO: 211955 - DNA, 25 bp, SARS Virus
gaaggaagacataccatcctaaaag

SEQ ID NO: 211956 - DNA, 25 bp, SARS Virus
aaggaagacataacatcctaaaagg

SEQ ID NO: 211957 - DNA, 25 bp, SARS Virus
aggaagacatacaatcctaaaaggt

SEQ ID NO: 211958 - DNA, 25 bp, SARS Virus
ggaagacataccatcctaaaaggtg

SEQ ID NO: 211959 - DNA, 25 bp, SARS Virus
gaagacataccaacctaaaaggtga

SEQ ID NO: 211960 - DNA, 25 bp, SARS Virus
aagacataccatactaaaaggtgat

SEQ ID NO: 211961 - DNA, 25 bp, SARS Virus
agacataccatcataaaaggtgatg

SEQ ID NO: 211962 - DNA, 25 bp, SARS Virus
gacataccatccaaaaaggtgatga

SEQ ID NO: 211963 - DNA, 25 bp, SARS Virus
acataccatcctaaaaggtgatgaa

SEQ ID NO: 211964 - DNA, 25 bp, SARS Virus
cataccatcctaaaaggtgatgaag

SEQ ID NO: 211965 - DNA, 25 bp, SARS Virus
ataccatcctaaaaggtgatgaaga

SEQ ID NO: 211966 - DNA, 25 bp, SARS Virus
taccatcctaaaaggtgatgaagaa

SEQ ID NO: 211967 - DNA, 25 bp, SARS Virus
accatcctaaaaagtgatgaagaag

SEQ ID NO: 211968 - DNA, 25 bp, SARS Virus
ccatcctaaaagatgatgaagaagt

SEQ ID NO: 211969 - DNA, 25 bp, SARS Virus
catcctaaaaggagatgaagaagtc

SEQ ID NO: 211970 - DNA, 25 bp, SARS Virus
atcctaaaaggtaatgaagaagtct

SEQ ID NO: 211971 - DNA, 25 bp, SARS Virus
tcctaaaaggtgatgaagaagtctc

SEQ ID NO: 211972 - DNA, 25 bp, SARS Virus
cctaaaaggtgaagaagaagtctcc

SEQ ID NO: 211973 - DNA, 25 bp, SARS Virus
ctaaaaggtgataaagaagtctcca

SEQ ID NO: 211974 - DNA, 25 bp, SARS Virus
taaaaggtgatgaagaagtctccac

SEQ ID NO: 211975 - DNA, 25 bp, SARS Virus
aaaaggtgatgaagaagtctccacc

SEQ ID NO: 211976 - DNA, 25 bp, SARS Virus
aaaggtgatgaaaaagtctccaccc

SEQ ID NO: 211977 - DNA, 25 bp, SARS Virus
aaggtgatgaagaagtctccaccca

SEQ ID NO: 211978 - DNA, 25 bp, SARS Virus
aggtgatgaagaagtctccacccaa

SEQ ID NO: 211979 - DNA, 25 bp, SARS Virus
ggtgatgaagaaatctccacccaac

SEQ ID NO: 211980 - DNA, 25 bp, SARS Virus
gtgatgaagaagactccacccaaca

SEQ ID NO: 211981 - DNA, 25 bp, SARS Virus
tgatgaagaagtatccacccaacaa

SEQ ID NO: 211982 - DNA, 25 bp, SARS Virus
gatgaagaagtcaccacccaacaac

SEQ ID NO: 211983 - DNA, 25 bp, SARS Virus
atgaagaagtctacacccaacaact

SEQ ID NO: 211984 - DNA, 25 bp, SARS Virus
tgaagaagtctcaacccaacaactg

SEQ ID NO: 211985 - DNA, 25 bp, SARS Virus
gaagaagtctccacccaacaactga

SEQ ID NO: 211986 - DNA, 25 bp, SARS Virus
aagaagtctccaaccaacaactgaa

SEQ ID NO: 211987 - DNA, 25 bp, SARS Virus
agaagtctccacacaacaactgaaa

SEQ ID NO: 211988 - DNA, 25 bp, SARS Virus
gaagtctccaccaaacaactgaaag

SEQ ID NO: 211989 - DNA, 25 bp, SARS Virus
aagtctccacccaacaactgaaagt

SEQ ID NO: 211990 - DNA, 25 bp, SARS Virus
agtctccacccaacaactgaaagtg

SEQ ID NO: 211991 - DNA, 25 bp, SARS Virus
gtctccacccaaaaactgaaagtgt

SEQ ID NO: 211992 - DNA, 25 bp, SARS Virus
tctccacccaacaactgaaagtgtt

SEQ ID NO: 211993 - DNA, 25 bp, SARS Virus
ctccacccaacaactgaaagtgttc

SEQ ID NO: 211994 - DNA, 25 bp, SARS Virus
tccacccaacaaatgaaagtgttcg

SEQ ID NO: 211995 - DNA, 25 bp, SARS Virus
ccacccaacaacagaaagtgttcgt

SEQ ID NO: 211996 - DNA, 25 bp, SARS Virus
cacccaacaactaaaagtgttcgtt

SEQ ID NO: 211997 - DNA, 25 bp, SARS Virus
acccaacaactgaaagtgttcgttc

SEQ ID NO: 211998 - DNA, 25 bp, SARS Virus
cccaacaactgaaagtgttcgttct

SEQ ID NO: 211999 - DNA, 25 bp, SARS Virus
ccaacaactgaaagtgttcgttcta

SEQ ID NO: 212000 - DNA, 25 bp, SARS Virus
caacaactgaaaatgttcgttctaa

SEQ ID NO: 212001 - DNA, 25 bp, SARS Virus
aacaactgaaagagttcgttctaac

SEQ ID NO: 212002 - DNA, 25 bp, SARS Virus
acaactgaaagtattcgttctaaca

SEQ ID NO: 212003 - DNA, 25 bp, SARS Virus
caactgaaagtgatcgttctaacag

SEQ ID NO: 212004 - DNA, 25 bp, SARS Virus
aactgaaagtgtacgttctaacagg

SEQ ID NO: 212005 - DNA, 25 bp, SARS Virus
actgaaagtgttagttctaacaggt

SEQ ID NO: 212006 - DNA, 25 bp, SARS Virus
ctgaaagtgttcattctaacaggta

SEQ ID NO: 212007 - DNA, 25 bp, SARS Virus
tgaaagtgttcgatctaacaggtaa

SEQ ID NO: 212008 - DNA, 25 bp, SARS Virus
gaaagtgttcgtactaacaggtaag

SEQ ID NO: 212009 - DNA, 25 bp, SARS Virus
aaagtgttcgttataacaggtaagg

SEQ ID NO: 212010 - DNA, 25 bp, SARS Virus
aagtgttcgttcaaacaggtaagga

SEQ ID NO: 212011 - DNA, 25 bp, SARS Virus
agtgttcgttctaacaggtaaggaa

SEQ ID NO: 212012 - DNA, 25 bp, SARS Virus
gtgttcgttctaacaggtaaggaac

SEQ ID NO: 212013 - DNA, 25 bp, SARS Virus
tgttcgttctaaaaggtaaggaaca

SEQ ID NO: 212014 - DNA, 25 bp, SARS Virus
gttcgttctaacaggtaaggaacac

SEQ ID NO: 212015 - DNA, 25 bp, SARS Virus
ttcgttctaacaagtaaggaacaca

SEQ ID NO: 212016 - DNA, 25 bp, SARS Virus
tcgttctaacagataaggaacacac

SEQ ID NO: 212017 - DNA, 25 bp, SARS Virus
cgttctaacaggaaaggaacacaca

SEQ ID NO: 212018 - DNA, 25 bp, SARS Virus
gttctaacaggtaaggaacacacag

SEQ ID NO: 212019 - DNA, 25 bp, SARS Virus
ttctaacaggtaaggaacacacaga

SEQ ID NO: 212020 - DNA, 25 bp, SARS Virus
tctaacaggtaaagaacacacagaa

SEQ ID NO: 212021 - DNA, 25 bp, SARS Virus
ctaacaggtaagaaacacacagaag

SEQ ID NO: 212022 - DNA, 25 bp, SARS Virus
taacaggtaaggaacacacagaaga

SEQ ID NO: 212023 - DNA, 25 bp, SARS Virus
aacaggtaaggaacacacagaagat

SEQ ID NO: 212024 - DNA, 25 bp, SARS Virus
acaggtaaggaaaacacagaagatg

SEQ ID NO: 212025 - DNA, 25 bp, SARS Virus
caggtaaggaacacacagaagatga

SEQ ID NO: 212026 - DNA, 25 bp, SARS Virus
aggtaaggaacaaacagaagatgac

SEQ ID NO: 212027 - DNA, 25 bp, SARS Virus
ggtaaggaacacacagaagatgacg

SEQ ID NO: 212028 - DNA, 25 bp, SARS Virus
gtaaggaacacaaagaagatgacgg

SEQ ID NO: 212029 - DNA, 25 bp, SARS Virus
taaggaacacacagaagatgacggt

SEQ ID NO: 212030 - DNA, 25 bp, SARS Virus
aaggaacacacaaaagatgacggtc

SEQ ID NO: 212031 - DNA, 25 bp, SARS Virus
aggaacacacagaagatgacggtct

SEQ ID NO: 212032 - DNA, 25 bp, SARS Virus
ggaacacacagaagatgacggtctt

SEQ ID NO: 212033 - DNA, 25 bp, SARS Virus
gaacacacagaaaatgacggtcttg

SEQ ID NO: 212034 - DNA, 25 bp, SARS Virus
aacacacagaagatgacggtcttga

SEQ ID NO: 212035 - DNA, 25 bp, SARS Virus
acacacagaagaagacggtcttgaa

SEQ ID NO: 212036 - DNA, 25 bp, SARS Virus
cacacagaagataacggtcttgaag

SEQ ID NO: 212037 - DNA, 25 bp, SARS Virus
acacagaagatgacggtcttgaagt

SEQ ID NO: 212038 - DNA, 25 bp, SARS Virus
cacagaagatgaaggtcttgaagtt

SEQ ID NO: 212039 - DNA, 25 bp, SARS Virus
acagaagatgacagtcttgaagttt

SEQ ID NO: 212040 - DNA, 25 bp, SARS Virus
cagaagatgacgatcttgaagttta

SEQ ID NO: 212041 - DNA, 25 bp, SARS Virus
agaagatgacggacttgaagtttac

SEQ ID NO: 212042 - DNA, 25 bp, SARS Virus
gaagatgacggtattgaagtttact

SEQ ID NO: 212043 - DNA, 25 bp, SARS Virus
aagatgacggtcatgaagtttactt

SEQ ID NO: 212044 - DNA, 25 bp, SARS Virus
agatgacggtctagaagtttactta

SEQ ID NO: 212045 - DNA, 25 bp, SARS Virus
gatgacggtcttaaagtttacttaa

SEQ ID NO: 212046 - DNA, 25 bp, SARS Virus
atgacggtcttgaagtttacttaaa

SEQ ID NO: 212047 - DNA, 25 bp, SARS Virus
tgacggtcttgaagtttacttaaac

SEQ ID NO: 212048 - DNA, 25 bp, SARS Virus
gacggtcttgaaatttacttaaact

SEQ ID NO: 212049 - DNA, 25 bp, SARS Virus
acggtcttgaagattacttaaactt

SEQ ID NO: 212050 - DNA, 25 bp, SARS Virus
cggtcttgaagtatacttaaacttc

SEQ ID NO: 212051 - DNA, 25 bp, SARS Virus
ggtcttgaagttaacttaaacttca

SEQ ID NO: 212052 - DNA, 25 bp, SARS Virus
gtcttgaagtttacttaaacttcat

SEQ ID NO: 212053 - DNA, 25 bp, SARS Virus
tcttgaagtttaattaaacttcata

SEQ ID NO: 212054 - DNA, 25 bp, SARS Virus
cttgaagtttacataaacttcatag

SEQ ID NO: 212055 - DNA, 25 bp, SARS Virus
ttgaagtttactaaaacttcataga

SEQ ID NO: 212056 - DNA, 25 bp, SARS Virus
tgaagtttacttaaacttcatagat

SEQ ID NO: 212057 - DNA, 25 bp, SARS Virus
gaagtttacttaaacttcatagatg

SEQ ID NO: 212058 - DNA, 25 bp, SARS Virus
aagtttacttaaacttcatagatga

SEQ ID NO: 212059 - DNA, 25 bp, SARS Virus
agtttacttaaaattcatagatgac

SEQ ID NO: 212060 - DNA, 25 bp, SARS Virus
gtttacttaaacatcatagatgacc

SEQ ID NO: 212061 - DNA, 25 bp, SARS Virus
tttacttaaactacatagatgaccg

SEQ ID NO: 212062 - DNA, 25 bp, SARS Virus
ttacttaaacttaatagatgaccga

SEQ ID NO: 212063 - DNA, 25 bp, SARS Virus
tacttaaacttcatagatgaccgaa

SEQ ID NO: 212064 - DNA, 25 bp, SARS Virus
acttaaacttcaaagatgaccgaaa

SEQ ID NO: 212065 - DNA, 25 bp, SARS Virus
cttaaacttcatagatgaccgaaac

SEQ ID NO: 212066 - DNA, 25 bp, SARS Virus
ttaaacttcataaatgaccgaaaca

SEQ ID NO: 212067 - DNA, 25 bp, SARS Virus
taaacttcatagatgaccgaaacat

SEQ ID NO: 212068 - DNA, 25 bp, SARS Virus
aaacttcatagaagaccgaaacatg

SEQ ID NO: 212069 - DNA, 25 bp, SARS Virus
aacttcatagataaccgaaacatga

SEQ ID NO: 212070 - DNA, 25 bp, SARS Virus
acttcatagatgaccgaaacatgag

SEQ ID NO: 212071 - DNA, 25 bp, SARS Virus
cttcatagatgaacgaaacatgagg

SEQ ID NO: 212072 - DNA, 25 bp, SARS Virus
ttcatagatgacagaaacatgaggt

SEQ ID NO: 212073 - DNA, 25 bp, SARS Virus
tcatagatgaccaaaacatgaggtt

SEQ ID NO: 212074 - DNA, 25 bp, SARS Virus
catagatgaccgaaacatgaggttt

SEQ ID NO: 212075 - DNA, 25 bp, SARS Virus
atagatgaccgaaacatgaggtttc

SEQ ID NO: 212076 - DNA, 25 bp, SARS Virus
tagatgaccgaaacatgaggtttct

SEQ ID NO: 212077 - DNA, 25 bp, SARS Virus
agatgaccgaaaaatgaggtttctg

SEQ ID NO: 212078 - DNA, 25 bp, SARS Virus
gatgaccgaaacatgaggtttctgt

SEQ ID NO: 212079 - DNA, 25 bp, SARS Virus
atgaccgaaacaagaggtttctgtt

SEQ ID NO: 212080 - DNA, 25 bp, SARS Virus
tgaccgaaacataaggtttctgttg

SEQ ID NO: 212081 - DNA, 25 bp, SARS Virus
gaccgaaacatgaggtttctgttgc

SEQ ID NO: 212082 - DNA, 25 bp, SARS Virus
accgaaacatgaagtttctgttgca

SEQ ID NO: 212083 - DNA, 25 bp, SARS Virus
ccgaaacatgagatttctgttgcat

SEQ ID NO: 212084 - DNA, 25 bp, SARS Virus
cgaaacatgaggattctgttgcatt

SEQ ID NO: 212085 - DNA, 25 bp, SARS Virus
gaaacatgaggtatctgttgcattt

SEQ ID NO: 212086 - DNA, 25 bp, SARS Virus
aaacatgaggttactgttgcatttg

SEQ ID NO: 212087 - DNA, 25 bp, SARS Virus
aacatgaggtttatgttgcatttgt

SEQ ID NO: 212088 - DNA, 25 bp, SARS Virus
acatgaggtttcagttgcatttgtg

SEQ ID NO: 212089 - DNA, 25 bp, SARS Virus
catgaggtttctattgcatttgtgg

SEQ ID NO: 212090 - DNA, 25 bp, SARS Virus
atgaggtttctgatgcatttgtggt

SEQ ID NO: 212091 - DNA, 25 bp, SARS Virus
tgaggtttctgtagcatttgtggtt

SEQ ID NO: 212092 - DNA, 25 bp, SARS Virus
gaggtttctgttacatttgtggttc

SEQ ID NO: 212093 - DNA, 25 bp, SARS Virus
aggtttctgttgaatttgtggttca

SEQ ID NO: 212094 - DNA, 25 bp, SARS Virus
ggtttctgttgcatttgtggttcac

SEQ ID NO: 212095 - DNA, 25 bp, SARS Virus
gtttctgttgcaattgtggttcaca

SEQ ID NO: 212096 - DNA, 25 bp, SARS Virus
tttctgttgcatatgtggttcacaa

SEQ ID NO: 212097 - DNA, 25 bp, SARS Virus
ttctgttgcattagtggttcacaaa

SEQ ID NO: 212098 - DNA, 25 bp, SARS Virus
tctgttgcatttatggttcacaaac

SEQ ID NO: 212099 - DNA, 25 bp, SARS Virus
ctgttgcatttgaggttcacaaacc

SEQ ID NO: 212100 - DNA, 25 bp, SARS Virus
tgttgcatttgtagttcacaaacca

SEQ ID NO: 212101 - DNA, 25 bp, SARS Virus
gttgcatttgtgattcacaaaccaa

SEQ ID NO: 212102 - DNA, 25 bp, SARS Virus
ttgcatttgtggatcacaaaccaaa

SEQ ID NO: 212103 - DNA, 25 bp, SARS Virus
tgcatttgtggtacacaaaccaaac

SEQ ID NO: 212104 - DNA, 25 bp, SARS Virus
gcatttgtggttaacaaaccaaact

SEQ ID NO: 212105 - DNA, 25 bp, SARS Virus
catttgtggttcacaaaccaaactt

SEQ ID NO: 212106 - DNA, 25 bp, SARS Virus
atttgtggttcaaaaaccaaacttg

SEQ ID NO: 212107 - DNA, 25 bp, SARS Virus
tttgtggttcacaaaccaaacttgc

SEQ ID NO: 212108 - DNA, 25 bp, SARS Virus
ttgtggttcacaaaccaaacttgca

SEQ ID NO: 212109 - DNA, 25 bp, SARS Virus
tgtggttcacaaaccaaacttgcaa

SEQ ID NO: 212110 - DNA, 25 bp, SARS Virus
gtggttcacaaaacaaacttgcaac

SEQ ID NO: 212111 - DNA, 25 bp, SARS Virus
tggttcacaaacaaaacttgcaaca

SEQ ID NO: 212112 - DNA, 25 bp, SARS Virus
ggttcacaaaccaaacttgcaacag

SEQ ID NO: 212113 - DNA, 25 bp, SARS Virus
gttcacaaaccaaacttgcaacaga

SEQ ID NO: 212114 - DNA, 25 bp, SARS Virus
ttcacaaaccaaacttgcaacagaa

SEQ ID NO: 212115 - DNA, 25 bp, SARS Virus
tcacaaaccaaaattgcaacagaac

SEQ ID NO: 212116 - DNA, 25 bp, SARS Virus
cacaaaccaaacatgcaacagaacc

SEQ ID NO: 212117 - DNA, 25 bp, SARS Virus
acaaaccaaactagcaacagaacca

SEQ ID NO: 212118 - DNA, 25 bp, SARS Virus
caaaccaaacttacaacagaaccaa

SEQ ID NO: 212119 - DNA, 25 bp, SARS Virus
aaaccaaacttgaaacagaaccaac

SEQ ID NO: 212120 - DNA, 25 bp, SARS Virus
aaccaaacttgcaacagaaccaaca

SEQ ID NO: 212121 - DNA, 25 bp, SARS Virus
accaaacttgcaacagaaccaacat

SEQ ID NO: 212122 - DNA, 25 bp, SARS Virus
ccaaacttgcaaaagaaccaacatc

SEQ ID NO: 212123 - DNA, 25 bp, SARS Virus
caaacttgcaacagaaccaacatcg

SEQ ID NO: 212124 - DNA, 25 bp, SARS Virus
aaacttgcaacaaaaccaacatcgg

SEQ ID NO: 212125 - DNA, 25 bp, SARS Virus
aacttgcaacagaaccaacatcgga

SEQ ID NO: 212126 - DNA, 25 bp, SARS Virus
acttgcaacagaaccaacatcggac

SEQ ID NO: 212127 - DNA, 25 bp, SARS Virus
cttgcaacagaaacaacatcggacc

SEQ ID NO: 212128 - DNA, 25 bp, SARS Virus
ttgcaacagaacaaacatcggacca

SEQ ID NO: 212129 - DNA, 25 bp, SARS Virus
tgcaacagaaccaacatcggaccaa

SEQ ID NO: 212130 - DNA, 25 bp, SARS Virus
gcaacagaaccaacatcggaccaat

SEQ ID NO: 212131 - DNA, 25 bp, SARS Virus
caacagaaccaaaatcggaccaatt

SEQ ID NO: 212132 - DNA, 25 bp, SARS Virus
aacagaaccaacatcggaccaatta

SEQ ID NO: 212133 - DNA, 25 bp, SARS Virus
acagaaccaacaacggaccaattac

SEQ ID NO: 212134 - DNA, 25 bp, SARS Virus
cagaaccaacataggaccaattaca

SEQ ID NO: 212135 - DNA, 25 bp, SARS Virus
agaaccaacatcagaccaattacac

SEQ ID NO: 212136 - DNA, 25 bp, SARS Virus
gaaccaacatcgaaccaattacacg

SEQ ID NO: 212137 - DNA, 25 bp, SARS Virus
aaccaacatcggaccaattacacgg

SEQ ID NO: 212138 - DNA, 25 bp, SARS Virus
accaacatcggaacaattacacggt

SEQ ID NO: 212139 - DNA, 25 bp, SARS Virus
ccaacatcggacaaattacacggtt

SEQ ID NO: 212140 - DNA, 25 bp, SARS Virus
caacatcggaccaattacacggttt

SEQ ID NO: 212141 - DNA, 25 bp, SARS Virus
aacatcggaccaattacacggtttg

SEQ ID NO: 212142 - DNA, 25 bp, SARS Virus
acatcggaccaaatacacggtttgt

SEQ ID NO: 212143 - DNA, 25 bp, SARS Virus
catcggaccaataacacggtttgtt

SEQ ID NO: 212144 - DNA, 25 bp, SARS Virus
atcggaccaattacacggtttgtta

SEQ ID NO: 212145 - DNA, 25 bp, SARS Virus
tcggaccaattaaacggtttgttaa

SEQ ID NO: 212146 - DNA, 25 bp, SARS Virus
cggaccaattacacggtttgttaac

SEQ ID NO: 212147 - DNA, 25 bp, SARS Virus
ggaccaattacaaggtttgttaacc

SEQ ID NO: 212148 - DNA, 25 bp, SARS Virus
gaccaattacacagtttgttaaccg

SEQ ID NO: 212149 - DNA, 25 bp, SARS Virus
accaattacacgatttgttaaccga

SEQ ID NO: 212150 - DNA, 25 bp, SARS Virus
ccaattacacggattgttaaccgaa

SEQ ID NO: 212151 - DNA, 25 bp, SARS Virus
caattacacggtatgttaaccgaat

SEQ ID NO: 212152 - DNA, 25 bp, SARS Virus
aattacacggttagttaaccgaata

SEQ ID NO: 212153 - DNA, 25 bp, SARS Virus
attacacggtttattaaccgaatac

SEQ ID NO: 212154 - DNA, 25 bp, SARS Virus
ttacacggtttgataaccgaatacg

SEQ ID NO: 212155 - DNA, 25 bp, SARS Virus
tacacggtttgtaaaccgaatacgt

SEQ ID NO: 212156 - DNA, 25 bp, SARS Virus
acacggtttgttaaccgaatacgtc

SEQ ID NO: 212157 - DNA, 25 bp, SARS Virus
cacggtttgttaaccgaatacgtca

SEQ ID NO: 212158 - DNA, 25 bp, SARS Virus
acggtttgttaaacgaatacgtcat

SEQ ID NO: 212159 - DNA, 25 bp, SARS Virus
cggtttgttaacagaatacgtcatt

SEQ ID NO: 212160 - DNA, 25 bp, SARS Virus
ggtttgttaaccaaatacgtcatta

SEQ ID NO: 212161 - DNA, 25 bp, SARS Virus
gtttgttaaccgaatacgtcattaa

SEQ ID NO: 212162 - DNA, 25 bp, SARS Virus
tttgttaaccgaatacgtcattaaa

SEQ ID NO: 212163 - DNA, 25 bp, SARS Virus
ttgttaaccgaaaacgtcattaaat

SEQ ID NO: 212164 - DNA, 25 bp, SARS Virus
tgttaaccgaatacgtcattaaatc

SEQ ID NO: 212165 - DNA, 25 bp, SARS Virus
gttaaccgaataagtcattaaatcg

SEQ ID NO: 212166 - DNA, 25 bp, SARS Virus
ttaaccgaatacatcattaaatcgt

SEQ ID NO: 212167 - DNA, 25 bp, SARS Virus
taaccgaatacgacattaaatcgtg

SEQ ID NO: 212168 - DNA, 25 bp, SARS Virus
aaccgaatacgtaattaaatcgtgg

SEQ ID NO: 212169 - DNA, 25 bp, SARS Virus
accgaatacgtcattaaatcgtgga

SEQ ID NO: 212170 - DNA, 25 bp, SARS Virus
ccgaatacgtcaataaatcgtggaa

SEQ ID NO: 212171 - DNA, 25 bp, SARS Virus
cgaatacgtcataaaatcgtggaaa

SEQ ID NO: 212172 - DNA, 25 bp, SARS Virus
gaatacgtcattaaatcgtggaaag

SEQ ID NO: 212173 - DNA, 25 bp, SARS Virus
aatacgtcattaaatcgtggaaaga

SEQ ID NO: 212174 - DNA, 25 bp, SARS Virus
atacgtcattaaatcgtggaaagaa

SEQ ID NO: 212175 - DNA, 25 bp, SARS Virus
tacgtcattaaaacgtggaaagaac

SEQ ID NO: 212176 - DNA, 25 bp, SARS Virus
acgtcattaaatagtggaaagaact

SEQ ID NO: 212177 - DNA, 25 bp, SARS Virus
cgtcattaaatcatggaaagaactt

SEQ ID NO: 212178 - DNA, 25 bp, SARS Virus
gtcattaaatcgaggaaagaacttt

SEQ ID NO: 212179 - DNA, 25 bp, SARS Virus
tcattaaatcgtagaaagaactttg

SEQ ID NO: 212180 - DNA, 25 bp, SARS Virus
cattaaatcgtgaaaagaactttga

SEQ ID NO: 212181 - DNA, 25 bp, SARS Virus
attaaatcgtggaaagaactttgag

SEQ ID NO: 212182 - DNA, 25 bp, SARS Virus
ttaaatcgtggaaagaactttgagc

SEQ ID NO: 212183 - DNA, 25 bp, SARS Virus
taaatcgtggaaagaactttgagcg

SEQ ID NO: 212184 - DNA, 25 bp, SARS Virus
aaatcgtggaaaaaactttgagcga

SEQ ID NO: 212185 - DNA, 25 bp, SARS Virus
aatcgtggaaagaactttgagcgac

SEQ ID NO: 212186 - DNA, 25 bp, SARS Virus
atcgtggaaagaactttgagcgact

SEQ ID NO: 212187 - DNA, 25 bp, SARS Virus
tcgtggaaagaaatttgagcgactt

SEQ ID NO: 212188 - DNA, 25 bp, SARS Virus
cgtggaaagaacattgagcgactta

SEQ ID NO: 212189 - DNA, 25 bp, SARS Virus
gtggaaagaactatgagcgacttat

SEQ ID NO: 212190 - DNA, 25 bp, SARS Virus
tggaaagaacttagagcgacttatc

SEQ ID NO: 212191 - DNA, 25 bp, SARS Virus
ggaaagaactttaagcgacttatca

SEQ ID NO: 212192 - DNA, 25 bp, SARS Virus
gaaagaactttgagcgacttatcac

SEQ ID NO: 212193 - DNA, 25 bp, SARS Virus
aaagaactttgaacgacttatcaca

SEQ ID NO: 212194 - DNA, 25 bp, SARS Virus
aagaactttgagagacttatcacag

SEQ ID NO: 212195 - DNA, 25 bp, SARS Virus
agaactttgagcaacttatcacaga

SEQ ID NO: 212196 - DNA, 25 bp, SARS Virus
gaactttgagcgacttatcacagat

SEQ ID NO: 212197 - DNA, 25 bp, SARS Virus
aactttgagcgaattatcacagata

SEQ ID NO: 212198 - DNA, 25 bp, SARS Virus
actttgagcgacatatcacagatat

SEQ ID NO: 212199 - DNA, 25 bp, SARS Virus
ctttgagcgactaatcacagatatc

SEQ ID NO: 212200 - DNA, 25 bp, SARS Virus
tttgagcgacttatcacagatatca

SEQ ID NO: 212201 - DNA, 25 bp, SARS Virus
ttgagcgacttaacacagatatcag

SEQ ID NO: 212202 - DNA, 25 bp, SARS Virus
tgagcgacttataacagatatcagt

SEQ ID NO: 212203 - DNA, 25 bp, SARS Virus
gagcgacttatcacagatatcagtt

SEQ ID NO: 212204 - DNA, 25 bp, SARS Virus
agcgacttatcaaagatatcagtta

SEQ ID NO: 212205 - DNA, 25 bp, SARS Virus
gcgacttatcacagatatcagttat

SEQ ID NO: 212206 - DNA, 25 bp, SARS Virus
cgacttatcacaaatatcagttatc

SEQ ID NO: 212207 - DNA, 25 bp, SARS Virus
gacttatcacagatatcagttatcg

SEQ ID NO: 212208 - DNA, 25 bp, SARS Virus
acttatcacagaaatcagttatcgg

SEQ ID NO: 212209 - DNA, 25 bp, SARS Virus
cttatcacagatatcagttatcggt

SEQ ID NO: 212210 - DNA, 25 bp, SARS Virus
ttatcacagataacagttatcggtg

SEQ ID NO: 212211 - DNA, 25 bp, SARS Virus
tatcacagatataagttatcggtga

SEQ ID NO: 212212 - DNA, 25 bp, SARS Virus
atcacagatatcagttatcggtgat

SEQ ID NO: 212213 - DNA, 25 bp, SARS Virus
tcacagatatcaattatcggtgatg

SEQ ID NO: 212214 - DNA, 25 bp, SARS Virus
cacagatatcagatatcggtgatgt

SEQ ID NO: 212215 - DNA, 25 bp, SARS Virus
acagatatcagtaatcggtgatgta

SEQ ID NO: 212216 - DNA, 25 bp, SARS Virus
cagatatcagttatcggtgatgtag

SEQ ID NO: 212217 - DNA, 25 bp, SARS Virus
agatatcagttaacggtgatgtagc

SEQ ID NO: 212218 - DNA, 25 bp, SARS Virus
gatatcagttataggtgatgtagcg

SEQ ID NO: 212219 - DNA, 25 bp, SARS Virus
atatcagttatcagtgatgtagcgg

SEQ ID NO: 212220 - DNA, 25 bp, SARS Virus
tatcagttatcgatgatgtagcggt

SEQ ID NO: 212221 - DNA, 25 bp, SARS Virus
atcagttatcggagatgtagcggta

SEQ ID NO: 212222 - DNA, 25 bp, SARS Virus
tcagttatcggtaatgtagcggtaa

SEQ ID NO: 212223 - DNA, 25 bp, SARS Virus
cagttatcggtgatgtagcggtaag

SEQ ID NO: 212224 - DNA, 25 bp, SARS Virus
agttatcggtgaagtagcggtaagt

SEQ ID NO: 212225 - DNA, 25 bp, SARS Virus
gttatcggtgatatagcggtaagtt

SEQ ID NO: 212226 - DNA, 25 bp, SARS Virus
ttatcggtgatgaagcggtaagttc

SEQ ID NO: 212227 - DNA, 25 bp, SARS Virus
tatcggtgatgtagcggtaagttca

SEQ ID NO: 212228 - DNA, 25 bp, SARS Virus
atcggtgatgtaacggtaagttcag

SEQ ID NO: 212229 - DNA, 25 bp, SARS Virus
tcggtgatgtagaggtaagttcaga

SEQ ID NO: 212230 - DNA, 25 bp, SARS Virus
cggtgatgtagcagtaagttcagac

SEQ ID NO: 212231 - DNA, 25 bp, SARS Virus
ggtgatgtagcgataagttcagacc

SEQ ID NO: 212232 - DNA, 25 bp, SARS Virus
gtgatgtagcggaaagttcagaccc

SEQ ID NO: 212233 - DNA, 25 bp, SARS Virus
tgatgtagcggtaagttcagaccct

SEQ ID NO: 212234 - DNA, 25 bp, SARS Virus
gatgtagcggtaagttcagaccctt

SEQ ID NO: 212235 - DNA, 25 bp, SARS Virus
atgtagcggtaaattcagacccttc

SEQ ID NO: 212236 - DNA, 25 bp, SARS Virus
tgtagcggtaagatcagacccttct

SEQ ID NO: 212237 - DNA, 25 bp, SARS Virus
gtagcggtaagtacagacccttctt

SEQ ID NO: 212238 - DNA, 25 bp, SARS Virus
tagcggtaagttaagacccttctta

SEQ ID NO: 212239 - DNA, 25 bp, SARS Virus
agcggtaagttcagacccttcttac

SEQ ID NO: 212240 - DNA, 25 bp, SARS Virus
gcggtaagttcaaacccttcttaca

SEQ ID NO: 212241 - DNA, 25 bp, SARS Virus
cggtaagttcagacccttcttacac

SEQ ID NO: 212242 - DNA, 25 bp, SARS Virus
ggtaagttcagaaccttcttacact

SEQ ID NO: 212243 - DNA, 25 bp, SARS Virus
gtaagttcagacacttcttacactg

SEQ ID NO: 212244 - DNA, 25 bp, SARS Virus
taagttcagaccattcttacactgt

SEQ ID NO: 212245 - DNA, 25 bp, SARS Virus
aagttcagacccatcttacactgtc

SEQ ID NO: 212246 - DNA, 25 bp, SARS Virus
agttcagaccctacttacactgtct

SEQ ID NO: 212247 - DNA, 25 bp, SARS Virus
gttcagacccttattacactgtcta

SEQ ID NO: 212248 - DNA, 25 bp, SARS Virus
ttcagacccttcatacactgtctat

SEQ ID NO: 212249 - DNA, 25 bp, SARS Virus
tcagacccttctaacactgtctatc

SEQ ID NO: 212250 - DNA, 25 bp, SARS Virus
cagacccttcttacactgtctatcg

SEQ ID NO: 212251 - DNA, 25 bp, SARS Virus
agacccttcttaaactgtctatcga

SEQ ID NO: 212252 - DNA, 25 bp, SARS Virus
gacccttcttacactgtctatcgag

SEQ ID NO: 212253 - DNA, 25 bp, SARS Virus
acccttcttacaatgtctatcgaga

SEQ ID NO: 212254 - DNA, 25 bp, SARS Virus
cccttcttacacagtctatcgagag

SEQ ID NO: 212255 - DNA, 25 bp, SARS Virus
ccttcttacactatctatcgagagc

SEQ ID NO: 212256 - DNA, 25 bp, SARS Virus
cttcttacactgactatcgagagca

SEQ ID NO: 212257 - DNA, 25 bp, SARS Virus
ttcttacactgtatatcgagagcac

SEQ ID NO: 212258 - DNA, 25 bp, SARS Virus
tcttacactgtcaatcgagagcact

SEQ ID NO: 212259 - DNA, 25 bp, SARS Virus
cttacactgtctatcgagagcactt

SEQ ID NO: 212260 - DNA, 25 bp, SARS Virus
ttacactgtctaacgagagcacttc

SEQ ID NO: 212261 - DNA, 25 bp, SARS Virus
tacactgtctatagagagcacttcg

SEQ ID NO: 212262 - DNA, 25 bp, SARS Virus
acactgtctatcaagagcacttcga

SEQ ID NO: 212263 - DNA, 25 bp, SARS Virus
cactgtctatcgagagcacttcgac

SEQ ID NO: 212264 - DNA, 25 bp, SARS Virus
actgtctatcgaaagcacttcgacc

SEQ ID NO: 212265 - DNA, 25 bp, SARS Virus
ctgtctatcgagagcacttcgaccg

SEQ ID NO: 212266 - DNA, 25 bp, SARS Virus
tgtctatcgagaacacttcgaccga

SEQ ID NO: 212267 - DNA, 25 bp, SARS Virus
gtctatcgagagaacttcgaccgaa

SEQ ID NO: 212268 - DNA, 25 bp, SARS Virus
tctatcgagagcacttcgaccgaaa

SEQ ID NO: 212269 - DNA, 25 bp, SARS Virus
ctatcgagagcaattcgaccgaaac

SEQ ID NO: 212270 - DNA, 25 bp, SARS Virus
tatcgagagcacatcgaccgaaaca

SEQ ID NO: 212271 - DNA, 25 bp, SARS Virus
atcgagagcactacgaccgaaacac

SEQ ID NO: 212272 - DNA, 25 bp, SARS Virus
tcgagagcacttagaccgaaacact

SEQ ID NO: 212273 - DNA, 25 bp, SARS Virus
cgagagcacttcaaccgaaacactt

SEQ ID NO: 212274 - DNA, 25 bp, SARS Virus
gagagcacttcgaccgaaacacttc

SEQ ID NO: 212275 - DNA, 25 bp, SARS Virus
agagcacttcgaacgaaacacttcg

SEQ ID NO: 212276 - DNA, 25 bp, SARS Virus
gagcacttcgacagaaacacttcgg

SEQ ID NO: 212277 - DNA, 25 bp, SARS Virus
agcacttcgaccaaaacacttcgga

SEQ ID NO: 212278 - DNA, 25 bp, SARS Virus
gcacttcgaccgaaacacttcggac

SEQ ID NO: 212279 - DNA, 25 bp, SARS Virus
cacttcgaccgaaacacttcggaca

SEQ ID NO: 212280 - DNA, 25 bp, SARS Virus
acttcgaccgaaacacttcggacag

SEQ ID NO: 212281 - DNA, 25 bp, SARS Virus
cttcgaccgaaaaacttcggacagt

SEQ ID NO: 212282 - DNA, 25 bp, SARS Virus
ttcgaccgaaacacttcggacagta

SEQ ID NO: 212283 - DNA, 25 bp, SARS Virus
tcgaccgaaacaattcggacagtaa

SEQ ID NO: 212284 - DNA, 25 bp, SARS Virus
cgaccgaaacacatcggacagtaaa

SEQ ID NO: 212285 - DNA, 25 bp, SARS Virus
gaccgaaacactacggacagtaaac

SEQ ID NO: 212286 - DNA, 25 bp, SARS Virus
accgaaacacttaggacagtaaact

SEQ ID NO: 212287 - DNA, 25 bp, SARS Virus
ccgaaacacttcagacagtaaacta

SEQ ID NO: 212288 - DNA, 25 bp, SARS Virus
cgaaacacttcgaacagtaaactaa

SEQ ID NO: 212289 - DNA, 25 bp, SARS Virus
gaaacacttcggacagtaaactaaa

SEQ ID NO: 212290 - DNA, 25 bp, SARS Virus
aaacacttcggaaagtaaactaaat

SEQ ID NO: 212291 - DNA, 25 bp, SARS Virus
aacacttcggacagtaaactaaatt

SEQ ID NO: 212292 - DNA, 25 bp, SARS Virus
acacttcggacaataaactaaattt

SEQ ID NO: 212293 - DNA, 25 bp, SARS Virus
cacttcggacagaaaactaaattta

SEQ ID NO: 212294 - DNA, 25 bp, SARS Virus
acttcggacagtaaactaaatttag

SEQ ID NO: 212295 - DNA, 25 bp, SARS Virus
cttcggacagtaaactaaatttagt

SEQ ID NO: 212296 - DNA, 25 bp, SARS Virus
ttcggacagtaaactaaatttagta

SEQ ID NO: 212297 - DNA, 25 bp, SARS Virus
tcggacagtaaaataaatttagtag

SEQ ID NO: 212298 - DNA, 25 bp, SARS Virus
cggacagtaaacaaaatttagtagt

SEQ ID NO: 212299 - DNA, 25 bp, SARS Virus
ggacagtaaactaaatttagtagtc

SEQ ID NO: 212300 - DNA, 25 bp, SARS Virus
gacagtaaactaaatttagtagtcg

SEQ ID NO: 212301 - DNA, 25 bp, SARS Virus
acagtaaactaaatttagtagtcgt

SEQ ID NO: 212302 - DNA, 25 bp, SARS Virus
cagtaaactaaaattagtagtcgtt

SEQ ID NO: 212303 - DNA, 25 bp, SARS Virus
agtaaactaaatatagtagtcgttt

SEQ ID NO: 212304 - DNA, 25 bp, SARS Virus
gtaaactaaattaagtagtcgttta

SEQ ID NO: 212305 - DNA, 25 bp, SARS Virus
taaactaaatttagtagtcgtttaa

SEQ ID NO: 212306 - DNA, 25 bp, SARS Virus
aaactaaatttaatagtcgtttaaa

SEQ ID NO: 212307 - DNA, 25 bp, SARS Virus
aactaaatttagaagtcgtttaaaa

SEQ ID NO: 212308 - DNA, 25 bp, SARS Virus
actaaatttagtagtcgtttaaaac

SEQ ID NO: 212309 - DNA, 25 bp, SARS Virus
ctaaatttagtaatcgtttaaaaca

SEQ ID NO: 212310 - DNA, 25 bp, SARS Virus
taaatttagtagacgtttaaaacac

SEQ ID NO: 212311 - DNA, 25 bp, SARS Virus
aaatttagtagtagtttaaaacaca

SEQ ID NO: 212312 - DNA, 25 bp, SARS Virus
aatttagtagtcatttaaaacacaa

SEQ ID NO: 212313 - DNA, 25 bp, SARS Virus
gaacacaaaaggcgtattcgtcggt

SEQ ID NO: 212314 - DNA, 25 bp, SARS Virus
aacacaaaaggtctattcgtcggta

SEQ ID NO: 212315 - DNA, 25 bp, SARS Virus
acacaaaaggtgcattcgtcggtat

SEQ ID NO: 212316 - DNA, 25 bp, SARS Virus
cacaaaaggtgtcttcgtcggtatt

SEQ ID NO: 212317 - DNA, 25 bp, SARS Virus
acaaaaggtgtactcgtcggtattc

SEQ ID NO: 212318 - DNA, 25 bp, SARS Virus
caaaaggtgtatccgtcggtattct

SEQ ID NO: 212319 - DNA, 25 bp, SARS Virus
aaaaggtgtattcgtcggtattcta

SEQ ID NO: 212320 - DNA, 25 bp, SARS Virus
aaaggtgtattcctcggtattctag

SEQ ID NO: 212321 - DNA, 25 bp, SARS Virus
aaggtgtattcgccggtattctagg

SEQ ID NO: 212322 - DNA, 25 bp, SARS Virus
aggtgtattcgtcggtattctagga

SEQ ID NO: 212323 - DNA, 25 bp, SARS Virus
ggtgtattcgtccgtattctaggag

SEQ ID NO: 212324 - DNA, 25 bp, SARS Virus
gtgtattcgtcgctattctaggagt

SEQ ID NO: 212325 - DNA, 25 bp, SARS Virus
tgtattcgtcggcattctaggagta

SEQ ID NO: 212326 - DNA, 25 bp, SARS Virus
gtattcgtcggtcttctaggagtac

SEQ ID NO: 212327 - DNA, 25 bp, SARS Virus
tattcgtcggtactctaggagtact

SEQ ID NO: 212328 - DNA, 25 bp, SARS Virus
attcgtcggtatcctaggagtactg

SEQ ID NO: 212329 - DNA, 25 bp, SARS Virus
ttcgtcggtattctaggagtactgg

SEQ ID NO: 212330 - DNA, 25 bp, SARS Virus
tcgtcggtattccaggagtactgga

SEQ ID NO: 212331 - DNA, 25 bp, SARS Virus
cgtcggtattctcggagtactggat

SEQ ID NO: 212332 - DNA, 25 bp, SARS Virus
gtcggtattctacgagtactggatt

SEQ ID NO: 212333 - DNA, 25 bp, SARS Virus
tcggtattctagcagtactggattg

SEQ ID NO: 212334 - DNA, 25 bp, SARS Virus
cggtattctaggcgtactggattga

SEQ ID NO: 212335 - DNA, 25 bp, SARS Virus
ggtattctaggactactggattgag

SEQ ID NO: 212336 - DNA, 25 bp, SARS Virus
gtattctaggagcactggattgaga

SEQ ID NO: 212337 - DNA, 25 bp, SARS Virus
tattctaggagtcctggattgagaa

SEQ ID NO: 212338 - DNA, 25 bp, SARS Virus
attctaggagtactggattgagaac

SEQ ID NO: 212339 - DNA, 25 bp, SARS Virus
ttctaggagtaccggattgagaaca

SEQ ID NO: 212340 - DNA, 25 bp, SARS Virus
tctaggagtactcgattgagaacac

SEQ ID NO: 212341 - DNA, 25 bp, SARS Virus
ctaggagtactgcattgagaacaca

SEQ ID NO: 212342 - DNA, 25 bp, SARS Virus
taggagtactggcttgagaacacaa

SEQ ID NO: 212343 - DNA, 25 bp, SARS Virus
aggagtactggactgagaacacaat

SEQ ID NO: 212344 - DNA, 25 bp, SARS Virus
ggagtactggatcgagaacacaatg

SEQ ID NO: 212345 - DNA, 25 bp, SARS Virus
gagtactggattcagaacacaatga

SEQ ID NO: 212346 - DNA, 25 bp, SARS Virus
agtactggattgcgaacacaatgaa

SEQ ID NO: 212347 - DNA, 25 bp, SARS Virus
gtactggattgacaacacaatgaaa

SEQ ID NO: 212348 - DNA, 25 bp, SARS Virus
tactggattgagcacacaatgaaat

SEQ ID NO: 212349 - DNA, 25 bp, SARS Virus
actggattgagaccacaatgaaatt

SEQ ID NO: 212350 - DNA, 25 bp, SARS Virus
ctggattgagaacacaatgaaattg

SEQ ID NO: 212351 - DNA, 25 bp, SARS Virus
tggattgagaacccaatgaaattgt

SEQ ID NO: 212352 - DNA, 25 bp, SARS Virus
ggattgagaacacaatgaaattgtg

SEQ ID NO: 212353 - DNA, 25 bp, SARS Virus
gattgagaacaccatgaaattgtgg

SEQ ID NO: 212354 - DNA, 25 bp, SARS Virus
attgagaacacactgaaattgtgga

SEQ ID NO: 212355 - DNA, 25 bp, SARS Virus
ttgagaacacaacgaaattgtggaa

SEQ ID NO: 212356 - DNA, 25 bp, SARS Virus
tgagaacacaatcaaattgtggaag

SEQ ID NO: 212357 - DNA, 25 bp, SARS Virus
gagaacacaatgcaattgtggaagt

SEQ ID NO: 212358 - DNA, 25 bp, SARS Virus
agaacacaatgacattgtggaagta

SEQ ID NO: 212359 - DNA, 25 bp, SARS Virus
gaacacaatgaacttgtggaagtag

SEQ ID NO: 212360 - DNA, 25 bp, SARS Virus
aacacaatgaaactgtggaagtaga

SEQ ID NO: 212361 - DNA, 25 bp, SARS Virus
acacaatgaaatcgtggaagtagac

SEQ ID NO: 212362 - DNA, 25 bp, SARS Virus
cacaatgaaattctggaagtagact

SEQ ID NO: 212363 - DNA, 25 bp, SARS Virus
acaatgaaattgcggaagtagacta

SEQ ID NO: 212364 - DNA, 25 bp, SARS Virus
caatgaaattgtcgaagtagactac

SEQ ID NO: 212365 - DNA, 25 bp, SARS Virus
aatgaaattgtgcaagtagactacc

SEQ ID NO: 212366 - DNA, 25 bp, SARS Virus
atgaaattgtggcagtagactacca

SEQ ID NO: 212367 - DNA, 25 bp, SARS Virus
tgaaattgtggacgtagactaccaa

SEQ ID NO: 212368 - DNA, 25 bp, SARS Virus
gaaattgtggaactagactaccaaa

SEQ ID NO: 212369 - DNA, 25 bp, SARS Virus
aaattgtggaagcagactaccaaat

SEQ ID NO: 212370 - DNA, 25 bp, SARS Virus
aattgtggaagtcgactaccaaatt

SEQ ID NO: 212371 - DNA, 25 bp, SARS Virus
attgtggaagtacactaccaaattc

SEQ ID NO: 212372 - DNA, 25 bp, SARS Virus
ttgtggaagtagcctaccaaattca

SEQ ID NO: 212373 - DNA, 25 bp, SARS Virus
tgtggaagtagactaccaaattcat

SEQ ID NO: 212374 - DNA, 25 bp, SARS Virus
gtggaagtagaccaccaaattcata

SEQ ID NO: 212375 - DNA, 25 bp, SARS Virus
tggaagtagactcccaaattcatac

SEQ ID NO: 212376 - DNA, 25 bp, SARS Virus
ggaagtagactaccaaattcatact

SEQ ID NO: 212377 - DNA, 25 bp, SARS Virus
gaagtagactaccaaattcatactg

SEQ ID NO: 212378 - DNA, 25 bp, SARS Virus
aagtagactacccaattcatactgt

SEQ ID NO: 212379 - DNA, 25 bp, SARS Virus
agtagactaccacattcatactgta

SEQ ID NO: 212380 - DNA, 25 bp, SARS Virus
gtagactaccaacttcatactgtaa

SEQ ID NO: 212381 - DNA, 25 bp, SARS Virus
tagactaccaaactcatactgtaac

SEQ ID NO: 212382 - DNA, 25 bp, SARS Virus
agactaccaaatccatactgtaacg

SEQ ID NO: 212383 - DNA, 25 bp, SARS Virus
gactaccaaattcatactgtaacgg

SEQ ID NO: 212384 - DNA, 25 bp, SARS Virus
actaccaaattcctactgtaacgga

SEQ ID NO: 212385 - DNA, 25 bp, SARS Virus
ctaccaaattcacactgtaacggat

SEQ ID NO: 212386 - DNA, 25 bp, SARS Virus
taccaaattcatcctgtaacggatg

SEQ ID NO: 212387 - DNA, 25 bp, SARS Virus
accaaattcatactgtaacggatgt

SEQ ID NO: 212388 - DNA, 25 bp, SARS Virus
ccaaattcataccgtaacggatgtt

SEQ ID NO: 212389 - DNA, 25 bp, SARS Virus
caaattcatactctaacggatgttg

SEQ ID NO: 212390 - DNA, 25 bp, SARS Virus
aaattcatactgcaacggatgttga

SEQ ID NO: 212391 - DNA, 25 bp, SARS Virus
aattcatactgtcacggatgttgaa

SEQ ID NO: 212392 - DNA, 25 bp, SARS Virus
attcatactgtaccggatgttgaag

SEQ ID NO: 212393 - DNA, 25 bp, SARS Virus
ttcatactgtaacggatgttgaagc

SEQ ID NO: 212394 - DNA, 25 bp, SARS Virus
tcatactgtaaccgatgttgaagcc

SEQ ID NO: 212395 - DNA, 25 bp, SARS Virus
catactgtaacgcatgttgaagcca

SEQ ID NO: 212396 - DNA, 25 bp, SARS Virus
atactgtaacggctgttgaagccat

SEQ ID NO: 212397 - DNA, 25 bp, SARS Virus
tactgtaacggacgttgaagccatc

SEQ ID NO: 212398 - DNA, 25 bp, SARS Virus
actgtaacggatcttgaagccatca

SEQ ID NO: 212399 - DNA, 25 bp, SARS Virus
ctgtaacggatgctgaagccatcaa

SEQ ID NO: 212400 - DNA, 25 bp, SARS Virus
tgtaacggatgtcgaagccatcaaa

SEQ ID NO: 212401 - DNA, 25 bp, SARS Virus
gtaacggatgttcaagccatcaaaa

SEQ ID NO: 212402 - DNA, 25 bp, SARS Virus
taacggatgttgcagccatcaaaag

SEQ ID NO: 212403 - DNA, 25 bp, SARS Virus
aacggatgttgacgccatcaaaagt

SEQ ID NO: 212404 - DNA, 25 bp, SARS Virus
acggatgttgaacccatcaaaagtg

SEQ ID NO: 212405 - DNA, 25 bp, SARS Virus
cggatgttgaagccatcaaaagtgc

SEQ ID NO: 212406 - DNA, 25 bp, SARS Virus
ggatgttgaagccatcaaaagtgca

SEQ ID NO: 212407 - DNA, 25 bp, SARS Virus
gatgttgaagccctcaaaagtgcag

SEQ ID NO: 212408 - DNA, 25 bp, SARS Virus
atgttgaagccaccaaaagtgcagt

SEQ ID NO: 212409 - DNA, 25 bp, SARS Virus
tgttgaagccatcaaaagtgcagtg

SEQ ID NO: 212410 - DNA, 25 bp, SARS Virus
gttgaagccatccaaagtgcagtgt

SEQ ID NO: 212411 - DNA, 25 bp, SARS Virus
ttgaagccatcacaagtgcagtgtg

SEQ ID NO: 212412 - DNA, 25 bp, SARS Virus
tgaagccatcaacagtgcagtgtga

SEQ ID NO: 212413 - DNA, 25 bp, SARS Virus
gaagccatcaaacgtgcagtgtgag

SEQ ID NO: 212414 - DNA, 25 bp, SARS Virus
aagccatcaaaactgcagtgtgaga

SEQ ID NO: 212415 - DNA, 25 bp, SARS Virus
agccatcaaaagcgcagtgtgagat

SEQ ID NO: 212416 - DNA, 25 bp, SARS Virus
gccatcaaaagtccagtgtgagata

SEQ ID NO: 212417 - DNA, 25 bp, SARS Virus
ccatcaaaagtgcagtgtgagatac

SEQ ID NO: 212418 - DNA, 25 bp, SARS Virus
catcaaaagtgccgtgtgagatact

SEQ ID NO: 212419 - DNA, 25 bp, SARS Virus
atcaaaagtgcactgtgagatactg

SEQ ID NO: 212420 - DNA, 25 bp, SARS Virus
tcaaaagtgcagcgtgagatactga

SEQ ID NO: 212421 - DNA, 25 bp, SARS Virus
caaaagtgcagtctgagatactgaa

SEQ ID NO: 212422 - DNA, 25 bp, SARS Virus
aaaagtgcagtgcgagatactgaag

SEQ ID NO: 212423 - DNA, 25 bp, SARS Virus
aaagtgcagtgtcagatactgaagg

SEQ ID NO: 212424 - DNA, 25 bp, SARS Virus
aagtgcagtgtgcgatactgaagga

SEQ ID NO: 212425 - DNA, 25 bp, SARS Virus
agtgcagtgtgacatactgaaggaa

SEQ ID NO: 212426 - DNA, 25 bp, SARS Virus
gtgcagtgtgagctactgaaggaag

SEQ ID NO: 212427 - DNA, 25 bp, SARS Virus
tgcagtgtgagacactgaaggaaga

SEQ ID NO: 212428 - DNA, 25 bp, SARS Virus
gcagtgtgagatcctgaaggaagac

SEQ ID NO: 212429 - DNA, 25 bp, SARS Virus
cagtgtgagatactgaaggaagaca

SEQ ID NO: 212430 - DNA, 25 bp, SARS Virus
agtgtgagataccgaaggaagacat

SEQ ID NO: 212431 - DNA, 25 bp, SARS Virus
gtgtgagatactcaaggaagacata

SEQ ID NO: 212432 - DNA, 25 bp, SARS Virus
tgtgagatactgcaggaagacatac

SEQ ID NO: 212433 - DNA, 25 bp, SARS Virus
gtgagatactgacggaagacatacc

SEQ ID NO: 212434 - DNA, 25 bp, SARS Virus
tgagatactgaacgaagacatacca

SEQ ID NO: 212435 - DNA, 25 bp, SARS Virus
gagatactgaagcaagacataccat

SEQ ID NO: 212436 - DNA, 25 bp, SARS Virus
agatactgaaggcagacataccatc

SEQ ID NO: 212437 - DNA, 25 bp, SARS Virus
gatactgaaggacgacataccatcc

SEQ ID NO: 212438 - DNA, 25 bp, SARS Virus
atactgaaggaacacataccatcct

SEQ ID NO: 212439 - DNA, 25 bp, SARS Virus
tactgaaggaagccataccatccta

SEQ ID NO: 212440 - DNA, 25 bp, SARS Virus
actgaaggaagacataccatcctaa

SEQ ID NO: 212441 - DNA, 25 bp, SARS Virus
ctgaaggaagacctaccatcctaaa

SEQ ID NO: 212442 - DNA, 25 bp, SARS Virus
tgaaggaagacacaccatcctaaaa

SEQ ID NO: 212443 - DNA, 25 bp, SARS Virus
gaaggaagacatcccatcctaaaag

SEQ ID NO: 212444 - DNA, 25 bp, SARS Virus
aaggaagacataccatcctaaaagg

SEQ ID NO: 212445 - DNA, 25 bp, SARS Virus
aggaagacataccatcctaaaaggt

SEQ ID NO: 212446 - DNA, 25 bp, SARS Virus
ggaagacataccctcctaaaaggtg

SEQ ID NO: 212447 - DNA, 25 bp, SARS Virus
gaagacataccaccctaaaaggtga

SEQ ID NO: 212448 - DNA, 25 bp, SARS Virus
aagacataccatcctaaaaggtgat

SEQ ID NO: 212449 - DNA, 25 bp, SARS Virus
agacataccatcctaaaaggtgatg

SEQ ID NO: 212450 - DNA, 25 bp, SARS Virus
gacataccatcccaaaaggtgatga

SEQ ID NO: 212451 - DNA, 25 bp, SARS Virus
acataccatcctcaaaggtgatgaa

SEQ ID NO: 212452 - DNA, 25 bp, SARS Virus
cataccatcctacaaggtgatgaag

SEQ ID NO: 212453 - DNA, 25 bp, SARS Virus
ataccatcctaacaggtgatgaaga

SEQ ID NO: 212454 - DNA, 25 bp, SARS Virus
taccatcctaaacggtgatgaagaa

SEQ ID NO: 212455 - DNA, 25 bp, SARS Virus
accatcctaaaacgtgatgaagaag

SEQ ID NO: 212456 - DNA, 25 bp, SARS Virus
ccatcctaaaagctgatgaagaagt

SEQ ID NO: 212457 - DNA, 25 bp, SARS Virus
catcctaaaaggcgatgaagaagtc

SEQ ID NO: 212458 - DNA, 25 bp, SARS Virus
atcctaaaaggtcatgaagaagtct

SEQ ID NO: 212459 - DNA, 25 bp, SARS Virus
tcctaaaaggtgctgaagaagtctc

SEQ ID NO: 212460 - DNA, 25 bp, SARS Virus
cctaaaaggtgacgaagaagtctcc

SEQ ID NO: 212461 - DNA, 25 bp, SARS Virus
ctaaaaggtgatcaagaagtctcca

SEQ ID NO: 212462 - DNA, 25 bp, SARS Virus
taaaaggtgatgcagaagtctccac

SEQ ID NO: 212463 - DNA, 25 bp, SARS Virus
aaaaggtgatgacgaagtctccacc

SEQ ID NO: 212464 - DNA, 25 bp, SARS Virus
aaaggtgatgaacaagtctccaccc

SEQ ID NO: 212465 - DNA, 25 bp, SARS Virus
aaggtgatgaagcagtctccaccca

SEQ ID NO: 212466 - DNA, 25 bp, SARS Virus
aggtgatgaagacgtctccacccaa

SEQ ID NO: 212467 - DNA, 25 bp, SARS Virus
ggtgatgaagaactctccacccaac

SEQ ID NO: 212468 - DNA, 25 bp, SARS Virus
gtgatgaagaagcctccacccaaca

SEQ ID NO: 212469 - DNA, 25 bp, SARS Virus
tgatgaagaagtctccacccaacaa

SEQ ID NO: 212470 - DNA, 25 bp, SARS Virus
gatgaagaagtccccacccaacaac

SEQ ID NO: 212471 - DNA, 25 bp, SARS Virus
atgaagaagtctccacccaacaact

SEQ ID NO: 212472 - DNA, 25 bp, SARS Virus
tgaagaagtctccacccaacaactg

SEQ ID NO: 212473 - DNA, 25 bp, SARS Virus
gaagaagtctccccccaacaactga

SEQ ID NO: 212474 - DNA, 25 bp, SARS Virus
aagaagtctccacccaacaactgaa

SEQ ID NO: 212475 - DNA, 25 bp, SARS Virus
agaagtctccacccaacaactgaaa

SEQ ID NO: 212476 - DNA, 25 bp, SARS Virus
gaagtctccacccaacaactgaaag

SEQ ID NO: 212477 - DNA, 25 bp, SARS Virus
aagtctccaccccacaactgaaagt

SEQ ID NO: 212478 - DNA, 25 bp, SARS Virus
agtctccacccaccaactgaaagtg

SEQ ID NO: 212479 - DNA, 25 bp, SARS Virus
gtctccacccaacaactgaaagtgt

SEQ ID NO: 212480 - DNA, 25 bp, SARS Virus
tctccacccaaccactgaaagtgtt

SEQ ID NO: 212481 - DNA, 25 bp, SARS Virus
ctccacccaacacctgaaagtgttc

SEQ ID NO: 212482 - DNA, 25 bp, SARS Virus
tccacccaacaactgaaagtgttcg

SEQ ID NO: 212483 - DNA, 25 bp, SARS Virus
ccacccaacaaccgaaagtgttcgt

SEQ ID NO: 212484 - DNA, 25 bp, SARS Virus
cacccaacaactcaaagtgttcgtt

SEQ ID NO: 212485 - DNA, 25 bp, SARS Virus
acccaacaactgcaagtgttcgttc

SEQ ID NO: 212486 - DNA, 25 bp, SARS Virus
cccaacaactgacagtgttcgttct

SEQ ID NO: 212487 - DNA, 25 bp, SARS Virus
ccaacaactgaacgtgttcgttcta

SEQ ID NO: 212488 - DNA, 25 bp, SARS Virus
caacaactgaaactgttcgttctaa

SEQ ID NO: 212489 - DNA, 25 bp, SARS Virus
aacaactgaaagcgttcgttctaac

SEQ ID NO: 212490 - DNA, 25 bp, SARS Virus
acaactgaaagtcttcgttctaaca

SEQ ID NO: 212491 - DNA, 25 bp, SARS Virus
caactgaaagtgctcgttctaacag

SEQ ID NO: 212492 - DNA, 25 bp, SARS Virus
aactgaaagtgtccgttctaacagg

SEQ ID NO: 212493 - DNA, 25 bp, SARS Virus
actgaaagtgttcgttctaacaggt

SEQ ID NO: 212494 - DNA, 25 bp, SARS Virus
ctgaaagtgttccttctaacaggta

SEQ ID NO: 212495 - DNA, 25 bp, SARS Virus
tgaaagtgttcgctctaacaggtaa

SEQ ID NO: 212496 - DNA, 25 bp, SARS Virus
gaaagtgttcgtcctaacaggtaag

SEQ ID NO: 212497 - DNA, 25 bp, SARS Virus
aaagtgttcgttctaacaggtaagg

SEQ ID NO: 212498 - DNA, 25 bp, SARS Virus
aagtgttcgttccaacaggtaagga

SEQ ID NO: 212499 - DNA, 25 bp, SARS Virus
agtgttcgttctcacaggtaaggaa

SEQ ID NO: 212500 - DNA, 25 bp, SARS Virus
gtgttcgttctaccaggtaaggaac

SEQ ID NO: 212501 - DNA, 25 bp, SARS Virus
tgttcgttctaacaggtaaggaaca

SEQ ID NO: 212502 - DNA, 25 bp, SARS Virus
gttcgttctaaccggtaaggaacac

SEQ ID NO: 212503 - DNA, 25 bp, SARS Virus
ttcgttctaacacgtaaggaacaca

SEQ ID NO: 212504 - DNA, 25 bp, SARS Virus
tcgttctaacagctaaggaacacac

SEQ ID NO: 212505 - DNA, 25 bp, SARS Virus
cgttctaacaggcaaggaacacaca

SEQ ID NO: 212506 - DNA, 25 bp, SARS Virus
gttctaacaggtcaggaacacacag

SEQ ID NO: 212507 - DNA, 25 bp, SARS Virus
ttctaacaggtacggaacacacaga

SEQ ID NO: 212508 - DNA, 25 bp, SARS Virus
tctaacaggtaacgaacacacagaa

SEQ ID NO: 212509 - DNA, 25 bp, SARS Virus
ctaacaggtaagcaacacacagaag

SEQ ID NO: 212510 - DNA, 25 bp, SARS Virus
taacaggtaaggcacacacagaaga

SEQ ID NO: 212511 - DNA, 25 bp, SARS Virus
aacaggtaaggaccacacagaagat

SEQ ID NO: 212512 - DNA, 25 bp, SARS Virus
acaggtaaggaacacacagaagatg

SEQ ID NO: 212513 - DNA, 25 bp, SARS Virus
caggtaaggaacccacagaagatga

SEQ ID NO: 212514 - DNA, 25 bp, SARS Virus
aggtaaggaacacacagaagatgac

SEQ ID NO: 212515 - DNA, 25 bp, SARS Virus
ggtaaggaacacccagaagatgacg

SEQ ID NO: 212516 - DNA, 25 bp, SARS Virus
gtaaggaacacacagaagatgacgg

SEQ ID NO: 212517 - DNA, 25 bp, SARS Virus
taaggaacacaccgaagatgacggt

SEQ ID NO: 212518 - DNA, 25 bp, SARS Virus
aaggaacacacacaagatgacggtc

SEQ ID NO: 212519 - DNA, 25 bp, SARS Virus
aggaacacacagcagatgacggtct

SEQ ID NO: 212520 - DNA, 25 bp, SARS Virus
ggaacacacagacgatgacggtctt

SEQ ID NO: 212521 - DNA, 25 bp, SARS Virus
gaacacacagaacatgacggtcttg

SEQ ID NO: 212522 - DNA, 25 bp, SARS Virus
aacacacagaagctgacggtcttga

SEQ ID NO: 212523 - DNA, 25 bp, SARS Virus
acacacagaagacgacggtcttgaa

SEQ ID NO: 212524 - DNA, 25 bp, SARS Virus
cacacagaagatcacggtcttgaag

SEQ ID NO: 212525 - DNA, 25 bp, SARS Virus
acacagaagatgccggtcttgaagt

SEQ ID NO: 212526 - DNA, 25 bp, SARS Virus
cacagaagatgacggtcttgaagtt

SEQ ID NO: 212527 - DNA, 25 bp, SARS Virus
acagaagatgaccgtcttgaagttt

SEQ ID NO: 212528 - DNA, 25 bp, SARS Virus
cagaagatgacgctcttgaagttta

SEQ ID NO: 212529 - DNA, 25 bp, SARS Virus
agaagatgacggccttgaagtttac

SEQ ID NO: 212530 - DNA, 25 bp, SARS Virus
gaagatgacggtcttgaagtttact

SEQ ID NO: 212531 - DNA, 25 bp, SARS Virus
aagatgacggtcctgaagtttactt

SEQ ID NO: 212532 - DNA, 25 bp, SARS Virus
agatgacggtctcgaagtttactta

SEQ ID NO: 212533 - DNA, 25 bp, SARS Virus
gatgacggtcttcaagtttacttaa

SEQ ID NO: 212534 - DNA, 25 bp, SARS Virus
atgacggtcttgcagtttacttaaa

SEQ ID NO: 212535 - DNA, 25 bp, SARS Virus
tgacggtcttgacgtttacttaaac

SEQ ID NO: 212536 - DNA, 25 bp, SARS Virus
gacggtcttgaactttacttaaact

SEQ ID NO: 212537 - DNA, 25 bp, SARS Virus
acggtcttgaagcttacttaaactt

SEQ ID NO: 212538 - DNA, 25 bp, SARS Virus
cggtcttgaagtctacttaaacttc

SEQ ID NO: 212539 - DNA, 25 bp, SARS Virus
ggtcttgaagttcacttaaacttca

SEQ ID NO: 212540 - DNA, 25 bp, SARS Virus
gtcttgaagtttccttaaacttcat

SEQ ID NO: 212541 - DNA, 25 bp, SARS Virus
tcttgaagtttacttaaacttcata

SEQ ID NO: 212542 - DNA, 25 bp, SARS Virus
cttgaagtttacctaaacttcatag

SEQ ID NO: 212543 - DNA, 25 bp, SARS Virus
ttgaagtttactcaaacttcataga

SEQ ID NO: 212544 - DNA, 25 bp, SARS Virus
tgaagtttacttcaacttcatagat

SEQ ID NO: 212545 - DNA, 25 bp, SARS Virus
gaagtttacttacacttcatagatg

SEQ ID NO: 212546 - DNA, 25 bp, SARS Virus
aagtttacttaaccttcatagatga

SEQ ID NO: 212547 - DNA, 25 bp, SARS Virus
agtttacttaaacttcatagatgac

SEQ ID NO: 212548 - DNA, 25 bp, SARS Virus
gtttacttaaacctcatagatgacc

SEQ ID NO: 212549 - DNA, 25 bp, SARS Virus
tttacttaaactccatagatgaccg

SEQ ID NO: 212550 - DNA, 25 bp, SARS Virus
ttacttaaacttcatagatgaccga

SEQ ID NO: 212551 - DNA, 25 bp, SARS Virus
tacttaaacttcctagatgaccgaa

SEQ ID NO: 212552 - DNA, 25 bp, SARS Virus
acttaaacttcacagatgaccgaaa

SEQ ID NO: 212553 - DNA, 25 bp, SARS Virus
cttaaacttcatcgatgaccgaaac

SEQ ID NO: 212554 - DNA, 25 bp, SARS Virus
ttaaacttcatacatgaccgaaaca

SEQ ID NO: 212555 - DNA, 25 bp, SARS Virus
taaacttcatagctgaccgaaacat

SEQ ID NO: 212556 - DNA, 25 bp, SARS Virus
aaacttcatagacgaccgaaacatg

SEQ ID NO: 212557 - DNA, 25 bp, SARS Virus
aacttcatagatcaccgaaacatga

SEQ ID NO: 212558 - DNA, 25 bp, SARS Virus
acttcatagatgcccgaaacatgag

SEQ ID NO: 212559 - DNA, 25 bp, SARS Virus
cttcatagatgaccgaaacatgagg

SEQ ID NO: 212560 - DNA, 25 bp, SARS Virus
ttcatagatgaccgaaacatgaggt

SEQ ID NO: 212561 - DNA, 25 bp, SARS Virus
tcatagatgacccaaacatgaggtt

SEQ ID NO: 212562 - DNA, 25 bp, SARS Virus
catagatgaccgcaacatgaggttt

SEQ ID NO: 212563 - DNA, 25 bp, SARS Virus
atagatgaccgacacatgaggtttc

SEQ ID NO: 212564 - DNA, 25 bp, SARS Virus
tagatgaccgaaccatgaggtttct

SEQ ID NO: 212565 - DNA, 25 bp, SARS Virus
agatgaccgaaacatgaggtttctg

SEQ ID NO: 212566 - DNA, 25 bp, SARS Virus
gatgaccgaaacctgaggtttctgt

SEQ ID NO: 212567 - DNA, 25 bp, SARS Virus
atgaccgaaacacgaggtttctgtt

SEQ ID NO: 212568 - DNA, 25 bp, SARS Virus
tgaccgaaacatcaggtttctgttg

SEQ ID NO: 212569 - DNA, 25 bp, SARS Virus
gaccgaaacatgcggtttctgttgc

SEQ ID NO: 212570 - DNA, 25 bp, SARS Virus
accgaaacatgacgtttctgttgca

SEQ ID NO: 212571 - DNA, 25 bp, SARS Virus
ccgaaacatgagctttctgttgcat

SEQ ID NO: 212572 - DNA, 25 bp, SARS Virus
cgaaacatgaggcttctgttgcatt

SEQ ID NO: 212573 - DNA, 25 bp, SARS Virus
gaaacatgaggtctctgttgcattt

SEQ ID NO: 212574 - DNA, 25 bp, SARS Virus
aaacatgaggttcctgttgcatttg

SEQ ID NO: 212575 - DNA, 25 bp, SARS Virus
aacatgaggtttctgttgcatttgt

SEQ ID NO: 212576 - DNA, 25 bp, SARS Virus
acatgaggtttccgttgcatttgtg

SEQ ID NO: 212577 - DNA, 25 bp, SARS Virus
catgaggtttctcttgcatttgtgg

SEQ ID NO: 212578 - DNA, 25 bp, SARS Virus
atgaggtttctgctgcatttgtggt

SEQ ID NO: 212579 - DNA, 25 bp, SARS Virus
tgaggtttctgtcgcatttgtggtt

SEQ ID NO: 212580 - DNA, 25 bp, SARS Virus
gaggtttctgttccatttgtggttc

SEQ ID NO: 212581 - DNA, 25 bp, SARS Virus
aggtttctgttgcatttgtggttca

SEQ ID NO: 212582 - DNA, 25 bp, SARS Virus
ggtttctgttgcctttgtggttcac

SEQ ID NO: 212583 - DNA, 25 bp, SARS Virus
gtttctgttgcacttgtggttcaca

SEQ ID NO: 212584 - DNA, 25 bp, SARS Virus
tttctgttgcatctgtggttcacaa

SEQ ID NO: 212585 - DNA, 25 bp, SARS Virus
ttctgttgcattcgtggttcacaaa

SEQ ID NO: 212586 - DNA, 25 bp, SARS Virus
tctgttgcatttctggttcacaaac

SEQ ID NO: 212587 - DNA, 25 bp, SARS Virus
ctgttgcatttgcggttcacaaacc

SEQ ID NO: 212588 - DNA, 25 bp, SARS Virus
tgttgcatttgtcgttcacaaacca

SEQ ID NO: 212589 - DNA, 25 bp, SARS Virus
gttgcatttgtgcttcacaaaccaa

SEQ ID NO: 212590 - DNA, 25 bp, SARS Virus
ttgcatttgtggctcacaaaccaaa

SEQ ID NO: 212591 - DNA, 25 bp, SARS Virus
tgcatttgtggtccacaaaccaaac

SEQ ID NO: 212592 - DNA, 25 bp, SARS Virus
gcatttgtggttcacaaaccaaact

SEQ ID NO: 212593 - DNA, 25 bp, SARS Virus
catttgtggttcccaaaccaaactt

SEQ ID NO: 212594 - DNA, 25 bp, SARS Virus
atttgtggttcacaaaccaaacttg

SEQ ID NO: 212595 - DNA, 25 bp, SARS Virus
tttgtggttcaccaaccaaacttgc

SEQ ID NO: 212596 - DNA, 25 bp, SARS Virus
ttgtggttcacacaccaaacttgca

SEQ ID NO: 212597 - DNA, 25 bp, SARS Virus
tgtggttcacaacccaaacttgcaa

SEQ ID NO: 212598 - DNA, 25 bp, SARS Virus
gtggttcacaaaccaaacttgcaac

SEQ ID NO: 212599 - DNA, 25 bp, SARS Virus
tggttcacaaaccaaacttgcaaca

SEQ ID NO: 212600 - DNA, 25 bp, SARS Virus
ggttcacaaacccaacttgcaacag

SEQ ID NO: 212601 - DNA, 25 bp, SARS Virus
gttcacaaaccacacttgcaacaga

SEQ ID NO: 212602 - DNA, 25 bp, SARS Virus
ttcacaaaccaaccttgcaacagaa

SEQ ID NO: 212603 - DNA, 25 bp, SARS Virus
tcacaaaccaaacttgcaacagaac

SEQ ID NO: 212604 - DNA, 25 bp, SARS Virus
cacaaaccaaacctgcaacagaacc

SEQ ID NO: 212605 - DNA, 25 bp, SARS Virus
acaaaccaaactcgcaacagaacca

SEQ ID NO: 212606 - DNA, 25 bp, SARS Virus
caaaccaaacttccaacagaaccaa

SEQ ID NO: 212607 - DNA, 25 bp, SARS Virus
aaaccaaacttgcaacagaaccaac

SEQ ID NO: 212608 - DNA, 25 bp, SARS Virus
aaccaaacttgccacagaaccaaca

SEQ ID NO: 212609 - DNA, 25 bp, SARS Virus
accaaacttgcaccagaaccaacat

SEQ ID NO: 212610 - DNA, 25 bp, SARS Virus
ccaaacttgcaacagaaccaacatc

SEQ ID NO: 212611 - DNA, 25 bp, SARS Virus
caaacttgcaaccgaaccaacatcg

SEQ ID NO: 212612 - DNA, 25 bp, SARS Virus
aaacttgcaacacaaccaacatcgg

SEQ ID NO: 212613 - DNA, 25 bp, SARS Virus
aacttgcaacagcaccaacatcgga

SEQ ID NO: 212614 - DNA, 25 bp, SARS Virus
acttgcaacagacccaacatcggac

SEQ ID NO: 212615 - DNA, 25 bp, SARS Virus
cttgcaacagaaccaacatcggacc

SEQ ID NO: 212616 - DNA, 25 bp, SARS Virus
ttgcaacagaaccaacatcggacca

SEQ ID NO: 212617 - DNA, 25 bp, SARS Virus
tgcaacagaacccacatcggaccaa

SEQ ID NO: 212618 - DNA, 25 bp, SARS Virus
gcaacagaaccaccatcggaccaat

SEQ ID NO: 212619 - DNA, 25 bp, SARS Virus
caacagaaccaacatcggaccaatt

SEQ ID NO: 212620 - DNA, 25 bp, SARS Virus
aacagaaccaacctcggaccaatta

SEQ ID NO: 212621 - DNA, 25 bp, SARS Virus
acagaaccaacaccggaccaattac

SEQ ID NO: 212622 - DNA, 25 bp, SARS Virus
cagaaccaacatcggaccaattaca

SEQ ID NO: 212623 - DNA, 25 bp, SARS Virus
agaaccaacatccgaccaattacac

SEQ ID NO: 212624 - DNA, 25 bp, SARS Virus
gaaccaacatcgcaccaattacacg

SEQ ID NO: 212625 - DNA, 25 bp, SARS Virus
aaccaacatcggcccaattacacgg

SEQ ID NO: 212626 - DNA, 25 bp, SARS Virus
accaacatcggaccaattacacggt

SEQ ID NO: 212627 - DNA, 25 bp, SARS Virus
ccaacatcggaccaattacacggtt

SEQ ID NO: 212628 - DNA, 25 bp, SARS Virus
caacatcggacccattacacggttt

SEQ ID NO: 212629 - DNA, 25 bp, SARS Virus
aacatcggaccacttacacggtttg

SEQ ID NO: 212630 - DNA, 25 bp, SARS Virus
acatcggaccaactacacggtttgt

SEQ ID NO: 212631 - DNA, 25 bp, SARS Virus
catcggaccaatcacacggtttgtt

SEQ ID NO: 212632 - DNA, 25 bp, SARS Virus
atcggaccaattccacggtttgtta

SEQ ID NO: 212633 - DNA, 25 bp, SARS Virus
tcggaccaattacacggtttgttaa

SEQ ID NO: 212634 - DNA, 25 bp, SARS Virus
cggaccaattacccggtttgttaac

SEQ ID NO: 212635 - DNA, 25 bp, SARS Virus
ggaccaattacacggtttgttaacc

SEQ ID NO: 212636 - DNA, 25 bp, SARS Virus
gaccaattacaccgtttgttaaccg

SEQ ID NO: 212637 - DNA, 25 bp, SARS Virus
accaattacacgctttgttaaccga

SEQ ID NO: 212638 - DNA, 25 bp, SARS Virus
ccaattacacggcttgttaaccgaa

SEQ ID NO: 212639 - DNA, 25 bp, SARS Virus
caattacacggtctgttaaccgaat

SEQ ID NO: 212640 - DNA, 25 bp, SARS Virus
aattacacggttcgttaaccgaata

SEQ ID NO: 212641 - DNA, 25 bp, SARS Virus
attacacggtttcttaaccgaatac

SEQ ID NO: 212642 - DNA, 25 bp, SARS Virus
ttacacggtttgctaaccgaatacg

SEQ ID NO: 212643 - DNA, 25 bp, SARS Virus
tacacggtttgtcaaccgaatacgt

SEQ ID NO: 212644 - DNA, 25 bp, SARS Virus
acacggtttgttcaccgaatacgtc

SEQ ID NO: 212645 - DNA, 25 bp, SARS Virus
cacggtttgttacccgaatacgtca

SEQ ID NO: 212646 - DNA, 25 bp, SARS Virus
acggtttgttaaccgaatacgtcat

SEQ ID NO: 212647 - DNA, 25 bp, SARS Virus
cggtttgttaaccgaatacgtcatt

SEQ ID NO: 212648 - DNA, 25 bp, SARS Virus
ggtttgttaacccaatacgtcatta

SEQ ID NO: 212649 - DNA, 25 bp, SARS Virus
gtttgttaaccgcatacgtcattaa

SEQ ID NO: 212650 - DNA, 25 bp, SARS Virus
tttgttaaccgactacgtcattaaa

SEQ ID NO: 212651 - DNA, 25 bp, SARS Virus
ttgttaaccgaacacgtcattaaat

SEQ ID NO: 212652 - DNA, 25 bp, SARS Virus
tgttaaccgaatccgtcattaaatc

SEQ ID NO: 212653 - DNA, 25 bp, SARS Virus
gttaaccgaatacgtcattaaatcg

SEQ ID NO: 212654 - DNA, 25 bp, SARS Virus
ttaaccgaatacctcattaaatcgt

SEQ ID NO: 212655 - DNA, 25 bp, SARS Virus
taaccgaatacgccattaaatcgtg

SEQ ID NO: 212656 - DNA, 25 bp, SARS Virus
aaccgaatacgtcattaaatcgtgg

SEQ ID NO: 212657 - DNA, 25 bp, SARS Virus
accgaatacgtccttaaatcgtgga

SEQ ID NO: 212658 - DNA, 25 bp, SARS Virus
ccgaatacgtcactaaatcgtggaa

SEQ ID NO: 212659 - DNA, 25 bp, SARS Virus
cgaatacgtcatcaaatcgtggaaa

SEQ ID NO: 212660 - DNA, 25 bp, SARS Virus
gaatacgtcattcaatcgtggaaag

SEQ ID NO: 212661 - DNA, 25 bp, SARS Virus
aatacgtcattacatcgtggaaaga

SEQ ID NO: 212662 - DNA, 25 bp, SARS Virus
atacgtcattaactcgtggaaagaa

SEQ ID NO: 212663 - DNA, 25 bp, SARS Virus
tacgtcattaaaccgtggaaagaac

SEQ ID NO: 212664 - DNA, 25 bp, SARS Virus
acgtcattaaatcgtggaaagaact

SEQ ID NO: 212665 - DNA, 25 bp, SARS Virus
cgtcattaaatcctggaaagaactt

SEQ ID NO: 212666 - DNA, 25 bp, SARS Virus
gtcattaaatcgcggaaagaacttt

SEQ ID NO: 212667 - DNA, 25 bp, SARS Virus
tcattaaatcgtcgaaagaactttg

SEQ ID NO: 212668 - DNA, 25 bp, SARS Virus
cattaaatcgtgcaaagaactttga

SEQ ID NO: 212669 - DNA, 25 bp, SARS Virus
attaaatcgtggcaagaactttgag

SEQ ID NO: 212670 - DNA, 25 bp, SARS Virus
ttaaatcgtggacagaactttgagc

SEQ ID NO: 212671 - DNA, 25 bp, SARS Virus
taaatcgtggaacgaactttgagcg

SEQ ID NO: 212672 - DNA, 25 bp, SARS Virus
aaatcgtggaaacaactttgagcga

SEQ ID NO: 212673 - DNA, 25 bp, SARS Virus
aatcgtggaaagcactttgagcgac

SEQ ID NO: 212674 - DNA, 25 bp, SARS Virus
atcgtggaaagacctttgagcgact

SEQ ID NO: 212675 - DNA, 25 bp, SARS Virus
tcgtggaaagaactttgagcgactt

SEQ ID NO: 212676 - DNA, 25 bp, SARS Virus
cgtggaaagaaccttgagcgactta

SEQ ID NO: 212677 - DNA, 25 bp, SARS Virus
gtggaaagaactctgagcgacttat

SEQ ID NO: 212678 - DNA, 25 bp, SARS Virus
tggaaagaacttcgagcgacttatc

SEQ ID NO: 212679 - DNA, 25 bp, SARS Virus
ggaaagaactttcagcgacttatca

SEQ ID NO: 212680 - DNA, 25 bp, SARS Virus
gaaagaactttgcgcgacttatcac

SEQ ID NO: 212681 - DNA, 25 bp, SARS Virus
aaagaactttgaccgacttatcaca

SEQ ID NO: 212682 - DNA, 25 bp, SARS Virus
aagaactttgagcgacttatcacag

SEQ ID NO: 212683 - DNA, 25 bp, SARS Virus
agaactttgagccacttatcacaga

SEQ ID NO: 212684 - DNA, 25 bp, SARS Virus
gaactttgagcgccttatcacagat

SEQ ID NO: 212685 - DNA, 25 bp, SARS Virus
aactttgagcgacttatcacagata

SEQ ID NO: 212686 - DNA, 25 bp, SARS Virus
actttgagcgacctatcacagatat

SEQ ID NO: 212687 - DNA, 25 bp, SARS Virus
ctttgagcgactcatcacagatatc

SEQ ID NO: 212688 - DNA, 25 bp, SARS Virus
tttgagcgacttctcacagatatca

SEQ ID NO: 212689 - DNA, 25 bp, SARS Virus
ttgagcgacttaccacagatatcag

SEQ ID NO: 212690 - DNA, 25 bp, SARS Virus
tgagcgacttatcacagatatcagt

SEQ ID NO: 212691 - DNA, 25 bp, SARS Virus
gagcgacttatcccagatatcagtt

SEQ ID NO: 212692 - DNA, 25 bp, SARS Virus
agcgacttatcacagatatcagtta

SEQ ID NO: 212693 - DNA, 25 bp, SARS Virus
gcgacttatcaccgatatcagttat

SEQ ID NO: 212694 - DNA, 25 bp, SARS Virus
cgacttatcacacatatcagttatc

SEQ ID NO: 212695 - DNA, 25 bp, SARS Virus
gacttatcacagctatcagttatcg

SEQ ID NO: 212696 - DNA, 25 bp, SARS Virus
acttatcacagacatcagttatcgg

SEQ ID NO: 212697 - DNA, 25 bp, SARS Virus
cttatcacagatctcagttatcggt

SEQ ID NO: 212698 - DNA, 25 bp, SARS Virus
ttatcacagataccagttatcggtg

SEQ ID NO: 212699 - DNA, 25 bp, SARS Virus
tatcacagatatcagttatcggtga

SEQ ID NO: 212700 - DNA, 25 bp, SARS Virus
atcacagatatccgttatcggtgat

SEQ ID NO: 212701 - DNA, 25 bp, SARS Virus
tcacagatatcacttatcggtgatg

SEQ ID NO: 212702 - DNA, 25 bp, SARS Virus
cacagatatcagctatcggtgatgt

SEQ ID NO: 212703 - DNA, 25 bp, SARS Virus
acagatatcagtcatcggtgatgta

SEQ ID NO: 212704 - DNA, 25 bp, SARS Virus
cagatatcagttctcggtgatgtag

SEQ ID NO: 212705 - DNA, 25 bp, SARS Virus
agatatcagttaccggtgatgtagc

SEQ ID NO: 212706 - DNA, 25 bp, SARS Virus
gatatcagttatcggtgatgtagcg

SEQ ID NO: 212707 - DNA, 25 bp, SARS Virus
atatcagttatccgtgatgtagcgg

SEQ ID NO: 212708 - DNA, 25 bp, SARS Virus
tatcagttatcgctgatgtagcggt

SEQ ID NO: 212709 - DNA, 25 bp, SARS Virus
atcagttatcggcgatgtagcggta

SEQ ID NO: 212710 - DNA, 25 bp, SARS Virus
tcagttatcggtcatgtagcggtaa

SEQ ID NO: 212711 - DNA, 25 bp, SARS Virus
cagttatcggtgctgtagcggtaag

SEQ ID NO: 212712 - DNA, 25 bp, SARS Virus
agttatcggtgacgtagcggtaagt

SEQ ID NO: 212713 - DNA, 25 bp, SARS Virus
gttatcggtgatctagcggtaagtt

SEQ ID NO: 212714 - DNA, 25 bp, SARS Virus
ttatcggtgatgcagcggtaagttc

SEQ ID NO: 212715 - DNA, 25 bp, SARS Virus
tatcggtgatgtcgcggtaagttca

SEQ ID NO: 212716 - DNA, 25 bp, SARS Virus
atcggtgatgtaccggtaagttcag

SEQ ID NO: 212717 - DNA, 25 bp, SARS Virus
tcggtgatgtagcggtaagttcaga

SEQ ID NO: 212718 - DNA, 25 bp, SARS Virus
cggtgatgtagccgtaagttcagac

SEQ ID NO: 212719 - DNA, 25 bp, SARS Virus
ggtgatgtagcgctaagttcagacc

SEQ ID NO: 212720 - DNA, 25 bp, SARS Virus
gtgatgtagcggcaagttcagaccc

SEQ ID NO: 212721 - DNA, 25 bp, SARS Virus
tgatgtagcggtcagttcagaccct

SEQ ID NO: 212722 - DNA, 25 bp, SARS Virus
gatgtagcggtacgttcagaccctt

SEQ ID NO: 212723 - DNA, 25 bp, SARS Virus
atgtagcggtaacttcagacccttc

SEQ ID NO: 212724 - DNA, 25 bp, SARS Virus
tgtagcggtaagctcagacccttct

SEQ ID NO: 212725 - DNA, 25 bp, SARS Virus
gtagcggtaagtccagacccttctt

SEQ ID NO: 212726 - DNA, 25 bp, SARS Virus
tagcggtaagttcagacccttctta

SEQ ID NO: 212727 - DNA, 25 bp, SARS Virus
agcggtaagttccgacccttcttac

SEQ ID NO: 212728 - DNA, 25 bp, SARS Virus
gcggtaagttcacacccttcttaca

SEQ ID NO: 212729 - DNA, 25 bp, SARS Virus
cggtaagttcagccccttcttacac

SEQ ID NO: 212730 - DNA, 25 bp, SARS Virus
ggtaagttcagacccttcttacact

SEQ ID NO: 212731 - DNA, 25 bp, SARS Virus
gtaagttcagacccttcttacactg

SEQ ID NO: 212732 - DNA, 25 bp, SARS Virus
taagttcagacccttcttacactgt

SEQ ID NO: 212733 - DNA, 25 bp, SARS Virus
aagttcagacccctcttacactgtc

SEQ ID NO: 212734 - DNA, 25 bp, SARS Virus
agttcagaccctccttacactgtct

SEQ ID NO: 212735 - DNA, 25 bp, SARS Virus
gttcagacccttcttacactgtcta

SEQ ID NO: 212736 - DNA, 25 bp, SARS Virus
ttcagacccttcctacactgtctat

SEQ ID NO: 212737 - DNA, 25 bp, SARS Virus
tcagacccttctcacactgtctatc

SEQ ID NO: 212738 - DNA, 25 bp, SARS Virus
cagacccttcttccactgtctatcg

SEQ ID NO: 212739 - DNA, 25 bp, SARS Virus
agacccttcttacactgtctatcga

SEQ ID NO: 212740 - DNA, 25 bp, SARS Virus
gacccttcttaccctgtctatcgag

SEQ ID NO: 212741 - DNA, 25 bp, SARS Virus
acccttcttacactgtctatcgaga

SEQ ID NO: 212742 - DNA, 25 bp, SARS Virus
cccttcttacaccgtctatcgagag

SEQ ID NO: 212743 - DNA, 25 bp, SARS Virus
ccttcttacactctctatcgagagc

SEQ ID NO: 212744 - DNA, 25 bp, SARS Virus
cttcttacactgcctatcgagagca

SEQ ID NO: 212745 - DNA, 25 bp, SARS Virus
ttcttacactgtctatcgagagcac

SEQ ID NO: 212746 - DNA, 25 bp, SARS Virus
tcttacactgtccatcgagagcact

SEQ ID NO: 212747 - DNA, 25 bp, SARS Virus
cttacactgtctctcgagagcactt

SEQ ID NO: 212748 - DNA, 25 bp, SARS Virus
ttacactgtctaccgagagcacttc

SEQ ID NO: 212749 - DNA, 25 bp, SARS Virus
tacactgtctatcgagagcacttcg

SEQ ID NO: 212750 - DNA, 25 bp, SARS Virus
acactgtctatccagagcacttcga

SEQ ID NO: 212751 - DNA, 25 bp, SARS Virus
cactgtctatcgcgagcacttcgac

SEQ ID NO: 212752 - DNA, 25 bp, SARS Virus
actgtctatcgacagcacttcgacc

SEQ ID NO: 212753 - DNA, 25 bp, SARS Virus
ctgtctatcgagcgcacttcgaccg

SEQ ID NO: 212754 - DNA, 25 bp, SARS Virus
tgtctatcgagaccacttcgaccga

SEQ ID NO: 212755 - DNA, 25 bp, SARS Virus
gtctatcgagagcacttcgaccgaa

SEQ ID NO: 212756 - DNA, 25 bp, SARS Virus
tctatcgagagcccttcgaccgaaa

SEQ ID NO: 212757 - DNA, 25 bp, SARS Virus
ctatcgagagcacttcgaccgaaac

SEQ ID NO: 212758 - DNA, 25 bp, SARS Virus
tatcgagagcacctcgaccgaaaca

SEQ ID NO: 212759 - DNA, 25 bp, SARS Virus
atcgagagcactccgaccgaaacac

SEQ ID NO: 212760 - DNA, 25 bp, SARS Virus
tcgagagcacttcgaccgaaacact

SEQ ID NO: 212761 - DNA, 25 bp, SARS Virus
cgagagcacttccaccgaaacactt

SEQ ID NO: 212762 - DNA, 25 bp, SARS Virus
gagagcacttcgcccgaaacacttc

SEQ ID NO: 212763 - DNA, 25 bp, SARS Virus
agagcacttcgaccgaaacacttcg

SEQ ID NO: 212764 - DNA, 25 bp, SARS Virus
gagcacttcgaccgaaacacttcgg

SEQ ID NO: 212765 - DNA, 25 bp, SARS Virus
agcacttcgacccaaacacttcgga

SEQ ID NO: 212766 - DNA, 25 bp, SARS Virus
gcacttcgaccgcaacacttcggac

SEQ ID NO: 212767 - DNA, 25 bp, SARS Virus
cacttcgaccgacacacttcggaca

SEQ ID NO: 212768 - DNA, 25 bp, SARS Virus
acttcgaccgaaccacttcggacag

SEQ ID NO: 212769 - DNA, 25 bp, SARS Virus
cttcgaccgaaacacttcggacagt

SEQ ID NO: 212770 - DNA, 25 bp, SARS Virus
ttcgaccgaaacccttcggacagta

SEQ ID NO: 212771 - DNA, 25 bp, SARS Virus
tcgaccgaaacacttcggacagtaa

SEQ ID NO: 212772 - DNA, 25 bp, SARS Virus
cgaccgaaacacctcggacagtaaa

SEQ ID NO: 212773 - DNA, 25 bp, SARS Virus
gaccgaaacactccggacagtaaac

SEQ ID NO: 212774 - DNA, 25 bp, SARS Virus
accgaaacacttcggacagtaaact

SEQ ID NO: 212775 - DNA, 25 bp, SARS Virus
ccgaaacacttccgacagtaaacta

SEQ ID NO: 212776 - DNA, 25 bp, SARS Virus
cgaaacacttcgcacagtaaactaa

SEQ ID NO: 212777 - DNA, 25 bp, SARS Virus
gaaacacttcggccagtaaactaaa

SEQ ID NO: 212778 - DNA, 25 bp, SARS Virus
aaacacttcggacagtaaactaaat

SEQ ID NO: 212779 - DNA, 25 bp, SARS Virus
aacacttcggaccgtaaactaaatt

SEQ ID NO: 212780 - DNA, 25 bp, SARS Virus
acacttcggacactaaactaaattt

SEQ ID NO: 212781 - DNA, 25 bp, SARS Virus
cacttcggacagcaaactaaattta

SEQ ID NO: 212782 - DNA, 25 bp, SARS Virus
acttcggacagtcaactaaatttag

SEQ ID NO: 212783 - DNA, 25 bp, SARS Virus
cttcggacagtacactaaatttagt

SEQ ID NO: 212784 - DNA, 25 bp, SARS Virus
ttcggacagtaacctaaatttagta

SEQ ID NO: 212785 - DNA, 25 bp, SARS Virus
tcggacagtaaactaaatttagtag

SEQ ID NO: 212786 - DNA, 25 bp, SARS Virus
cggacagtaaaccaaatttagtagt

SEQ ID NO: 212787 - DNA, 25 bp, SARS Virus
ggacagtaaactcaatttagtagtc

SEQ ID NO: 212788 - DNA, 25 bp, SARS Virus
gacagtaaactacatttagtagtcg

SEQ ID NO: 212789 - DNA, 25 bp, SARS Virus
acagtaaactaactttagtagtcgt

SEQ ID NO: 212790 - DNA, 25 bp, SARS Virus
cagtaaactaaacttagtagtcgtt

SEQ ID NO: 212791 - DNA, 25 bp, SARS Virus
agtaaactaaatctagtagtcgttt

SEQ ID NO: 212792 - DNA, 25 bp, SARS Virus
gtaaactaaattcagtagtcgttta

SEQ ID NO: 212793 - DNA, 25 bp, SARS Virus
taaactaaatttcgtagtcgtttaa

SEQ ID NO: 212794 - DNA, 25 bp, SARS Virus
aaactaaatttactagtcgtttaaa

SEQ ID NO: 212795 - DNA, 25 bp, SARS Virus
aactaaatttagcagtcgtttaaaa

SEQ ID NO: 212796 - DNA, 25 bp, SARS Virus
actaaatttagtcgtcgtttaaaac

SEQ ID NO: 212797 - DNA, 25 bp, SARS Virus
ctaaatttagtactcgtttaaaaca

SEQ ID NO: 212798 - DNA, 25 bp, SARS Virus
taaatttagtagccgtttaaaacac

SEQ ID NO: 212799 - DNA, 25 bp, SARS Virus
aaatttagtagtcgtttaaaacaca

SEQ ID NO: 212800 - DNA, 25 bp, SARS Virus
aatttagtagtcctttaaaacacaa

SEQ ID NO: 212801 - DNA, 25 bp, SARS Virus
gaacacaaaaggggtattcgtcggt

SEQ ID NO: 212802 - DNA, 25 bp, SARS Virus
aacacaaaaggtgtattcgtcggta

SEQ ID NO: 212803 - DNA, 25 bp, SARS Virus
acacaaaaggtggattcgtcggtat

SEQ ID NO: 212804 - DNA, 25 bp, SARS Virus
cacaaaaggtgtgttcgtcggtatt

SEQ ID NO: 212805 - DNA, 25 bp, SARS Virus
acaaaaggtgtagtcgtcggtattc

SEQ ID NO: 212806 - DNA, 25 bp, SARS Virus
caaaaggtgtatgcgtcggtattct

SEQ ID NO: 212807 - DNA, 25 bp, SARS Virus
aaaaggtgtattggtcggtattcta

SEQ ID NO: 212808 - DNA, 25 bp, SARS Virus
aaaggtgtattcgtcggtattctag

SEQ ID NO: 212809 - DNA, 25 bp, SARS Virus
aaggtgtattcggcggtattctagg

SEQ ID NO: 212810 - DNA, 25 bp, SARS Virus
aggtgtattcgtgggtattctagga

SEQ ID NO: 212811 - DNA, 25 bp, SARS Virus
ggtgtattcgtcggtattctaggag

SEQ ID NO: 212812 - DNA, 25 bp, SARS Virus
gtgtattcgtcggtattctaggagt

SEQ ID NO: 212813 - DNA, 25 bp, SARS Virus
tgtattcgtcgggattctaggagta

SEQ ID NO: 212814 - DNA, 25 bp, SARS Virus
gtattcgtcggtgttctaggagtac

SEQ ID NO: 212815 - DNA, 25 bp, SARS Virus
tattcgtcggtagtctaggagtact

SEQ ID NO: 212816 - DNA, 25 bp, SARS Virus
attcgtcggtatgctaggagtactg

SEQ ID NO: 212817 - DNA, 25 bp, SARS Virus
ttcgtcggtattgtaggagtactgg

SEQ ID NO: 212818 - DNA, 25 bp, SARS Virus
tcgtcggtattcgaggagtactgga

SEQ ID NO: 212819 - DNA, 25 bp, SARS Virus
cgtcggtattctgggagtactggat

SEQ ID NO: 212820 - DNA, 25 bp, SARS Virus
gtcggtattctaggagtactggatt

SEQ ID NO: 212821 - DNA, 25 bp, SARS Virus
tcggtattctaggagtactggattg

SEQ ID NO: 212822 - DNA, 25 bp, SARS Virus
cggtattctaggggtactggattga

SEQ ID NO: 212823 - DNA, 25 bp, SARS Virus
ggtattctaggagtactggattgag

SEQ ID NO: 212824 - DNA, 25 bp, SARS Virus
gtattctaggaggactggattgaga

SEQ ID NO: 212825 - DNA, 25 bp, SARS Virus
tattctaggagtgctggattgagaa

SEQ ID NO: 212826 - DNA, 25 bp, SARS Virus
attctaggagtagtggattgagaac

SEQ ID NO: 212827 - DNA, 25 bp, SARS Virus
ttctaggagtacgggattgagaaca

SEQ ID NO: 212828 - DNA, 25 bp, SARS Virus
tctaggagtactggattgagaacac

SEQ ID NO: 212829 - DNA, 25 bp, SARS Virus
ctaggagtactggattgagaacaca

SEQ ID NO: 212830 - DNA, 25 bp, SARS Virus
taggagtactgggttgagaacacaa

SEQ ID NO: 212831 - DNA, 25 bp, SARS Virus
aggagtactggagtgagaacacaat

SEQ ID NO: 212832 - DNA, 25 bp, SARS Virus
ggagtactggatggagaacacaatg

SEQ ID NO: 212833 - DNA, 25 bp, SARS Virus
gagtactggattgagaacacaatga

SEQ ID NO: 212834 - DNA, 25 bp, SARS Virus
agtactggattgggaacacaatgaa

SEQ ID NO: 212835 - DNA, 25 bp, SARS Virus
gtactggattgagaacacaatgaaa

SEQ ID NO: 212836 - DNA, 25 bp, SARS Virus
tactggattgaggacacaatgaaat

SEQ ID NO: 212837 - DNA, 25 bp, SARS Virus
actggattgagagcacaatgaaatt

SEQ ID NO: 212838 - DNA, 25 bp, SARS Virus
ctggattgagaagacaatgaaattg

SEQ ID NO: 212839 - DNA, 25 bp, SARS Virus
tggattgagaacgcaatgaaattgt

SEQ ID NO: 212840 - DNA, 25 bp, SARS Virus
ggattgagaacagaatgaaattgtg

SEQ ID NO: 212841 - DNA, 25 bp, SARS Virus
gattgagaacacgatgaaattgtgg

SEQ ID NO: 212842 - DNA, 25 bp, SARS Virus
attgagaacacagtgaaattgtgga

SEQ ID NO: 212843 - DNA, 25 bp, SARS Virus
ttgagaacacaaggaaattgtggaa

SEQ ID NO: 212844 - DNA, 25 bp, SARS Virus
tgagaacacaatgaaattgtggaag

SEQ ID NO: 212845 - DNA, 25 bp, SARS Virus
gagaacacaatggaattgtggaagt

SEQ ID NO: 212846 - DNA, 25 bp, SARS Virus
agaacacaatgagattgtggaagta

SEQ ID NO: 212847 - DNA, 25 bp, SARS Virus
gaacacaatgaagttgtggaagtag

SEQ ID NO: 212848 - DNA, 25 bp, SARS Virus
aacacaatgaaagtgtggaagtaga

SEQ ID NO: 212849 - DNA, 25 bp, SARS Virus
acacaatgaaatggtggaagtagac

SEQ ID NO: 212850 - DNA, 25 bp, SARS Virus
cacaatgaaattgtggaagtagact

SEQ ID NO: 212851 - DNA, 25 bp, SARS Virus
acaatgaaattggggaagtagacta

SEQ ID NO: 212852 - DNA, 25 bp, SARS Virus
caatgaaattgtggaagtagactac

SEQ ID NO: 212853 - DNA, 25 bp, SARS Virus
aatgaaattgtggaagtagactacc

SEQ ID NO: 212854 - DNA, 25 bp, SARS Virus
atgaaattgtgggagtagactacca

SEQ ID NO: 212855 - DNA, 25 bp, SARS Virus
tgaaattgtggaggtagactaccaa

SEQ ID NO: 212856 - DNA, 25 bp, SARS Virus
gaaattgtggaagtagactaccaaa

SEQ ID NO: 212857 - DNA, 25 bp, SARS Virus
aaattgtggaaggagactaccaaat

SEQ ID NO: 212858 - DNA, 25 bp, SARS Virus
aattgtggaagtggactaccaaatt

SEQ ID NO: 212859 - DNA, 25 bp, SARS Virus
attgtggaagtagactaccaaattc

SEQ ID NO: 212860 - DNA, 25 bp, SARS Virus
ttgtggaagtaggctaccaaattca

SEQ ID NO: 212861 - DNA, 25 bp, SARS Virus
tgtggaagtagagtaccaaattcat

SEQ ID NO: 212862 - DNA, 25 bp, SARS Virus
gtggaagtagacgaccaaattcata

SEQ ID NO: 212863 - DNA, 25 bp, SARS Virus
tggaagtagactgccaaattcatac

SEQ ID NO: 212864 - DNA, 25 bp, SARS Virus
ggaagtagactagcaaattcatact

SEQ ID NO: 212865 - DNA, 25 bp, SARS Virus
gaagtagactacgaaattcatactg

SEQ ID NO: 212866 - DNA, 25 bp, SARS Virus
aagtagactaccgaattcatactgt

SEQ ID NO: 212867 - DNA, 25 bp, SARS Virus
agtagactaccagattcatactgta

SEQ ID NO: 212868 - DNA, 25 bp, SARS Virus
gtagactaccaagttcatactgtaa

SEQ ID NO: 212869 - DNA, 25 bp, SARS Virus
tagactaccaaagtcatactgtaac

SEQ ID NO: 212870 - DNA, 25 bp, SARS Virus
agactaccaaatgcatactgtaacg

SEQ ID NO: 212871 - DNA, 25 bp, SARS Virus
gactaccaaattgatactgtaacgg

SEQ ID NO: 212872 - DNA, 25 bp, SARS Virus
actaccaaattcgtactgtaacgga

SEQ ID NO: 212873 - DNA, 25 bp, SARS Virus
ctaccaaattcagactgtaacggat

SEQ ID NO: 212874 - DNA, 25 bp, SARS Virus
taccaaattcatgctgtaacggatg

SEQ ID NO: 212875 - DNA, 25 bp, SARS Virus
accaaattcatagtgtaacggatgt

SEQ ID NO: 212876 - DNA, 25 bp, SARS Virus
ccaaattcatacggtaacggatgtt

SEQ ID NO: 212877 - DNA, 25 bp, SARS Virus
caaattcatactgtaacggatgttg

SEQ ID NO: 212878 - DNA, 25 bp, SARS Virus
aaattcatactggaacggatgttga

SEQ ID NO: 212879 - DNA, 25 bp, SARS Virus
aattcatactgtgacggatgttgaa

SEQ ID NO: 212880 - DNA, 25 bp, SARS Virus
attcatactgtagcggatgttgaag

SEQ ID NO: 212881 - DNA, 25 bp, SARS Virus
ttcatactgtaagggatgttgaagc

SEQ ID NO: 212882 - DNA, 25 bp, SARS Virus
tcatactgtaacggatgttgaagcc

SEQ ID NO: 212883 - DNA, 25 bp, SARS Virus
catactgtaacggatgttgaagcca

SEQ ID NO: 212884 - DNA, 25 bp, SARS Virus
atactgtaacgggtgttgaagccat

SEQ ID NO: 212885 - DNA, 25 bp, SARS Virus
tactgtaacggaggttgaagccatc

SEQ ID NO: 212886 - DNA, 25 bp, SARS Virus
actgtaacggatgttgaagccatca

SEQ ID NO: 212887 - DNA, 25 bp, SARS Virus
ctgtaacggatggtgaagccatcaa

SEQ ID NO: 212888 - DNA, 25 bp, SARS Virus
tgtaacggatgtggaagccatcaaa

SEQ ID NO: 212889 - DNA, 25 bp, SARS Virus
gtaacggatgttgaagccatcaaaa

SEQ ID NO: 212890 - DNA, 25 bp, SARS Virus
taacggatgttggagccatcaaaag

SEQ ID NO: 212891 - DNA, 25 bp, SARS Virus
aacggatgttgaggccatcaaaagt

SEQ ID NO: 212892 - DNA, 25 bp, SARS Virus
acggatgttgaagccatcaaaagtg

SEQ ID NO: 212893 - DNA, 25 bp, SARS Virus
cggatgttgaaggcatcaaaagtgc

SEQ ID NO: 212894 - DNA, 25 bp, SARS Virus
ggatgttgaagcgatcaaaagtgca

SEQ ID NO: 212895 - DNA, 25 bp, SARS Virus
gatgttgaagccgtcaaaagtgcag

SEQ ID NO: 212896 - DNA, 25 bp, SARS Virus
atgttgaagccagcaaaagtgcagt

SEQ ID NO: 212897 - DNA, 25 bp, SARS Virus
tgttgaagccatgaaaagtgcagtg

SEQ ID NO: 212898 - DNA, 25 bp, SARS Virus
gttgaagccatcgaaagtgcagtgt

SEQ ID NO: 212899 - DNA, 25 bp, SARS Virus
ttgaagccatcagaagtgcagtgtg

SEQ ID NO: 212900 - DNA, 25 bp, SARS Virus
tgaagccatcaagagtgcagtgtga

SEQ ID NO: 212901 - DNA, 25 bp, SARS Virus
gaagccatcaaaggtgcagtgtgag

SEQ ID NO: 212902 - DNA, 25 bp, SARS Virus
aagccatcaaaagtgcagtgtgaga

SEQ ID NO: 212903 - DNA, 25 bp, SARS Virus
agccatcaaaagggcagtgtgagat

SEQ ID NO: 212904 - DNA, 25 bp, SARS Virus
gccatcaaaagtgcagtgtgagata

SEQ ID NO: 212905 - DNA, 25 bp, SARS Virus
ccatcaaaagtggagtgtgagatac

SEQ ID NO: 212906 - DNA, 25 bp, SARS Virus
catcaaaagtgcggtgtgagatact

SEQ ID NO: 212907 - DNA, 25 bp, SARS Virus
atcaaaagtgcagtgtgagatactg

SEQ ID NO: 212908 - DNA, 25 bp, SARS Virus
tcaaaagtgcagggtgagatactga

SEQ ID NO: 212909 - DNA, 25 bp, SARS Virus
caaaagtgcagtgtgagatactgaa

SEQ ID NO: 212910 - DNA, 25 bp, SARS Virus
aaaagtgcagtgggagatactgaag

SEQ ID NO: 212911 - DNA, 25 bp, SARS Virus
aaagtgcagtgtgagatactgaagg

SEQ ID NO: 212912 - DNA, 25 bp, SARS Virus
aagtgcagtgtgggatactgaagga

SEQ ID NO: 212913 - DNA, 25 bp, SARS Virus
agtgcagtgtgagatactgaaggaa

SEQ ID NO: 212914 - DNA, 25 bp, SARS Virus
gtgcagtgtgaggtactgaaggaag

SEQ ID NO: 212915 - DNA, 25 bp, SARS Virus
tgcagtgtgagagactgaaggaaga

SEQ ID NO: 212916 - DNA, 25 bp, SARS Virus
gcagtgtgagatgctgaaggaagac

SEQ ID NO: 212917 - DNA, 25 bp, SARS Virus
cagtgtgagatagtgaaggaagaca

SEQ ID NO: 212918 - DNA, 25 bp, SARS Virus
agtgtgagatacggaaggaagacat

SEQ ID NO: 212919 - DNA, 25 bp, SARS Virus
gtgtgagatactgaaggaagacata

SEQ ID NO: 212920 - DNA, 25 bp, SARS Virus
tgtgagatactggaggaagacatac

SEQ ID NO: 212921 - DNA, 25 bp, SARS Virus
gtgagatactgagggaagacatacc

SEQ ID NO: 212922 - DNA, 25 bp, SARS Virus
tgagatactgaaggaagacatacca

SEQ ID NO: 212923 - DNA, 25 bp, SARS Virus
gagatactgaaggaagacataccat

SEQ ID NO: 212924 - DNA, 25 bp, SARS Virus
agatactgaagggagacataccatc

SEQ ID NO: 212925 - DNA, 25 bp, SARS Virus
gatactgaaggaggacataccatcc

SEQ ID NO: 212926 - DNA, 25 bp, SARS Virus
atactgaaggaagacataccatcct

SEQ ID NO: 212927 - DNA, 25 bp, SARS Virus
tactgaaggaaggcataccatccta

SEQ ID NO: 212928 - DNA, 25 bp, SARS Virus
actgaaggaagagataccatcctaa

SEQ ID NO: 212929 - DNA, 25 bp, SARS Virus
ctgaaggaagacgtaccatcctaaa

SEQ ID NO: 212930 - DNA, 25 bp, SARS Virus
tgaaggaagacagaccatcctaaaa

SEQ ID NO: 212931 - DNA, 25 bp, SARS Virus
gaaggaagacatgccatcctaaaag

SEQ ID NO: 212932 - DNA, 25 bp, SARS Virus
aaggaagacatagcatcctaaaagg

SEQ ID NO: 212933 - DNA, 25 bp, SARS Virus
aggaagacatacgatcctaaaaggt

SEQ ID NO: 212934 - DNA, 25 bp, SARS Virus
ggaagacataccgtcctaaaaggtg

SEQ ID NO: 212935 - DNA, 25 bp, SARS Virus
gaagacataccagcctaaaaggtga

SEQ ID NO: 212936 - DNA, 25 bp, SARS Virus
aagacataccatgctaaaaggtgat

SEQ ID NO: 212937 - DNA, 25 bp, SARS Virus
agacataccatcgtaaaaggtgatg

SEQ ID NO: 212938 - DNA, 25 bp, SARS Virus
gacataccatccgaaaaggtgatga

SEQ ID NO: 212939 - DNA, 25 bp, SARS Virus
acataccatcctgaaaggtgatgaa

SEQ ID NO: 212940 - DNA, 25 bp, SARS Virus
cataccatcctagaaggtgatgaag

SEQ ID NO: 212941 - DNA, 25 bp, SARS Virus
ataccatcctaagaggtgatgaaga

SEQ ID NO: 212942 - DNA, 25 bp, SARS Virus
taccatcctaaagggtgatgaagaa

SEQ ID NO: 212943 - DNA, 25 bp, SARS Virus
accatcctaaaaggtgatgaagaag

SEQ ID NO: 212944 - DNA, 25 bp, SARS Virus
ccatcctaaaaggtgatgaagaagt

SEQ ID NO: 212945 - DNA, 25 bp, SARS Virus
catcctaaaaggggatgaagaagtc

SEQ ID NO: 212946 - DNA, 25 bp, SARS Virus
atcctaaaaggtgatgaagaagtct

SEQ ID NO: 212947 - DNA, 25 bp, SARS Virus
tcctaaaaggtggtgaagaagtctc

SEQ ID NO: 212948 - DNA, 25 bp, SARS Virus
cctaaaaggtgaggaagaagtctcc

SEQ ID NO: 212949 - DNA, 25 bp, SARS Virus
ctaaaaggtgatgaagaagtctcca

SEQ ID NO: 212950 - DNA, 25 bp, SARS Virus
taaaaggtgatggagaagtctccac

SEQ ID NO: 212951 - DNA, 25 bp, SARS Virus
aaaaggtgatgaggaagtctccacc

SEQ ID NO: 212952 - DNA, 25 bp, SARS Virus
aaaggtgatgaagaagtctccaccc

SEQ ID NO: 212953 - DNA, 25 bp, SARS Virus
aaggtgatgaaggagtctccaccca

SEQ ID NO: 212954 - DNA, 25 bp, SARS Virus
aggtgatgaagaggtctccacccaa

SEQ ID NO: 212955 - DNA, 25 bp, SARS Virus
ggtgatgaagaagtctccacccaac

SEQ ID NO: 212956 - DNA, 25 bp, SARS Virus
gtgatgaagaaggctccacccaaca

SEQ ID NO: 212957 - DNA, 25 bp, SARS Virus
tgatgaagaagtgtccacccaacaa

SEQ ID NO: 212958 - DNA, 25 bp, SARS Virus
gatgaagaagtcgccacccaacaac

SEQ ID NO: 212959 - DNA, 25 bp, SARS Virus
atgaagaagtctgcacccaacaact

SEQ ID NO: 212960 - DNA, 25 bp, SARS Virus
tgaagaagtctcgacccaacaactg

SEQ ID NO: 212961 - DNA, 25 bp, SARS Virus
gaagaagtctccgcccaacaactga

SEQ ID NO: 212962 - DNA, 25 bp, SARS Virus
aagaagtctccagccaacaactgaa

SEQ ID NO: 212963 - DNA, 25 bp, SARS Virus
agaagtctccacgcaacaactgaaa

SEQ ID NO: 212964 - DNA, 25 bp, SARS Virus
gaagtctccaccgaacaactgaaag

SEQ ID NO: 212965 - DNA, 25 bp, SARS Virus
aagtctccacccgacaactgaaagt

SEQ ID NO: 212966 - DNA, 25 bp, SARS Virus
agtctccacccagcaactgaaagtg

SEQ ID NO: 212967 - DNA, 25 bp, SARS Virus
gtctccacccaagaactgaaagtgt

SEQ ID NO: 212968 - DNA, 25 bp, SARS Virus
tctccacccaacgactgaaagtgtt

SEQ ID NO: 212969 - DNA, 25 bp, SARS Virus
ctccacccaacagctgaaagtgttc

SEQ ID NO: 212970 - DNA, 25 bp, SARS Virus
tccacccaacaagtgaaagtgttcg

SEQ ID NO: 212971 - DNA, 25 bp, SARS Virus
ccacccaacaacggaaagtgttcgt

SEQ ID NO: 212972 - DNA, 25 bp, SARS Virus
cacccaacaactgaaagtgttcgtt

SEQ ID NO: 212973 - DNA, 25 bp, SARS Virus
acccaacaactggaagtgttcgttc

SEQ ID NO: 212974 - DNA, 25 bp, SARS Virus
cccaacaactgagagtgttcgttct

SEQ ID NO: 212975 - DNA, 25 bp, SARS Virus
ccaacaactgaaggtgttcgttcta

SEQ ID NO: 212976 - DNA, 25 bp, SARS Virus
caacaactgaaagtgttcgttctaa

SEQ ID NO: 212977 - DNA, 25 bp, SARS Virus
aacaactgaaagggttcgttctaac

SEQ ID NO: 212978 - DNA, 25 bp, SARS Virus
acaactgaaagtgttcgttctaaca

SEQ ID NO: 212979 - DNA, 25 bp, SARS Virus
caactgaaagtggtcgttctaacag

SEQ ID NO: 212980 - DNA, 25 bp, SARS Virus
aactgaaagtgtgcgttctaacagg

SEQ ID NO: 212981 - DNA, 25 bp, SARS Virus
actgaaagtgttggttctaacaggt

SEQ ID NO: 212982 - DNA, 25 bp, SARS Virus
ctgaaagtgttcgttctaacaggta

SEQ ID NO: 212983 - DNA, 25 bp, SARS Virus
tgaaagtgttcggtctaacaggtaa

SEQ ID NO: 212984 - DNA, 25 bp, SARS Virus
gaaagtgttcgtgctaacaggtaag

SEQ ID NO: 212985 - DNA, 25 bp, SARS Virus
aaagtgttcgttgtaacaggtaagg

SEQ ID NO: 212986 - DNA, 25 bp, SARS Virus
aagtgttcgttcgaacaggtaagga

SEQ ID NO: 212987 - DNA, 25 bp, SARS Virus
agtgttcgttctgacaggtaaggaa

SEQ ID NO: 212988 - DNA, 25 bp, SARS Virus
gtgttcgttctagcaggtaaggaac

SEQ ID NO: 212989 - DNA, 25 bp, SARS Virus
tgttcgttctaagaggtaaggaaca

SEQ ID NO: 212990 - DNA, 25 bp, SARS Virus
gttcgttctaacgggtaaggaacac

SEQ ID NO: 212991 - DNA, 25 bp, SARS Virus
ttcgttctaacaggtaaggaacaca

SEQ ID NO: 212992 - DNA, 25 bp, SARS Virus
tcgttctaacaggtaaggaacacac

SEQ ID NO: 212993 - DNA, 25 bp, SARS Virus
cgttctaacagggaaggaacacaca

SEQ ID NO: 212994 - DNA, 25 bp, SARS Virus
gttctaacaggtgaggaacacacag

SEQ ID NO: 212995 - DNA, 25 bp, SARS Virus
ttctaacaggtagggaacacacaga

SEQ ID NO: 212996 - DNA, 25 bp, SARS Virus
tctaacaggtaaggaacacacagaa

SEQ ID NO: 212997 - DNA, 25 bp, SARS Virus
ctaacaggtaaggaacacacagaag

SEQ ID NO: 212998 - DNA, 25 bp, SARS Virus
taacaggtaagggacacacagaaga

SEQ ID NO: 212999 - DNA, 25 bp, SARS Virus
aacaggtaaggagcacacagaagat

SEQ ID NO: 213000 - DNA, 25 bp, SARS Virus
acaggtaaggaagacacagaagatg

SEQ ID NO: 213001 - DNA, 25 bp, SARS Virus
caggtaaggaacgcacagaagatga

SEQ ID NO: 213002 - DNA, 25 bp, SARS Virus
aggtaaggaacagacagaagatgac

SEQ ID NO: 213003 - DNA, 25 bp, SARS Virus
ggtaaggaacacgcagaagatgacg

SEQ ID NO: 213004 - DNA, 25 bp, SARS Virus
gtaaggaacacagagaagatgacgg

SEQ ID NO: 213005 - DNA, 25 bp, SARS Virus
taaggaacacacggaagatgacggt

SEQ ID NO: 213006 - DNA, 25 bp, SARS Virus
aaggaacacacagaagatgacggtc

SEQ ID NO: 213007 - DNA, 25 bp, SARS Virus
aggaacacacaggagatgacggtct

SEQ ID NO: 213008 - DNA, 25 bp, SARS Virus
ggaacacacagaggatgacggtctt

SEQ ID NO: 213009 - DNA, 25 bp, SARS Virus
gaacacacagaagatgacggtcttg

SEQ ID NO: 213010 - DNA, 25 bp, SARS Virus
aacacacagaaggtgacggtcttga

SEQ ID NO: 213011 - DNA, 25 bp, SARS Virus
acacacagaagaggacggtcttgaa

SEQ ID NO: 213012 - DNA, 25 bp, SARS Virus
cacacagaagatgacggtcttgaag

SEQ ID NO: 213013 - DNA, 25 bp, SARS Virus
acacagaagatggcggtcttgaagt

SEQ ID NO: 213014 - DNA, 25 bp, SARS Virus
cacagaagatgagggtcttgaagtt

SEQ ID NO: 213015 - DNA, 25 bp, SARS Virus
acagaagatgacggtcttgaagttt

SEQ ID NO: 213016 - DNA, 25 bp, SARS Virus
cagaagatgacggtcttgaagttta

SEQ ID NO: 213017 - DNA, 25 bp, SARS Virus
agaagatgacgggcttgaagtttac

SEQ ID NO: 213018 - DNA, 25 bp, SARS Virus
gaagatgacggtgttgaagtttact

SEQ ID NO: 213019 - DNA, 25 bp, SARS Virus
aagatgacggtcgtgaagtttactt

SEQ ID NO: 213020 - DNA, 25 bp, SARS Virus
agatgacggtctggaagtttactta

SEQ ID NO: 213021 - DNA, 25 bp, SARS Virus
gatgacggtcttgaagtttacttaa

SEQ ID NO: 213022 - DNA, 25 bp, SARS Virus
atgacggtcttggagtttacttaaa

SEQ ID NO: 213023 - DNA, 25 bp, SARS Virus
tgacggtcttgaggtttacttaaac

SEQ ID NO: 213024 - DNA, 25 bp, SARS Virus
gacggtcttgaagtttacttaaact

SEQ ID NO: 213025 - DNA, 25 bp, SARS Virus
acggtcttgaaggttacttaaactt

SEQ ID NO: 213026 - DNA, 25 bp, SARS Virus
cggtcttgaagtgtacttaaacttc

SEQ ID NO: 213027 - DNA, 25 bp, SARS Virus
ggtcttgaagttgacttaaacttca

SEQ ID NO: 213028 - DNA, 25 bp, SARS Virus
gtcttgaagtttgcttaaacttcat

SEQ ID NO: 213029 - DNA, 25 bp, SARS Virus
tcttgaagtttagttaaacttcata

SEQ ID NO: 213030 - DNA, 25 bp, SARS Virus
cttgaagtttacgtaaacttcatag

SEQ ID NO: 213031 - DNA, 25 bp, SARS Virus
ttgaagtttactgaaacttcataga

SEQ ID NO: 213032 - DNA, 25 bp, SARS Virus
tgaagtttacttgaacttcatagat

SEQ ID NO: 213033 - DNA, 25 bp, SARS Virus
gaagtttacttagacttcatagatg

SEQ ID NO: 213034 - DNA, 25 bp, SARS Virus
aagtttacttaagcttcatagatga

SEQ ID NO: 213035 - DNA, 25 bp, SARS Virus
agtttacttaaagttcatagatgac

SEQ ID NO: 213036 - DNA, 25 bp, SARS Virus
gtttacttaaacgtcatagatgacc

SEQ ID NO: 213037 - DNA, 25 bp, SARS Virus
tttacttaaactgcatagatgaccg

SEQ ID NO: 213038 - DNA, 25 bp, SARS Virus
ttacttaaacttgatagatgaccga

SEQ ID NO: 213039 - DNA, 25 bp, SARS Virus
tacttaaacttcgtagatgaccgaa

SEQ ID NO: 213040 - DNA, 25 bp, SARS Virus
acttaaacttcagagatgaccgaaa

SEQ ID NO: 213041 - DNA, 25 bp, SARS Virus
cttaaacttcatggatgaccgaaac

SEQ ID NO: 213042 - DNA, 25 bp, SARS Virus
ttaaacttcatagatgaccgaaaca

SEQ ID NO: 213043 - DNA, 25 bp, SARS Virus
taaacttcataggtgaccgaaacat

SEQ ID NO: 213044 - DNA, 25 bp, SARS Virus
aaacttcatagaggaccgaaacatg

SEQ ID NO: 213045 - DNA, 25 bp, SARS Virus
aacttcatagatgaccgaaacatga

SEQ ID NO: 213046 - DNA, 25 bp, SARS Virus
acttcatagatggccgaaacatgag

SEQ ID NO: 213047 - DNA, 25 bp, SARS Virus
cttcatagatgagcgaaacatgagg

SEQ ID NO: 213048 - DNA, 25 bp, SARS Virus
ttcatagatgacggaaacatgaggt

SEQ ID NO: 213049 - DNA, 25 bp, SARS Virus
tcatagatgaccgaaacatgaggtt

SEQ ID NO: 213050 - DNA, 25 bp, SARS Virus
catagatgaccggaacatgaggttt

SEQ ID NO: 213051 - DNA, 25 bp, SARS Virus
atagatgaccgagacatgaggtttc

SEQ ID NO: 213052 - DNA, 25 bp, SARS Virus
tagatgaccgaagcatgaggtttct

SEQ ID NO: 213053 - DNA, 25 bp, SARS Virus
agatgaccgaaagatgaggtttctg

SEQ ID NO: 213054 - DNA, 25 bp, SARS Virus
gatgaccgaaacgtgaggtttctgt

SEQ ID NO: 213055 - DNA, 25 bp, SARS Virus
atgaccgaaacaggaggtttctgtt

SEQ ID NO: 213056 - DNA, 25 bp, SARS Virus
tgaccgaaacatgaggtttctgttg

SEQ ID NO: 213057 - DNA, 25 bp, SARS Virus
gaccgaaacatggggtttctgttgc

SEQ ID NO: 213058 - DNA, 25 bp, SARS Virus
accgaaacatgaggtttctgttgca

SEQ ID NO: 213059 - DNA, 25 bp, SARS Virus
ccgaaacatgaggtttctgttgcat

SEQ ID NO: 213060 - DNA, 25 bp, SARS Virus
cgaaacatgagggttctgttgcatt

SEQ ID NO: 213061 - DNA, 25 bp, SARS Virus
gaaacatgaggtgtctgttgcattt

SEQ ID NO: 213062 - DNA, 25 bp, SARS Virus
aaacatgaggttgctgttgcatttg

SEQ ID NO: 213063 - DNA, 25 bp, SARS Virus
aacatgaggtttgtgttgcatttgt

SEQ ID NO: 213064 - DNA, 25 bp, SARS Virus
acatgaggtttcggttgcatttgtg

SEQ ID NO: 213065 - DNA, 25 bp, SARS Virus
catgaggtttctgttgcatttgtgg

SEQ ID NO: 213066 - DNA, 25 bp, SARS Virus
atgaggtttctggtgcatttgtggt

SEQ ID NO: 213067 - DNA, 25 bp, SARS Virus
tgaggtttctgtggcatttgtggtt

SEQ ID NO: 213068 - DNA, 25 bp, SARS Virus
gaggtttctgttgcatttgtggttc

SEQ ID NO: 213069 - DNA, 25 bp, SARS Virus
aggtttctgttggatttgtggttca

SEQ ID NO: 213070 - DNA, 25 bp, SARS Virus
ggtttctgttgcgtttgtggttcac

SEQ ID NO: 213071 - DNA, 25 bp, SARS Virus
gtttctgttgcagttgtggttcaca

SEQ ID NO: 213072 - DNA, 25 bp, SARS Virus
tttctgttgcatgtgtggttcacaa

SEQ ID NO: 213073 - DNA, 25 bp, SARS Virus
ttctgttgcattggtggttcacaaa

SEQ ID NO: 213074 - DNA, 25 bp, SARS Virus
tctgttgcatttgtggttcacaaac

SEQ ID NO: 213075 - DNA, 25 bp, SARS Virus
ctgttgcatttggggttcacaaacc

SEQ ID NO: 213076 - DNA, 25 bp, SARS Virus
tgttgcatttgtggttcacaaacca

SEQ ID NO: 213077 - DNA, 25 bp, SARS Virus
gttgcatttgtggttcacaaaccaa

SEQ ID NO: 213078 - DNA, 25 bp, SARS Virus
ttgcatttgtgggtcacaaaccaaa

SEQ ID NO: 213079 - DNA, 25 bp, SARS Virus
tgcatttgtggtgcacaaaccaaac

SEQ ID NO: 213080 - DNA, 25 bp, SARS Virus
gcatttgtggttgacaaaccaaact

SEQ ID NO: 213081 - DNA, 25 bp, SARS Virus
catttgtggttcgcaaaccaaactt

SEQ ID NO: 213082 - DNA, 25 bp, SARS Virus
atttgtggttcagaaaccaaacttg

SEQ ID NO: 213083 - DNA, 25 bp, SARS Virus
tttgtggttcacgaaccaaacttgc

SEQ ID NO: 213084 - DNA, 25 bp, SARS Virus
ttgtggttcacagaccaaacttgca

SEQ ID NO: 213085 - DNA, 25 bp, SARS Virus
tgtggttcacaagccaaacttgcaa

SEQ ID NO: 213086 - DNA, 25 bp, SARS Virus
gtggttcacaaagcaaacttgcaac

SEQ ID NO: 213087 - DNA, 25 bp, SARS Virus
tggttcacaaacgaaacttgcaaca

SEQ ID NO: 213088 - DNA, 25 bp, SARS Virus
ggttcacaaaccgaacttgcaacag

SEQ ID NO: 213089 - DNA, 25 bp, SARS Virus
gttcacaaaccagacttgcaacaga

SEQ ID NO: 213090 - DNA, 25 bp, SARS Virus
ttcacaaaccaagcttgcaacagaa

SEQ ID NO: 213091 - DNA, 25 bp, SARS Virus
tcacaaaccaaagttgcaacagaac

SEQ ID NO: 213092 - DNA, 25 bp, SARS Virus
cacaaaccaaacgtgcaacagaacc

SEQ ID NO: 213093 - DNA, 25 bp, SARS Virus
acaaaccaaactggcaacagaacca

SEQ ID NO: 213094 - DNA, 25 bp, SARS Virus
caaaccaaacttgcaacagaaccaa

SEQ ID NO: 213095 - DNA, 25 bp, SARS Virus
aaaccaaacttggaacagaaccaac

SEQ ID NO: 213096 - DNA, 25 bp, SARS Virus
aaccaaacttgcgacagaaccaaca

SEQ ID NO: 213097 - DNA, 25 bp, SARS Virus
accaaacttgcagcagaaccaacat

SEQ ID NO: 213098 - DNA, 25 bp, SARS Virus
ccaaacttgcaagagaaccaacatc

SEQ ID NO: 213099 - DNA, 25 bp, SARS Virus
caaacttgcaacggaaccaacatcg

SEQ ID NO: 213100 - DNA, 25 bp, SARS Virus
aaacttgcaacagaaccaacatcgg

SEQ ID NO: 213101 - DNA, 25 bp, SARS Virus
aacttgcaacaggaccaacatcgga

SEQ ID NO: 213102 - DNA, 25 bp, SARS Virus
acttgcaacagagccaacatcggac

SEQ ID NO: 213103 - DNA, 25 bp, SARS Virus
cttgcaacagaagcaacatcggacc

SEQ ID NO: 213104 - DNA, 25 bp, SARS Virus
ttgcaacagaacgaacatcggacca

SEQ ID NO: 213105 - DNA, 25 bp, SARS Virus
tgcaacagaaccgacatcggaccaa

SEQ ID NO: 213106 - DNA, 25 bp, SARS Virus
gcaacagaaccagcatcggaccaat

SEQ ID NO: 213107 - DNA, 25 bp, SARS Virus
caacagaaccaagatcggaccaatt

SEQ ID NO: 213108 - DNA, 25 bp, SARS Virus
aacagaaccaacgtcggaccaatta

SEQ ID NO: 213109 - DNA, 25 bp, SARS Virus
acagaaccaacagcggaccaattac

SEQ ID NO: 213110 - DNA, 25 bp, SARS Virus
cagaaccaacatgggaccaattaca

SEQ ID NO: 213111 - DNA, 25 bp, SARS Virus
agaaccaacatcggaccaattacac

SEQ ID NO: 213112 - DNA, 25 bp, SARS Virus
gaaccaacatcggaccaattacacg

SEQ ID NO: 213113 - DNA, 25 bp, SARS Virus
aaccaacatcgggccaattacacgg

SEQ ID NO: 213114 - DNA, 25 bp, SARS Virus
accaacatcggagcaattacacggt

SEQ ID NO: 213115 - DNA, 25 bp, SARS Virus
ccaacatcggacgaattacacggtt

SEQ ID NO: 213116 - DNA, 25 bp, SARS Virus
caacatcggaccgattacacggttt

SEQ ID NO: 213117 - DNA, 25 bp, SARS Virus
aacatcggaccagttacacggtttg

SEQ ID NO: 213118 - DNA, 25 bp, SARS Virus
acatcggaccaagtacacggtttgt

SEQ ID NO: 213119 - DNA, 25 bp, SARS Virus
catcggaccaatgacacggtttgtt

SEQ ID NO: 213120 - DNA, 25 bp, SARS Virus
atcggaccaattgcacggtttgtta

SEQ ID NO: 213121 - DNA, 25 bp, SARS Virus
tcggaccaattagacggtttgttaa

SEQ ID NO: 213122 - DNA, 25 bp, SARS Virus
cggaccaattacgcggtttgttaac

SEQ ID NO: 213123 - DNA, 25 bp, SARS Virus
ggaccaattacagggtttgttaacc

SEQ ID NO: 213124 - DNA, 25 bp, SARS Virus
gaccaattacacggtttgttaaccg

SEQ ID NO: 213125 - DNA, 25 bp, SARS Virus
accaattacacggtttgttaaccga

SEQ ID NO: 213126 - DNA, 25 bp, SARS Virus
ccaattacacgggttgttaaccgaa

SEQ ID NO: 213127 - DNA, 25 bp, SARS Virus
caattacacggtgtgttaaccgaat

SEQ ID NO: 213128 - DNA, 25 bp, SARS Virus
aattacacggttggttaaccgaata

SEQ ID NO: 213129 - DNA, 25 bp, SARS Virus
attacacggtttgttaaccgaatac

SEQ ID NO: 213130 - DNA, 25 bp, SARS Virus
ttacacggtttggtaaccgaatacg

SEQ ID NO: 213131 - DNA, 25 bp, SARS Virus
tacacggtttgtgaaccgaatacgt

SEQ ID NO: 213132 - DNA, 25 bp, SARS Virus
acacggtttgttgaccgaatacgtc

SEQ ID NO: 213133 - DNA, 25 bp, SARS Virus
cacggtttgttagccgaatacgtca

SEQ ID NO: 213134 - DNA, 25 bp, SARS Virus
acggtttgttaagcgaatacgtcat

SEQ ID NO: 213135 - DNA, 25 bp, SARS Virus
cggtttgttaacggaatacgtcatt

SEQ ID NO: 213136 - DNA, 25 bp, SARS Virus
ggtttgttaaccgaatacgtcatta

SEQ ID NO: 213137 - DNA, 25 bp, SARS Virus
gtttgttaaccggatacgtcattaa

SEQ ID NO: 213138 - DNA, 25 bp, SARS Virus
tttgttaaccgagtacgtcattaaa

SEQ ID NO: 213139 - DNA, 25 bp, SARS Virus
ttgttaaccgaagacgtcattaaat

SEQ ID NO: 213140 - DNA, 25 bp, SARS Virus
tgttaaccgaatgcgtcattaaatc

SEQ ID NO: 213141 - DNA, 25 bp, SARS Virus
gttaaccgaataggtcattaaatcg

SEQ ID NO: 213142 - DNA, 25 bp, SARS Virus
ttaaccgaatacgtcattaaatcgt

SEQ ID NO: 213143 - DNA, 25 bp, SARS Virus
taaccgaatacggcattaaatcgtg

SEQ ID NO: 213144 - DNA, 25 bp, SARS Virus
aaccgaatacgtgattaaatcgtgg

SEQ ID NO: 213145 - DNA, 25 bp, SARS Virus
accgaatacgtcgttaaatcgtgga

SEQ ID NO: 213146 - DNA, 25 bp, SARS Virus
ccgaatacgtcagtaaatcgtggaa

SEQ ID NO: 213147 - DNA, 25 bp, SARS Virus
cgaatacgtcatgaaatcgtggaaa

SEQ ID NO: 213148 - DNA, 25 bp, SARS Virus
gaatacgtcattgaatcgtggaaag

SEQ ID NO: 213149 - DNA, 25 bp, SARS Virus
aatacgtcattagatcgtggaaaga

SEQ ID NO: 213150 - DNA, 25 bp, SARS Virus
atacgtcattaagtcgtggaaagaa

SEQ ID NO: 213151 - DNA, 25 bp, SARS Virus
tacgtcattaaagcgtggaaagaac

SEQ ID NO: 213152 - DNA, 25 bp, SARS Virus
acgtcattaaatggtggaaagaact

SEQ ID NO: 213153 - DNA, 25 bp, SARS Virus
cgtcattaaatcgtggaaagaactt

SEQ ID NO: 213154 - DNA, 25 bp, SARS Virus
gtcattaaatcggggaaagaacttt

SEQ ID NO: 213155 - DNA, 25 bp, SARS Virus
tcattaaatcgtggaaagaactttg

SEQ ID NO: 213156 - DNA, 25 bp, SARS Virus
cattaaatcgtggaaagaactttga

SEQ ID NO: 213157 - DNA, 25 bp, SARS Virus
attaaatcgtgggaagaactttgag

SEQ ID NO: 213158 - DNA, 25 bp, SARS Virus
ttaaatcgtggagagaactttgagc

SEQ ID NO: 213159 - DNA, 25 bp, SARS Virus
taaatcgtggaaggaactttgagcg

SEQ ID NO: 213160 - DNA, 25 bp, SARS Virus
aaatcgtggaaagaactttgagcga

SEQ ID NO: 213161 - DNA, 25 bp, SARS Virus
aatcgtggaaaggactttgagcgac

SEQ ID NO: 213162 - DNA, 25 bp, SARS Virus
atcgtggaaagagctttgagcgact

SEQ ID NO: 213163 - DNA, 25 bp, SARS Virus
tcgtggaaagaagtttgagcgactt

SEQ ID NO: 213164 - DNA, 25 bp, SARS Virus
cgtggaaagaacgttgagcgactta

SEQ ID NO: 213165 - DNA, 25 bp, SARS Virus
gtggaaagaactgtgagcgacttat

SEQ ID NO: 213166 - DNA, 25 bp, SARS Virus
tggaaagaacttggagcgacttatc

SEQ ID NO: 213167 - DNA, 25 bp, SARS Virus
ggaaagaactttgagcgacttatca

SEQ ID NO: 213168 - DNA, 25 bp, SARS Virus
gaaagaactttgggcgacttatcac

SEQ ID NO: 213169 - DNA, 25 bp, SARS Virus
aaagaactttgagcgacttatcaca

SEQ ID NO: 213170 - DNA, 25 bp, SARS Virus
aagaactttgagggacttatcacag

SEQ ID NO: 213171 - DNA, 25 bp, SARS Virus
agaactttgagcgacttatcacaga

SEQ ID NO: 213172 - DNA, 25 bp, SARS Virus
gaactttgagcggcttatcacagat

SEQ ID NO: 213173 - DNA, 25 bp, SARS Virus
aactttgagcgagttatcacagata

SEQ ID NO: 213174 - DNA, 25 bp, SARS Virus
actttgagcgacgtatcacagatat

SEQ ID NO: 213175 - DNA, 25 bp, SARS Virus
ctttgagcgactgatcacagatatc

SEQ ID NO: 213176 - DNA, 25 bp, SARS Virus
tttgagcgacttgtcacagatatca

SEQ ID NO: 213177 - DNA, 25 bp, SARS Virus
ttgagcgacttagcacagatatcag

SEQ ID NO: 213178 - DNA, 25 bp, SARS Virus
tgagcgacttatgacagatatcagt

SEQ ID NO: 213179 - DNA, 25 bp, SARS Virus
gagcgacttatcgcagatatcagtt

SEQ ID NO: 213180 - DNA, 25 bp, SARS Virus
agcgacttatcagagatatcagtta

SEQ ID NO: 213181 - DNA, 25 bp, SARS Virus
gcgacttatcacggatatcagttat

SEQ ID NO: 213182 - DNA, 25 bp, SARS Virus
cgacttatcacagatatcagttatc

SEQ ID NO: 213183 - DNA, 25 bp, SARS Virus
gacttatcacaggtatcagttatcg

SEQ ID NO: 213184 - DNA, 25 bp, SARS Virus
acttatcacagagatcagttatcgg

SEQ ID NO: 213185 - DNA, 25 bp, SARS Virus
cttatcacagatgtcagttatcggt

SEQ ID NO: 213186 - DNA, 25 bp, SARS Virus
ttatcacagatagcagttatcggtg

SEQ ID NO: 213187 - DNA, 25 bp, SARS Virus
tatcacagatatgagttatcggtga

SEQ ID NO: 213188 - DNA, 25 bp, SARS Virus
atcacagatatcggttatcggtgat

SEQ ID NO: 213189 - DNA, 25 bp, SARS Virus
tcacagatatcagttatcggtgatg

SEQ ID NO: 213190 - DNA, 25 bp, SARS Virus
cacagatatcaggtatcggtgatgt

SEQ ID NO: 213191 - DNA, 25 bp, SARS Virus
acagatatcagtgatcggtgatgta

SEQ ID NO: 213192 - DNA, 25 bp, SARS Virus
cagatatcagttgtcggtgatgtag

SEQ ID NO: 213193 - DNA, 25 bp, SARS Virus
agatatcagttagcggtgatgtagc

SEQ ID NO: 213194 - DNA, 25 bp, SARS Virus
gatatcagttatgggtgatgtagcg

SEQ ID NO: 213195 - DNA, 25 bp, SARS Virus
atatcagttatcggtgatgtagcgg

SEQ ID NO: 213196 - DNA, 25 bp, SARS Virus
tatcagttatcggtgatgtagcggt

SEQ ID NO: 213197 - DNA, 25 bp, SARS Virus
atcagttatcggggatgtagcggta

SEQ ID NO: 213198 - DNA, 25 bp, SARS Virus
tcagttatcggtgatgtagcggtaa

SEQ ID NO: 213199 - DNA, 25 bp, SARS Virus
cagttatcggtggtgtagcggtaag

SEQ ID NO: 213200 - DNA, 25 bp, SARS Virus
agttatcggtgaggtagcggtaagt

SEQ ID NO: 213201 - DNA, 25 bp, SARS Virus
gttatcggtgatgtagcggtaagtt

SEQ ID NO: 213202 - DNA, 25 bp, SARS Virus
ttatcggtgatggagcggtaagttc

SEQ ID NO: 213203 - DNA, 25 bp, SARS Virus
tatcggtgatgtggcggtaagttca

SEQ ID NO: 213204 - DNA, 25 bp, SARS Virus
atcggtgatgtagcggtaagttcag

SEQ ID NO: 213205 - DNA, 25 bp, SARS Virus
tcggtgatgtaggggtaagttcaga

SEQ ID NO: 213206 - DNA, 25 bp, SARS Virus
cggtgatgtagcggtaagttcagac

SEQ ID NO: 213207 - DNA, 25 bp, SARS Virus
ggtgatgtagcggtaagttcagacc

SEQ ID NO: 213208 - DNA, 25 bp, SARS Virus
gtgatgtagcgggaagttcagaccc

SEQ ID NO: 213209 - DNA, 25 bp, SARS Virus
tgatgtagcggtgagttcagaccct

SEQ ID NO: 213210 - DNA, 25 bp, SARS Virus
gatgtagcggtaggttcagaccctt

SEQ ID NO: 213211 - DNA, 25 bp, SARS Virus
atgtagcggtaagttcagacccttc

SEQ ID NO: 213212 - DNA, 25 bp, SARS Virus
tgtagcggtaaggtcagacccttct

SEQ ID NO: 213213 - DNA, 25 bp, SARS Virus
gtagcggtaagtgcagacccttctt

SEQ ID NO: 213214 - DNA, 25 bp, SARS Virus
tagcggtaagttgagacccttctta

SEQ ID NO: 213215 - DNA, 25 bp, SARS Virus
agcggtaagttcggacccttcttac

SEQ ID NO: 213216 - DNA, 25 bp, SARS Virus
gcggtaagttcagacccttcttaca

SEQ ID NO: 213217 - DNA, 25 bp, SARS Virus
cggtaagttcaggcccttcttacac

SEQ ID NO: 213218 - DNA, 25 bp, SARS Virus
ggtaagttcagagccttcttacact

SEQ ID NO: 213219 - DNA, 25 bp, SARS Virus
gtaagttcagacgcttcttacactg

SEQ ID NO: 213220 - DNA, 25 bp, SARS Virus
taagttcagaccgttcttacactgt

SEQ ID NO: 213221 - DNA, 25 bp, SARS Virus
aagttcagacccgtcttacactgtc

SEQ ID NO: 213222 - DNA, 25 bp, SARS Virus
agttcagaccctgcttacactgtct

SEQ ID NO: 213223 - DNA, 25 bp, SARS Virus
gttcagacccttgttacactgtcta

SEQ ID NO: 213224 - DNA, 25 bp, SARS Virus
ttcagacccttcgtacactgtctat

SEQ ID NO: 213225 - DNA, 25 bp, SARS Virus
tcagacccttctgacactgtctatc

SEQ ID NO: 213226 - DNA, 25 bp, SARS Virus
cagacccttcttgcactgtctatcg

SEQ ID NO: 213227 - DNA, 25 bp, SARS Virus
agacccttcttagactgtctatcga

SEQ ID NO: 213228 - DNA, 25 bp, SARS Virus
gacccttcttacgctgtctatcgag

SEQ ID NO: 213229 - DNA, 25 bp, SARS Virus
acccttcttacagtgtctatcgaga

SEQ ID NO: 213230 - DNA, 25 bp, SARS Virus
cccttcttacacggtctatcgagag

SEQ ID NO: 213231 - DNA, 25 bp, SARS Virus
ccttcttacactgtctatcgagagc

SEQ ID NO: 213232 - DNA, 25 bp, SARS Virus
cttcttacactggctatcgagagca

SEQ ID NO: 213233 - DNA, 25 bp, SARS Virus
ttcttacactgtgtatcgagagcac

SEQ ID NO: 213234 - DNA, 25 bp, SARS Virus
tcttacactgtcgatcgagagcact

SEQ ID NO: 213235 - DNA, 25 bp, SARS Virus
cttacactgtctgtcgagagcactt

SEQ ID NO: 213236 - DNA, 25 bp, SARS Virus
ttacactgtctagcgagagcacttc

SEQ ID NO: 213237 - DNA, 25 bp, SARS Virus
tacactgtctatggagagcacttcg

SEQ ID NO: 213238 - DNA, 25 bp, SARS Virus
acactgtctatcgagagcacttcga

SEQ ID NO: 213239 - DNA, 25 bp, SARS Virus
cactgtctatcgggagcacttcgac

SEQ ID NO: 213240 - DNA, 25 bp, SARS Virus
actgtctatcgagagcacttcgacc

SEQ ID NO: 213241 - DNA, 25 bp, SARS Virus
ctgtctatcgagggcacttcgaccg

SEQ ID NO: 213242 - DNA, 25 bp, SARS Virus
tgtctatcgagagcacttcgaccga

SEQ ID NO: 213243 - DNA, 25 bp, SARS Virus
gtctatcgagaggacttcgaccgaa

SEQ ID NO: 213244 - DNA, 25 bp, SARS Virus
tctatcgagagcgcttcgaccgaaa

SEQ ID NO: 213245 - DNA, 25 bp, SARS Virus
ctatcgagagcagttcgaccgaaac

SEQ ID NO: 213246 - DNA, 25 bp, SARS Virus
tatcgagagcacgtcgaccgaaaca

SEQ ID NO: 213247 - DNA, 25 bp, SARS Virus
atcgagagcactgcgaccgaaacac

SEQ ID NO: 213248 - DNA, 25 bp, SARS Virus
tcgagagcacttggaccgaaacact

SEQ ID NO: 213249 - DNA, 25 bp, SARS Virus
cgagagcacttcgaccgaaacactt

SEQ ID NO: 213250 - DNA, 25 bp, SARS Virus
gagagcacttcggccgaaacacttc

SEQ ID NO: 213251 - DNA, 25 bp, SARS Virus
agagcacttcgagcgaaacacttcg

SEQ ID NO: 213252 - DNA, 25 bp, SARS Virus
gagcacttcgacggaaacacttcgg

SEQ ID NO: 213253 - DNA, 25 bp, SARS Virus
agcacttcgaccgaaacacttcgga

SEQ ID NO: 213254 - DNA, 25 bp, SARS Virus
gcacttcgaccggaacacttcggac

SEQ ID NO: 213255 - DNA, 25 bp, SARS Virus
cacttcgaccgagacacttcggaca

SEQ ID NO: 213256 - DNA, 25 bp, SARS Virus
acttcgaccgaagcacttcggacag

SEQ ID NO: 213257 - DNA, 25 bp, SARS Virus
cttcgaccgaaagacttcggacagt

SEQ ID NO: 213258 - DNA, 25 bp, SARS Virus
ttcgaccgaaacgcttcggacagta

SEQ ID NO: 213259 - DNA, 25 bp, SARS Virus
tcgaccgaaacagttcggacagtaa

SEQ ID NO: 213260 - DNA, 25 bp, SARS Virus
cgaccgaaacacgtcggacagtaaa

SEQ ID NO: 213261 - DNA, 25 bp, SARS Virus
gaccgaaacactgcggacagtaaac

SEQ ID NO: 213262 - DNA, 25 bp, SARS Virus
accgaaacacttgggacagtaaact

SEQ ID NO: 213263 - DNA, 25 bp, SARS Virus
ccgaaacacttcggacagtaaacta

SEQ ID NO: 213264 - DNA, 25 bp, SARS Virus
cgaaacacttcggacagtaaactaa

SEQ ID NO: 213265 - DNA, 25 bp, SARS Virus
gaaacacttcgggcagtaaactaaa

SEQ ID NO: 213266 - DNA, 25 bp, SARS Virus
aaacacttcggagagtaaactaaat

SEQ ID NO: 213267 - DNA, 25 bp, SARS Virus
aacacttcggacggtaaactaaatt

SEQ ID NO: 213268 - DNA, 25 bp, SARS Virus
acacttcggacagtaaactaaattt

SEQ ID NO: 213269 - DNA, 25 bp, SARS Virus
cacttcggacaggaaactaaattta

SEQ ID NO: 213270 - DNA, 25 bp, SARS Virus
acttcggacagtgaactaaatttag

SEQ ID NO: 213271 - DNA, 25 bp, SARS Virus
cttcggacagtagactaaatttagt

SEQ ID NO: 213272 - DNA, 25 bp, SARS Virus
ttcggacagtaagctaaatttagta

SEQ ID NO: 213273 - DNA, 25 bp, SARS Virus
tcggacagtaaagtaaatttagtag

SEQ ID NO: 213274 - DNA, 25 bp, SARS Virus
cggacagtaaacgaaatttagtagt

SEQ ID NO: 213275 - DNA, 25 bp, SARS Virus
ggacagtaaactgaatttagtagtc

SEQ ID NO: 213276 - DNA, 25 bp, SARS Virus
gacagtaaactagatttagtagtcg

SEQ ID NO: 213277 - DNA, 25 bp, SARS Virus
acagtaaactaagtttagtagtcgt

SEQ ID NO: 213278 - DNA, 25 bp, SARS Virus
cagtaaactaaagttagtagtcgtt

SEQ ID NO: 213279 - DNA, 25 bp, SARS Virus
agtaaactaaatgtagtagtcgttt

SEQ ID NO: 213280 - DNA, 25 bp, SARS Virus
gtaaactaaattgagtagtcgttta

SEQ ID NO: 213281 - DNA, 25 bp, SARS Virus
taaactaaatttggtagtcgtttaa

SEQ ID NO: 213282 - DNA, 25 bp, SARS Virus
aaactaaatttagtagtcgtttaaa

SEQ ID NO: 213283 - DNA, 25 bp, SARS Virus
aactaaatttaggagtcgtttaaaa

SEQ ID NO: 213284 - DNA, 25 bp, SARS Virus
actaaatttagtggtcgtttaaaac

SEQ ID NO: 213285 - DNA, 25 bp, SARS Virus
ctaaatttagtagtcgtttaaaaca

SEQ ID NO: 213286 - DNA, 25 bp, SARS Virus
taaatttagtaggcgtttaaaacac

SEQ ID NO: 213287 - DNA, 25 bp, SARS Virus
aaatttagtagtggtttaaaacaca

SEQ ID NO: 213288 - DNA, 25 bp, SARS Virus
aatttagtagtcgtttaaaacacaa

SEQ ID NO: 213289 - DNA, 25 bp, SARS Virus
gaacacaaaaggtgtattcgtcggt

SEQ ID NO: 213290 - DNA, 25 bp, SARS Virus
aacacaaaaggtttattcgtcggta

SEQ ID NO: 213291 - DNA, 25 bp, SARS Virus
acacaaaaggtgtattcgtcggtat

SEQ ID NO: 213292 - DNA, 25 bp, SARS Virus
cacaaaaggtgttttcgtcggtatt

SEQ ID NO: 213293 - DNA, 25 bp, SARS Virus
acaaaaggtgtattcgtcggtattc

SEQ ID NO: 213294 - DNA, 25 bp, SARS Virus
caaaaggtgtattcgtcggtattct

SEQ ID NO: 213295 - DNA, 25 bp, SARS Virus
aaaaggtgtatttgtcggtattcta

SEQ ID NO: 213296 - DNA, 25 bp, SARS Virus
aaaggtgtattcttcggtattctag

SEQ ID NO: 213297 - DNA, 25 bp, SARS Virus
aaggtgtattcgtcggtattctagg

SEQ ID NO: 213298 - DNA, 25 bp, SARS Virus
aggtgtattcgttggtattctagga

SEQ ID NO: 213299 - DNA, 25 bp, SARS Virus
ggtgtattcgtctgtattctaggag

SEQ ID NO: 213300 - DNA, 25 bp, SARS Virus
gtgtattcgtcgttattctaggagt

SEQ ID NO: 213301 - DNA, 25 bp, SARS Virus
tgtattcgtcggtattctaggagta

SEQ ID NO: 213302 - DNA, 25 bp, SARS Virus
gtattcgtcggttttctaggagtac

SEQ ID NO: 213303 - DNA, 25 bp, SARS Virus
tattcgtcggtattctaggagtact

SEQ ID NO: 213304 - DNA, 25 bp, SARS Virus
attcgtcggtattctaggagtactg

SEQ ID NO: 213305 - DNA, 25 bp, SARS Virus
ttcgtcggtattttaggagtactgg

SEQ ID NO: 213306 - DNA, 25 bp, SARS Virus
tcgtcggtattctaggagtactgga

SEQ ID NO: 213307 - DNA, 25 bp, SARS Virus
cgtcggtattcttggagtactggat

SEQ ID NO: 213308 - DNA, 25 bp, SARS Virus
gtcggtattctatgagtactggatt

SEQ ID NO: 213309 - DNA, 25 bp, SARS Virus
tcggtattctagtagtactggattg

SEQ ID NO: 213310 - DNA, 25 bp, SARS Virus
cggtattctaggtgtactggattga

SEQ ID NO: 213311 - DNA, 25 bp, SARS Virus
ggtattctaggattactggattgag

SEQ ID NO: 213312 - DNA, 25 bp, SARS Virus
gtattctaggagtactggattgaga

SEQ ID NO: 213313 - DNA, 25 bp, SARS Virus
tattctaggagttctggattgagaa

SEQ ID NO: 213314 - DNA, 25 bp, SARS Virus
attctaggagtattggattgagaac

SEQ ID NO: 213315 - DNA, 25 bp, SARS Virus
ttctaggagtactggattgagaaca

SEQ ID NO: 213316 - DNA, 25 bp, SARS Virus
tctaggagtacttgattgagaacac

SEQ ID NO: 213317 - DNA, 25 bp, SARS Virus
ctaggagtactgtattgagaacaca

SEQ ID NO: 213318 - DNA, 25 bp, SARS Virus
taggagtactggtttgagaacacaa

SEQ ID NO: 213319 - DNA, 25 bp, SARS Virus
aggagtactggattgagaacacaat

SEQ ID NO: 213320 - DNA, 25 bp, SARS Virus
ggagtactggattgagaacacaatg

SEQ ID NO: 213321 - DNA, 25 bp, SARS Virus
gagtactggatttagaacacaatga

SEQ ID NO: 213322 - DNA, 25 bp, SARS Virus
agtactggattgtgaacacaatgaa

SEQ ID NO: 213323 - DNA, 25 bp, SARS Virus
gtactggattgataacacaatgaaa

SEQ ID NO: 213324 - DNA, 25 bp, SARS Virus
tactggattgagtacacaatgaaat

SEQ ID NO: 213325 - DNA, 25 bp, SARS Virus
actggattgagatcacaatgaaatt

SEQ ID NO: 213326 - DNA, 25 bp, SARS Virus
ctggattgagaatacaatgaaattg

SEQ ID NO: 213327 - DNA, 25 bp, SARS Virus
tggattgagaactcaatgaaattgt

SEQ ID NO: 213328 - DNA, 25 bp, SARS Virus
ggattgagaacataatgaaattgtg

SEQ ID NO: 213329 - DNA, 25 bp, SARS Virus
gattgagaacactatgaaattgtgg

SEQ ID NO: 213330 - DNA, 25 bp, SARS Virus
attgagaacacattgaaattgtgga

SEQ ID NO: 213331 - DNA, 25 bp, SARS Virus
ttgagaacacaatgaaattgtggaa

SEQ ID NO: 213332 - DNA, 25 bp, SARS Virus
tgagaacacaattaaattgtggaag

SEQ ID NO: 213333 - DNA, 25 bp, SARS Virus
gagaacacaatgtaattgtggaagt

SEQ ID NO: 213334 - DNA, 25 bp, SARS Virus
agaacacaatgatattgtggaagta

SEQ ID NO: 213335 - DNA, 25 bp, SARS Virus
gaacacaatgaatttgtggaagtag

SEQ ID NO: 213336 - DNA, 25 bp, SARS Virus
aacacaatgaaattgtggaagtaga

SEQ ID NO: 213337 - DNA, 25 bp, SARS Virus
acacaatgaaattgtggaagtagac

SEQ ID NO: 213338 - DNA, 25 bp, SARS Virus
cacaatgaaattttggaagtagact

SEQ ID NO: 213339 - DNA, 25 bp, SARS Virus
acaatgaaattgtggaagtagacta

SEQ ID NO: 213340 - DNA, 25 bp, SARS Virus
caatgaaattgttgaagtagactac

SEQ ID NO: 213341 - DNA, 25 bp, SARS Virus
aatgaaattgtgtaagtagactacc

SEQ ID NO: 213342 - DNA, 25 bp, SARS Virus
atgaaattgtggtagtagactacca

SEQ ID NO: 213343 - DNA, 25 bp, SARS Virus
tgaaattgtggatgtagactaccaa

SEQ ID NO: 213344 - DNA, 25 bp, SARS Virus
gaaattgtggaattagactaccaaa

SEQ ID NO: 213345 - DNA, 25 bp, SARS Virus
aaattgtggaagtagactaccaaat

SEQ ID NO: 213346 - DNA, 25 bp, SARS Virus
aattgtggaagttgactaccaaatt

SEQ ID NO: 213347 - DNA, 25 bp, SARS Virus
attgtggaagtatactaccaaattc

SEQ ID NO: 213348 - DNA, 25 bp, SARS Virus
ttgtggaagtagtctaccaaattca

SEQ ID NO: 213349 - DNA, 25 bp, SARS Virus
tgtggaagtagattaccaaattcat

SEQ ID NO: 213350 - DNA, 25 bp, SARS Virus
gtggaagtagactaccaaattcata

SEQ ID NO: 213351 - DNA, 25 bp, SARS Virus
tggaagtagacttccaaattcatac

SEQ ID NO: 213352 - DNA, 25 bp, SARS Virus
ggaagtagactatcaaattcatact

SEQ ID NO: 213353 - DNA, 25 bp, SARS Virus
gaagtagactactaaattcatactg

SEQ ID NO: 213354 - DNA, 25 bp, SARS Virus
aagtagactacctaattcatactgt

SEQ ID NO: 213355 - DNA, 25 bp, SARS Virus
agtagactaccatattcatactgta

SEQ ID NO: 213356 - DNA, 25 bp, SARS Virus
gtagactaccaatttcatactgtaa

SEQ ID NO: 213357 - DNA, 25 bp, SARS Virus
tagactaccaaattcatactgtaac

SEQ ID NO: 213358 - DNA, 25 bp, SARS Virus
agactaccaaattcatactgtaacg

SEQ ID NO: 213359 - DNA, 25 bp, SARS Virus
gactaccaaatttatactgtaacgg

SEQ ID NO: 213360 - DNA, 25 bp, SARS Virus
actaccaaattcttactgtaacgga

SEQ ID NO: 213361 - DNA, 25 bp, SARS Virus
ctaccaaattcatactgtaacggat

SEQ ID NO: 213362 - DNA, 25 bp, SARS Virus
taccaaattcattctgtaacggatg

SEQ ID NO: 213363 - DNA, 25 bp, SARS Virus
accaaattcatattgtaacggatgt

SEQ ID NO: 213364 - DNA, 25 bp, SARS Virus
ccaaattcatactgtaacggatgtt

SEQ ID NO: 213365 - DNA, 25 bp, SARS Virus
caaattcatactttaacggatgttg

SEQ ID NO: 213366 - DNA, 25 bp, SARS Virus
aaattcatactgtaacggatgttga

SEQ ID NO: 213367 - DNA, 25 bp, SARS Virus
aattcatactgttacggatgttgaa

SEQ ID NO: 213368 - DNA, 25 bp, SARS Virus
attcatactgtatcggatgttgaag

SEQ ID NO: 213369 - DNA, 25 bp, SARS Virus
ttcatactgtaatggatgttgaagc

SEQ ID NO: 213370 - DNA, 25 bp, SARS Virus
tcatactgtaactgatgttgaagcc

SEQ ID NO: 213371 - DNA, 25 bp, SARS Virus
catactgtaacgtatgttgaagcca

SEQ ID NO: 213372 - DNA, 25 bp, SARS Virus
atactgtaacggttgttgaagccat

SEQ ID NO: 213373 - DNA, 25 bp, SARS Virus
tactgtaacggatgttgaagccatc

SEQ ID NO: 213374 - DNA, 25 bp, SARS Virus
actgtaacggattttgaagccatca

SEQ ID NO: 213375 - DNA, 25 bp, SARS Virus
ctgtaacggatgttgaagccatcaa

SEQ ID NO: 213376 - DNA, 25 bp, SARS Virus
tgtaacggatgttgaagccatcaaa

SEQ ID NO: 213377 - DNA, 25 bp, SARS Virus
gtaacggatgtttaagccatcaaaa

SEQ ID NO: 213378 - DNA, 25 bp, SARS Virus
taacggatgttgtagccatcaaaag

SEQ ID NO: 213379 - DNA, 25 bp, SARS Virus
aacggatgttgatgccatcaaaagt

SEQ ID NO: 213380 - DNA, 25 bp, SARS Virus
acggatgttgaatccatcaaaagtg

SEQ ID NO: 213381 - DNA, 25 bp, SARS Virus
cggatgttgaagtcatcaaaagtgc

SEQ ID NO: 213382 - DNA, 25 bp, SARS Virus
ggatgttgaagctatcaaaagtgca

SEQ ID NO: 213383 - DNA, 25 bp, SARS Virus
gatgttgaagccttcaaaagtgcag

SEQ ID NO: 213384 - DNA, 25 bp, SARS Virus
atgttgaagccatcaaaagtgcagt

SEQ ID NO: 213385 - DNA, 25 bp, SARS Virus
tgttgaagccattaaaagtgcagtg

SEQ ID NO: 213386 - DNA, 25 bp, SARS Virus
gttgaagccatctaaagtgcagtgt

SEQ ID NO: 213387 - DNA, 25 bp, SARS Virus
ttgaagccatcataagtgcagtgtg

SEQ ID NO: 213388 - DNA, 25 bp, SARS Virus
tgaagccatcaatagtgcagtgtga

SEQ ID NO: 213389 - DNA, 25 bp, SARS Virus
gaagccatcaaatgtgcagtgtgag

SEQ ID NO: 213390 - DNA, 25 bp, SARS Virus
aagccatcaaaattgcagtgtgaga

SEQ ID NO: 213391 - DNA, 25 bp, SARS Virus
agccatcaaaagtgcagtgtgagat

SEQ ID NO: 213392 - DNA, 25 bp, SARS Virus
gccatcaaaagttcagtgtgagata

SEQ ID NO: 213393 - DNA, 25 bp, SARS Virus
ccatcaaaagtgtagtgtgagatac

SEQ ID NO: 213394 - DNA, 25 bp, SARS Virus
catcaaaagtgctgtgtgagatact

SEQ ID NO: 213395 - DNA, 25 bp, SARS Virus
atcaaaagtgcattgtgagatactg

SEQ ID NO: 213396 - DNA, 25 bp, SARS Virus
tcaaaagtgcagtgtgagatactga

SEQ ID NO: 213397 - DNA, 25 bp, SARS Virus
caaaagtgcagtttgagatactgaa

SEQ ID NO: 213398 - DNA, 25 bp, SARS Virus
aaaagtgcagtgtgagatactgaag

SEQ ID NO: 213399 - DNA, 25 bp, SARS Virus
aaagtgcagtgttagatactgaagg

SEQ ID NO: 213400 - DNA, 25 bp, SARS Virus
aagtgcagtgtgtgatactgaagga

SEQ ID NO: 213401 - DNA, 25 bp, SARS Virus
agtgcagtgtgatatactgaaggaa

SEQ ID NO: 213402 - DNA, 25 bp, SARS Virus
gtgcagtgtgagttactgaaggaag

SEQ ID NO: 213403 - DNA, 25 bp, SARS Virus
tgcagtgtgagatactgaaggaaga

SEQ ID NO: 213404 - DNA, 25 bp, SARS Virus
gcagtgtgagattctgaaggaagac

SEQ ID NO: 213405 - DNA, 25 bp, SARS Virus
cagtgtgagatattgaaggaagaca

SEQ ID NO: 213406 - DNA, 25 bp, SARS Virus
agtgtgagatactgaaggaagacat

SEQ ID NO: 213407 - DNA, 25 bp, SARS Virus
gtgtgagatacttaaggaagacata

SEQ ID NO: 213408 - DNA, 25 bp, SARS Virus
tgtgagatactgtaggaagacatac

SEQ ID NO: 213409 - DNA, 25 bp, SARS Virus
gtgagatactgatggaagacatacc

SEQ ID NO: 213410 - DNA, 25 bp, SARS Virus
tgagatactgaatgaagacatacca

SEQ ID NO: 213411 - DNA, 25 bp, SARS Virus
gagatactgaagtaagacataccat

SEQ ID NO: 213412 - DNA, 25 bp, SARS Virus
agatactgaaggtagacataccatc

SEQ ID NO: 213413 - DNA, 25 bp, SARS Virus
gatactgaaggatgacataccatcc

SEQ ID NO: 213414 - DNA, 25 bp, SARS Virus
atactgaaggaatacataccatcct

SEQ ID NO: 213415 - DNA, 25 bp, SARS Virus
tactgaaggaagtcataccatccta

SEQ ID NO: 213416 - DNA, 25 bp, SARS Virus
actgaaggaagatataccatcctaa

SEQ ID NO: 213417 - DNA, 25 bp, SARS Virus
ctgaaggaagacttaccatcctaaa

SEQ ID NO: 213418 - DNA, 25 bp, SARS Virus
tgaaggaagacataccatcctaaaa

SEQ ID NO: 213419 - DNA, 25 bp, SARS Virus
gaaggaagacattccatcctaaaag

SEQ ID NO: 213420 - DNA, 25 bp, SARS Virus
aaggaagacatatcatcctaaaagg

SEQ ID NO: 213421 - DNA, 25 bp, SARS Virus
aggaagacatactatcctaaaaggt

SEQ ID NO: 213422 - DNA, 25 bp, SARS Virus
ggaagacataccttcctaaaaggtg

SEQ ID NO: 213423 - DNA, 25 bp, SARS Virus
gaagacataccatcctaaaaggtga

SEQ ID NO: 213424 - DNA, 25 bp, SARS Virus
aagacataccattctaaaaggtgat

SEQ ID NO: 213425 - DNA, 25 bp, SARS Virus
agacataccatcttaaaaggtgatg

SEQ ID NO: 213426 - DNA, 25 bp, SARS Virus
gacataccatcctaaaaggtgatga

SEQ ID NO: 213427 - DNA, 25 bp, SARS Virus
acataccatccttaaaggtgatgaa

SEQ ID NO: 213428 - DNA, 25 bp, SARS Virus
cataccatcctataaggtgatgaag

SEQ ID NO: 213429 - DNA, 25 bp, SARS Virus
ataccatcctaataggtgatgaaga

SEQ ID NO: 213430 - DNA, 25 bp, SARS Virus
taccatcctaaatggtgatgaagaa

SEQ ID NO: 213431 - DNA, 25 bp, SARS Virus
accatcctaaaatgtgatgaagaag

SEQ ID NO: 213432 - DNA, 25 bp, SARS Virus
ccatcctaaaagttgatgaagaagt

SEQ ID NO: 213433 - DNA, 25 bp, SARS Virus
catcctaaaaggtgatgaagaagtc

SEQ ID NO: 213434 - DNA, 25 bp, SARS Virus
atcctaaaaggttatgaagaagtct

SEQ ID NO: 213435 - DNA, 25 bp, SARS Virus
tcctaaaaggtgttgaagaagtctc

SEQ ID NO: 213436 - DNA, 25 bp, SARS Virus
cctaaaaggtgatgaagaagtctcc

SEQ ID NO: 213437 - DNA, 25 bp, SARS Virus
ctaaaaggtgattaagaagtctcca

SEQ ID NO: 213438 - DNA, 25 bp, SARS Virus
taaaaggtgatgtagaagtctccac

SEQ ID NO: 213439 - DNA, 25 bp, SARS Virus
aaaaggtgatgatgaagtctccacc

SEQ ID NO: 213440 - DNA, 25 bp, SARS Virus
aaaggtgatgaataagtctccaccc

SEQ ID NO: 213441 - DNA, 25 bp, SARS Virus
aaggtgatgaagtagtctccaccca

SEQ ID NO: 213442 - DNA, 25 bp, SARS Virus
aggtgatgaagatgtctccacccaa

SEQ ID NO: 213443 - DNA, 25 bp, SARS Virus
ggtgatgaagaattctccacccaac

SEQ ID NO: 213444 - DNA, 25 bp, SARS Virus
gtgatgaagaagtctccacccaaca

SEQ ID NO: 213445 - DNA, 25 bp, SARS Virus
tgatgaagaagtttccacccaacaa

SEQ ID NO: 213446 - DNA, 25 bp, SARS Virus
gatgaagaagtctccacccaacaac

SEQ ID NO: 213447 - DNA, 25 bp, SARS Virus
atgaagaagtcttcacccaacaact

SEQ ID NO: 213448 - DNA, 25 bp, SARS Virus
tgaagaagtctctacccaacaactg

SEQ ID NO: 213449 - DNA, 25 bp, SARS Virus
gaagaagtctcctcccaacaactga

SEQ ID NO: 213450 - DNA, 25 bp, SARS Virus
aagaagtctccatccaacaactgaa

SEQ ID NO: 213451 - DNA, 25 bp, SARS Virus
agaagtctccactcaacaactgaaa

SEQ ID NO: 213452 - DNA, 25 bp, SARS Virus
gaagtctccacctaacaactgaaag

SEQ ID NO: 213453 - DNA, 25 bp, SARS Virus
aagtctccaccctacaactgaaagt

SEQ ID NO: 213454 - DNA, 25 bp, SARS Virus
agtctccacccatcaactgaaagtg

SEQ ID NO: 213455 - DNA, 25 bp, SARS Virus
gtctccacccaataactgaaagtgt

SEQ ID NO: 213456 - DNA, 25 bp, SARS Virus
tctccacccaactactgaaagtgtt

SEQ ID NO: 213457 - DNA, 25 bp, SARS Virus
ctccacccaacatctgaaagtgttc

SEQ ID NO: 213458 - DNA, 25 bp, SARS Virus
tccacccaacaattgaaagtgttcg

SEQ ID NO: 213459 - DNA, 25 bp, SARS Virus
ccacccaacaactgaaagtgttcgt

SEQ ID NO: 213460 - DNA, 25 bp, SARS Virus
cacccaacaacttaaagtgttcgtt

SEQ ID NO: 213461 - DNA, 25 bp, SARS Virus
acccaacaactgtaagtgttcgttc

SEQ ID NO: 213462 - DNA, 25 bp, SARS Virus
cccaacaactgatagtgttcgttct

SEQ ID NO: 213463 - DNA, 25 bp, SARS Virus
ccaacaactgaatgtgttcgttcta

SEQ ID NO: 213464 - DNA, 25 bp, SARS Virus
caacaactgaaattgttcgttctaa

SEQ ID NO: 213465 - DNA, 25 bp, SARS Virus
aacaactgaaagtgttcgttctaac

SEQ ID NO: 213466 - DNA, 25 bp, SARS Virus
acaactgaaagttttcgttctaaca

SEQ ID NO: 213467 - DNA, 25 bp, SARS Virus
caactgaaagtgttcgttctaacag

SEQ ID NO: 213468 - DNA, 25 bp, SARS Virus
aactgaaagtgttcgttctaacagg

SEQ ID NO: 213469 - DNA, 25 bp, SARS Virus
actgaaagtgtttgttctaacaggt

SEQ ID NO: 213470 - DNA, 25 bp, SARS Virus
ctgaaagtgttctttctaacaggta

SEQ ID NO: 213471 - DNA, 25 bp, SARS Virus
tgaaagtgttcgttctaacaggtaa

SEQ ID NO: 213472 - DNA, 25 bp, SARS Virus
gaaagtgttcgttctaacaggtaag

SEQ ID NO: 213473 - DNA, 25 bp, SARS Virus
aaagtgttcgttttaacaggtaagg

SEQ ID NO: 213474 - DNA, 25 bp, SARS Virus
aagtgttcgttctaacaggtaagga

SEQ ID NO: 213475 - DNA, 25 bp, SARS Virus
agtgttcgttcttacaggtaaggaa

SEQ ID NO: 213476 - DNA, 25 bp, SARS Virus
gtgttcgttctatcaggtaaggaac

SEQ ID NO: 213477 - DNA, 25 bp, SARS Virus
tgttcgttctaataggtaaggaaca

SEQ ID NO: 213478 - DNA, 25 bp, SARS Virus
gttcgttctaactggtaaggaacac

SEQ ID NO: 213479 - DNA, 25 bp, SARS Virus
ttcgttctaacatgtaaggaacaca

SEQ ID NO: 213480 - DNA, 25 bp, SARS Virus
tcgttctaacagttaaggaacacac

SEQ ID NO: 213481 - DNA, 25 bp, SARS Virus
cgttctaacaggtaaggaacacaca

SEQ ID NO: 213482 - DNA, 25 bp, SARS Virus
gttctaacaggttaggaacacacag

SEQ ID NO: 213483 - DNA, 25 bp, SARS Virus
ttctaacaggtatggaacacacaga

SEQ ID NO: 213484 - DNA, 25 bp, SARS Virus
tctaacaggtaatgaacacacagaa

SEQ ID NO: 213485 - DNA, 25 bp, SARS Virus
ctaacaggtaagtaacacacagaag

SEQ ID NO: 213486 - DNA, 25 bp, SARS Virus
taacaggtaaggtacacacagaaga

SEQ ID NO: 213487 - DNA, 25 bp, SARS Virus
aacaggtaaggatcacacagaagat

SEQ ID NO: 213488 - DNA, 25 bp, SARS Virus
acaggtaaggaatacacagaagatg

SEQ ID NO: 213489 - DNA, 25 bp, SARS Virus
caggtaaggaactcacagaagatga

SEQ ID NO: 213490 - DNA, 25 bp, SARS Virus
aggtaaggaacatacagaagatgac

SEQ ID NO: 213491 - DNA, 25 bp, SARS Virus
ggtaaggaacactcagaagatgacg

SEQ ID NO: 213492 - DNA, 25 bp, SARS Virus
gtaaggaacacatagaagatgacgg

SEQ ID NO: 213493 - DNA, 25 bp, SARS Virus
taaggaacacactgaagatgacggt

SEQ ID NO: 213494 - DNA, 25 bp, SARS Virus
aaggaacacacataagatgacggtc

SEQ ID NO: 213495 - DNA, 25 bp, SARS Virus
aggaacacacagtagatgacggtct

SEQ ID NO: 213496 - DNA, 25 bp, SARS Virus
ggaacacacagatgatgacggtctt

SEQ ID NO: 213497 - DNA, 25 bp, SARS Virus
gaacacacagaatatgacggtcttg

SEQ ID NO: 213498 - DNA, 25 bp, SARS Virus
aacacacagaagttgacggtcttga

SEQ ID NO: 213499 - DNA, 25 bp, SARS Virus
acacacagaagatgacggtcttgaa

SEQ ID NO: 213500 - DNA, 25 bp, SARS Virus
cacacagaagattacggtcttgaag

SEQ ID NO: 213501 - DNA, 25 bp, SARS Virus
acacagaagatgtcggtcttgaagt

SEQ ID NO: 213502 - DNA, 25 bp, SARS Virus
cacagaagatgatggtcttgaagtt

SEQ ID NO: 213503 - DNA, 25 bp, SARS Virus
acagaagatgactgtcttgaagttt

SEQ ID NO: 213504 - DNA, 25 bp, SARS Virus
cagaagatgacgttcttgaagttta

SEQ ID NO: 213505 - DNA, 25 bp, SARS Virus
agaagatgacggtcttgaagtttac

SEQ ID NO: 213506 - DNA, 25 bp, SARS Virus
gaagatgacggttttgaagtttact

SEQ ID NO: 213507 - DNA, 25 bp, SARS Virus
aagatgacggtcttgaagtttactt

SEQ ID NO: 213508 - DNA, 25 bp, SARS Virus
agatgacggtcttgaagtttactta

SEQ ID NO: 213509 - DNA, 25 bp, SARS Virus
gatgacggtctttaagtttacttaa

SEQ ID NO: 213510 - DNA, 25 bp, SARS Virus
atgacggtcttgtagtttacttaaa

SEQ ID NO: 213511 - DNA, 25 bp, SARS Virus
tgacggtcttgatgtttacttaaac

SEQ ID NO: 213512 - DNA, 25 bp, SARS Virus
gacggtcttgaattttacttaaact

SEQ ID NO: 213513 - DNA, 25 bp, SARS Virus
acggtcttgaagtttacttaaactt

SEQ ID NO: 213514 - DNA, 25 bp, SARS Virus
cggtcttgaagtttacttaaacttc

SEQ ID NO: 213515 - DNA, 25 bp, SARS Virus
ggtcttgaagtttacttaaacttca

SEQ ID NO: 213516 - DNA, 25 bp, SARS Virus
gtcttgaagttttcttaaacttcat

SEQ ID NO: 213517 - DNA, 25 bp, SARS Virus
tcttgaagtttatttaaacttcata

SEQ ID NO: 213518 - DNA, 25 bp, SARS Virus
cttgaagtttacttaaacttcatag

SEQ ID NO: 213519 - DNA, 25 bp, SARS Virus
ttgaagtttacttaaacttcataga

SEQ ID NO: 213520 - DNA, 25 bp, SARS Virus
tgaagtttactttaacttcatagat

SEQ ID NO: 213521 - DNA, 25 bp, SARS Virus
gaagtttacttatacttcatagatg

SEQ ID NO: 213522 - DNA, 25 bp, SARS Virus
aagtttacttaatcttcatagatga

SEQ ID NO: 213523 - DNA, 25 bp, SARS Virus
agtttacttaaatttcatagatgac

SEQ ID NO: 213524 - DNA, 25 bp, SARS Virus
gtttacttaaacttcatagatgacc

SEQ ID NO: 213525 - DNA, 25 bp, SARS Virus
tttacttaaacttcatagatgaccg

SEQ ID NO: 213526 - DNA, 25 bp, SARS Virus
ttacttaaactttatagatgaccga

SEQ ID NO: 213527 - DNA, 25 bp, SARS Virus
tacttaaacttcttagatgaccgaa

SEQ ID NO: 213528 - DNA, 25 bp, SARS Virus
acttaaacttcatagatgaccgaaa

SEQ ID NO: 213529 - DNA, 25 bp, SARS Virus
cttaaacttcattgatgaccgaaac

SEQ ID NO: 213530 - DNA, 25 bp, SARS Virus
ttaaacttcatatatgaccgaaaca

SEQ ID NO: 213531 - DNA, 25 bp, SARS Virus
taaacttcatagttgaccgaaacat

SEQ ID NO: 213532 - DNA, 25 bp, SARS Virus
aaacttcatagatgaccgaaacatg

SEQ ID NO: 213533 - DNA, 25 bp, SARS Virus
aacttcatagattaccgaaacatga

SEQ ID NO: 213534 - DNA, 25 bp, SARS Virus
acttcatagatgtccgaaacatgag

SEQ ID NO: 213535 - DNA, 25 bp, SARS Virus
cttcatagatgatcgaaacatgagg

SEQ ID NO: 213536 - DNA, 25 bp, SARS Virus
ttcatagatgactgaaacatgaggt

SEQ ID NO: 213537 - DNA, 25 bp, SARS Virus
tcatagatgacctaaacatgaggtt

SEQ ID NO: 213538 - DNA, 25 bp, SARS Virus
catagatgaccgtaacatgaggttt

SEQ ID NO: 213539 - DNA, 25 bp, SARS Virus
atagatgaccgatacatgaggtttc

SEQ ID NO: 213540 - DNA, 25 bp, SARS Virus
tagatgaccgaatcatgaggtttct

SEQ ID NO: 213541 - DNA, 25 bp, SARS Virus
agatgaccgaaatatgaggtttctg

SEQ ID NO: 213542 - DNA, 25 bp, SARS Virus
gatgaccgaaacttgaggtttctgt

SEQ ID NO: 213543 - DNA, 25 bp, SARS Virus
atgaccgaaacatgaggtttctgtt

SEQ ID NO: 213544 - DNA, 25 bp, SARS Virus
tgaccgaaacattaggtttctgttg

SEQ ID NO: 213545 - DNA, 25 bp, SARS Virus
gaccgaaacatgtggtttctgttgc

SEQ ID NO: 213546 - DNA, 25 bp, SARS Virus
accgaaacatgatgtttctgttgca

SEQ ID NO: 213547 - DNA, 25 bp, SARS Virus
ccgaaacatgagttttctgttgcat

SEQ ID NO: 213548 - DNA, 25 bp, SARS Virus
cgaaacatgaggtttctgttgcatt

SEQ ID NO: 213549 - DNA, 25 bp, SARS Virus
gaaacatgaggtttctgttgcattt

SEQ ID NO: 213550 - DNA, 25 bp, SARS Virus
aaacatgaggtttctgttgcatttg

SEQ ID NO: 213551 - DNA, 25 bp, SARS Virus
aacatgaggtttttgttgcatttgt

SEQ ID NO: 213552 - DNA, 25 bp, SARS Virus
acatgaggtttctgttgcatttgtg

SEQ ID NO: 213553 - DNA, 25 bp, SARS Virus
catgaggtttcttttgcatttgtgg

SEQ ID NO: 213554 - DNA, 25 bp, SARS Virus
atgaggtttctgttgcatttgtggt

SEQ ID NO: 213555 - DNA, 25 bp, SARS Virus
tgaggtttctgttgcatttgtggtt

SEQ ID NO: 213556 - DNA, 25 bp, SARS Virus
gaggtttctgtttcatttgtggttc

SEQ ID NO: 213557 - DNA, 25 bp, SARS Virus
aggtttctgttgtatttgtggttca

SEQ ID NO: 213558 - DNA, 25 bp, SARS Virus
ggtttctgttgcttttgtggttcac

SEQ ID NO: 213559 - DNA, 25 bp, SARS Virus
gtttctgttgcatttgtggttcaca

SEQ ID NO: 213560 - DNA, 25 bp, SARS Virus
tttctgttgcatttgtggttcacaa

SEQ ID NO: 213561 - DNA, 25 bp, SARS Virus
ttctgttgcatttgtggttcacaaa

SEQ ID NO: 213562 - DNA, 25 bp, SARS Virus
tctgttgcatttttggttcacaaac

SEQ ID NO: 213563 - DNA, 25 bp, SARS Virus
ctgttgcatttgtggttcacaaacc

SEQ ID NO: 213564 - DNA, 25 bp, SARS Virus
tgttgcatttgttgttcacaaacca

SEQ ID NO: 213565 - DNA, 25 bp, SARS Virus
gttgcatttgtgtttcacaaaccaa

SEQ ID NO: 213566 - DNA, 25 bp, SARS Virus
ttgcatttgtggttcacaaaccaaa

SEQ ID NO: 213567 - DNA, 25 bp, SARS Virus
tgcatttgtggttcacaaaccaaac

SEQ ID NO: 213568 - DNA, 25 bp, SARS Virus
gcatttgtggtttacaaaccaaact

SEQ ID NO: 213569 - DNA, 25 bp, SARS Virus
catttgtggttctcaaaccaaactt

SEQ ID NO: 213570 - DNA, 25 bp, SARS Virus
atttgtggttcataaaccaaacttg

SEQ ID NO: 213571 - DNA, 25 bp, SARS Virus
tttgtggttcactaaccaaacttgc

SEQ ID NO: 213572 - DNA, 25 bp, SARS Virus
ttgtggttcacataccaaacttgca

SEQ ID NO: 213573 - DNA, 25 bp, SARS Virus
tgtggttcacaatccaaacttgcaa

SEQ ID NO: 213574 - DNA, 25 bp, SARS Virus
gtggttcacaaatcaaacttgcaac

SEQ ID NO: 213575 - DNA, 25 bp, SARS Virus
tggttcacaaactaaacttgcaaca

SEQ ID NO: 213576 - DNA, 25 bp, SARS Virus
ggttcacaaacctaacttgcaacag

SEQ ID NO: 213577 - DNA, 25 bp, SARS Virus
gttcacaaaccatacttgcaacaga

SEQ ID NO: 213578 - DNA, 25 bp, SARS Virus
ttcacaaaccaatcttgcaacagaa

SEQ ID NO: 213579 - DNA, 25 bp, SARS Virus
tcacaaaccaaatttgcaacagaac

SEQ ID NO: 213580 - DNA, 25 bp, SARS Virus
cacaaaccaaacttgcaacagaacc

SEQ ID NO: 213581 - DNA, 25 bp, SARS Virus
acaaaccaaacttgcaacagaacca

SEQ ID NO: 213582 - DNA, 25 bp, SARS Virus
caaaccaaactttcaacagaaccaa

SEQ ID NO: 213583 - DNA, 25 bp, SARS Virus
aaaccaaacttgtaacagaaccaac

SEQ ID NO: 213584 - DNA, 25 bp, SARS Virus
aaccaaacttgctacagaaccaaca

SEQ ID NO: 213585 - DNA, 25 bp, SARS Virus
accaaacttgcatcagaaccaacat

SEQ ID NO: 213586 - DNA, 25 bp, SARS Virus
ccaaacttgcaatagaaccaacatc

SEQ ID NO: 213587 - DNA, 25 bp, SARS Virus
caaacttgcaactgaaccaacatcg

SEQ ID NO: 213588 - DNA, 25 bp, SARS Virus
aaacttgcaacataaccaacatcgg

SEQ ID NO: 213589 - DNA, 25 bp, SARS Virus
aacttgcaacagtaccaacatcgga

SEQ ID NO: 213590 - DNA, 25 bp, SARS Virus
acttgcaacagatccaacatcggac

SEQ ID NO: 213591 - DNA, 25 bp, SARS Virus
cttgcaacagaatcaacatcggacc

SEQ ID NO: 213592 - DNA, 25 bp, SARS Virus
ttgcaacagaactaacatcggacca

SEQ ID NO: 213593 - DNA, 25 bp, SARS Virus
tgcaacagaacctacatcggaccaa

SEQ ID NO: 213594 - DNA, 25 bp, SARS Virus
gcaacagaaccatcatcggaccaat

SEQ ID NO: 213595 - DNA, 25 bp, SARS Virus
caacagaaccaatatcggaccaatt

SEQ ID NO: 213596 - DNA, 25 bp, SARS Virus
aacagaaccaacttcggaccaatta

SEQ ID NO: 213597 - DNA, 25 bp, SARS Virus
acagaaccaacatcggaccaattac

SEQ ID NO: 213598 - DNA, 25 bp, SARS Virus
cagaaccaacattggaccaattaca

SEQ ID NO: 213599 - DNA, 25 bp, SARS Virus
agaaccaacatctgaccaattacac

SEQ ID NO: 213600 - DNA, 25 bp, SARS Virus
gaaccaacatcgtaccaattacacg

SEQ ID NO: 213601 - DNA, 25 bp, SARS Virus
aaccaacatcggtccaattacacgg

SEQ ID NO: 213602 - DNA, 25 bp, SARS Virus
accaacatcggatcaattacacggt

SEQ ID NO: 213603 - DNA, 25 bp, SARS Virus
ccaacatcggactaattacacggtt

SEQ ID NO: 213604 - DNA, 25 bp, SARS Virus
caacatcggacctattacacggttt

SEQ ID NO: 213605 - DNA, 25 bp, SARS Virus
aacatcggaccatttacacggtttg

SEQ ID NO: 213606 - DNA, 25 bp, SARS Virus
acatcggaccaattacacggtttgt

SEQ ID NO: 213607 - DNA, 25 bp, SARS Virus
catcggaccaattacacggtttgtt

SEQ ID NO: 213608 - DNA, 25 bp, SARS Virus
atcggaccaatttcacggtttgtta

SEQ ID NO: 213609 - DNA, 25 bp, SARS Virus
tcggaccaattatacggtttgttaa

SEQ ID NO: 213610 - DNA, 25 bp, SARS Virus
cggaccaattactcggtttgttaac

SEQ ID NO: 213611 - DNA, 25 bp, SARS Virus
ggaccaattacatggtttgttaacc

SEQ ID NO: 213612 - DNA, 25 bp, SARS Virus
gaccaattacactgtttgttaaccg

SEQ ID NO: 213613 - DNA, 25 bp, SARS Virus
accaattacacgttttgttaaccga

SEQ ID NO: 213614 - DNA, 25 bp, SARS Virus
ccaattacacggtttgttaaccgaa

SEQ ID NO: 213615 - DNA, 25 bp, SARS Virus
caattacacggtttgttaaccgaat

SEQ ID NO: 213616 - DNA, 25 bp, SARS Virus
aattacacggtttgttaaccgaata

SEQ ID NO: 213617 - DNA, 25 bp, SARS Virus
attacacggttttttaaccgaatac

SEQ ID NO: 213618 - DNA, 25 bp, SARS Virus
ttacacggtttgttaaccgaatacg

SEQ ID NO: 213619 - DNA, 25 bp, SARS Virus
tacacggtttgttaaccgaatacgt

SEQ ID NO: 213620 - DNA, 25 bp, SARS Virus
acacggtttgtttaccgaatacgtc

SEQ ID NO: 213621 - DNA, 25 bp, SARS Virus
cacggtttgttatccgaatacgtca

SEQ ID NO: 213622 - DNA, 25 bp, SARS Virus
acggtttgttaatcgaatacgtcat

SEQ ID NO: 213623 - DNA, 25 bp, SARS Virus
cggtttgttaactgaatacgtcatt

SEQ ID NO: 213624 - DNA, 25 bp, SARS Virus
ggtttgttaacctaatacgtcatta

SEQ ID NO: 213625 - DNA, 25 bp, SARS Virus
gtttgttaaccgtatacgtcattaa

SEQ ID NO: 213626 - DNA, 25 bp, SARS Virus
tttgttaaccgattacgtcattaaa

SEQ ID NO: 213627 - DNA, 25 bp, SARS Virus
ttgttaaccgaatacgtcattaaat

SEQ ID NO: 213628 - DNA, 25 bp, SARS Virus
tgttaaccgaattcgtcattaaatc

SEQ ID NO: 213629 - DNA, 25 bp, SARS Virus
gttaaccgaatatgtcattaaatcg

SEQ ID NO: 213630 - DNA, 25 bp, SARS Virus
ttaaccgaatacttcattaaatcgt

SEQ ID NO: 213631 - DNA, 25 bp, SARS Virus
taaccgaatacgtcattaaatcgtg

SEQ ID NO: 213632 - DNA, 25 bp, SARS Virus
aaccgaatacgttattaaatcgtgg

SEQ ID NO: 213633 - DNA, 25 bp, SARS Virus
accgaatacgtctttaaatcgtgga

SEQ ID NO: 213634 - DNA, 25 bp, SARS Virus
ccgaatacgtcattaaatcgtggaa

SEQ ID NO: 213635 - DNA, 25 bp, SARS Virus
cgaatacgtcattaaatcgtggaaa

SEQ ID NO: 213636 - DNA, 25 bp, SARS Virus
gaatacgtcatttaatcgtggaaag

SEQ ID NO: 213637 - DNA, 25 bp, SARS Virus
aatacgtcattatatcgtggaaaga

SEQ ID NO: 213638 - DNA, 25 bp, SARS Virus
atacgtcattaattcgtggaaagaa

SEQ ID NO: 213639 - DNA, 25 bp, SARS Virus
tacgtcattaaatcgtggaaagaac

SEQ ID NO: 213640 - DNA, 25 bp, SARS Virus
acgtcattaaattgtggaaagaact

SEQ ID NO: 213641 - DNA, 25 bp, SARS Virus
cgtcattaaatcttggaaagaactt

SEQ ID NO: 213642 - DNA, 25 bp, SARS Virus
gtcattaaatcgtggaaagaacttt

SEQ ID NO: 213643 - DNA, 25 bp, SARS Virus
tcattaaatcgttgaaagaactttg

SEQ ID NO: 213644 - DNA, 25 bp, SARS Virus
cattaaatcgtgtaaagaactttga

SEQ ID NO: 213645 - DNA, 25 bp, SARS Virus
attaaatcgtggtaagaactttgag

SEQ ID NO: 213646 - DNA, 25 bp, SARS Virus
ttaaatcgtggatagaactttgagc

SEQ ID NO: 213647 - DNA, 25 bp, SARS Virus
taaatcgtggaatgaactttgagcg

SEQ ID NO: 213648 - DNA, 25 bp, SARS Virus
aaatcgtggaaataactttgagcga

SEQ ID NO: 213649 - DNA, 25 bp, SARS Virus
aatcgtggaaagtactttgagcgac

SEQ ID NO: 213650 - DNA, 25 bp, SARS Virus
atcgtggaaagatctttgagcgact

SEQ ID NO: 213651 - DNA, 25 bp, SARS Virus
tcgtggaaagaattttgagcgactt

SEQ ID NO: 213652 - DNA, 25 bp, SARS Virus
cgtggaaagaactttgagcgactta

SEQ ID NO: 213653 - DNA, 25 bp, SARS Virus
gtggaaagaactttgagcgacttat

SEQ ID NO: 213654 - DNA, 25 bp, SARS Virus
tggaaagaactttgagcgacttatc

SEQ ID NO: 213655 - DNA, 25 bp, SARS Virus
ggaaagaacttttagcgacttatca

SEQ ID NO: 213656 - DNA, 25 bp, SARS Virus
gaaagaactttgtgcgacttatcac

SEQ ID NO: 213657 - DNA, 25 bp, SARS Virus
aaagaactttgatcgacttatcaca

SEQ ID NO: 213658 - DNA, 25 bp, SARS Virus
aagaactttgagtgacttatcacag

SEQ ID NO: 213659 - DNA, 25 bp, SARS Virus
agaactttgagctacttatcacaga

SEQ ID NO: 213660 - DNA, 25 bp, SARS Virus
gaactttgagcgtcttatcacagat

SEQ ID NO: 213661 - DNA, 25 bp, SARS Virus
aactttgagcgatttatcacagata

SEQ ID NO: 213662 - DNA, 25 bp, SARS Virus
actttgagcgacttatcacagatat

SEQ ID NO: 213663 - DNA, 25 bp, SARS Virus
ctttgagcgacttatcacagatatc

SEQ ID NO: 213664 - DNA, 25 bp, SARS Virus
tttgagcgacttttcacagatatca

SEQ ID NO: 213665 - DNA, 25 bp, SARS Virus
ttgagcgacttatcacagatatcag

SEQ ID NO: 213666 - DNA, 25 bp, SARS Virus
tgagcgacttattacagatatcagt

SEQ ID NO: 213667 - DNA, 25 bp, SARS Virus
gagcgacttatctcagatatcagtt

SEQ ID NO: 213668 - DNA, 25 bp, SARS Virus
agcgacttatcatagatatcagtta

SEQ ID NO: 213669 - DNA, 25 bp, SARS Virus
gcgacttatcactgatatcagttat

SEQ ID NO: 213670 - DNA, 25 bp, SARS Virus
cgacttatcacatatatcagttatc

SEQ ID NO: 213671 - DNA, 25 bp, SARS Virus
gacttatcacagttatcagttatcg

SEQ ID NO: 213672 - DNA, 25 bp, SARS Virus
acttatcacagatatcagttatcgg

SEQ ID NO: 213673 - DNA, 25 bp, SARS Virus
cttatcacagatttcagttatcggt

SEQ ID NO: 213674 - DNA, 25 bp, SARS Virus
ttatcacagatatcagttatcggtg

SEQ ID NO: 213675 - DNA, 25 bp, SARS Virus
tatcacagatattagttatcggtga

SEQ ID NO: 213676 - DNA, 25 bp, SARS Virus
atcacagatatctgttatcggtgat

SEQ ID NO: 213677 - DNA, 25 bp, SARS Virus
tcacagatatcatttatcggtgatg

SEQ ID NO: 213678 - DNA, 25 bp, SARS Virus
cacagatatcagttatcggtgatgt

SEQ ID NO: 213679 - DNA, 25 bp, SARS Virus
acagatatcagttatcggtgatgta

SEQ ID NO: 213680 - DNA, 25 bp, SARS Virus
cagatatcagttttcggtgatgtag

SEQ ID NO: 213681 - DNA, 25 bp, SARS Virus
agatatcagttatcggtgatgtagc

SEQ ID NO: 213682 - DNA, 25 bp, SARS Virus
gatatcagttattggtgatgtagcg

SEQ ID NO: 213683 - DNA, 25 bp, SARS Virus
atatcagttatctgtgatgtagcgg

SEQ ID NO: 213684 - DNA, 25 bp, SARS Virus
tatcagttatcgttgatgtagcggt

SEQ ID NO: 213685 - DNA, 25 bp, SARS Virus
atcagttatcggtgatgtagcggta

SEQ ID NO: 213686 - DNA, 25 bp, SARS Virus
tcagttatcggttatgtagcggtaa

SEQ ID NO: 213687 - DNA, 25 bp, SARS Virus
cagttatcggtgttgtagcggtaag

SEQ ID NO: 213688 - DNA, 25 bp, SARS Virus
agttatcggtgatgtagcggtaagt

SEQ ID NO: 213689 - DNA, 25 bp, SARS Virus
gttatcggtgatttagcggtaagtt

SEQ ID NO: 213690 - DNA, 25 bp, SARS Virus
ttatcggtgatgtagcggtaagttc

SEQ ID NO: 213691 - DNA, 25 bp, SARS Virus
tatcggtgatgttgcggtaagttca

SEQ ID NO: 213692 - DNA, 25 bp, SARS Virus
atcggtgatgtatcggtaagttcag

SEQ ID NO: 213693 - DNA, 25 bp, SARS Virus
tcggtgatgtagtggtaagttcaga

SEQ ID NO: 213694 - DNA, 25 bp, SARS Virus
cggtgatgtagctgtaagttcagac

SEQ ID NO: 213695 - DNA, 25 bp, SARS Virus
ggtgatgtagcgttaagttcagacc

SEQ ID NO: 213696 - DNA, 25 bp, SARS Virus
gtgatgtagcggtaagttcagaccc

SEQ ID NO: 213697 - DNA, 25 bp, SARS Virus
tgatgtagcggttagttcagaccct

SEQ ID NO: 213698 - DNA, 25 bp, SARS Virus
gatgtagcggtatgttcagaccctt

SEQ ID NO: 213699 - DNA, 25 bp, SARS Virus
atgtagcggtaatttcagacccttc

SEQ ID NO: 213700 - DNA, 25 bp, SARS Virus
tgtagcggtaagttcagacccttct

SEQ ID NO: 213701 - DNA, 25 bp, SARS Virus
gtagcggtaagttcagacccttctt

SEQ ID NO: 213702 - DNA, 25 bp, SARS Virus
tagcggtaagtttagacccttctta

SEQ ID NO: 213703 - DNA, 25 bp, SARS Virus
agcggtaagttctgacccttcttac

SEQ ID NO: 213704 - DNA, 25 bp, SARS Virus
gcggtaagttcatacccttcttaca

SEQ ID NO: 213705 - DNA, 25 bp, SARS Virus
cggtaagttcagtcccttcttacac

SEQ ID NO: 213706 - DNA, 25 bp, SARS Virus
ggtaagttcagatccttcttacact

SEQ ID NO: 213707 - DNA, 25 bp, SARS Virus
gtaagttcagactcttcttacactg

SEQ ID NO: 213708 - DNA, 25 bp, SARS Virus
taagttcagacctttcttacactgt

SEQ ID NO: 213709 - DNA, 25 bp, SARS Virus
aagttcagacccttcttacactgtc

SEQ ID NO: 213710 - DNA, 25 bp, SARS Virus
agttcagacccttcttacactgtct

SEQ ID NO: 213711 - DNA, 25 bp, SARS Virus
gttcagaccctttttacactgtcta

SEQ ID NO: 213712 - DNA, 25 bp, SARS Virus
ttcagacccttcttacactgtctat

SEQ ID NO: 213713 - DNA, 25 bp, SARS Virus
tcagacccttcttacactgtctatc

SEQ ID NO: 213714 - DNA, 25 bp, SARS Virus
cagacccttctttcactgtctatcg

SEQ ID NO: 213715 - DNA, 25 bp, SARS Virus
agacccttcttatactgtctatcga

SEQ ID NO: 213716 - DNA, 25 bp, SARS Virus
gacccttcttactctgtctatcgag

SEQ ID NO: 213717 - DNA, 25 bp, SARS Virus
acccttcttacattgtctatcgaga

SEQ ID NO: 213718 - DNA, 25 bp, SARS Virus
cccttcttacactgtctatcgagag

SEQ ID NO: 213719 - DNA, 25 bp, SARS Virus
ccttcttacactttctatcgagagc

SEQ ID NO: 213720 - DNA, 25 bp, SARS Virus
cttcttacactgtctatcgagagca

SEQ ID NO: 213721 - DNA, 25 bp, SARS Virus
ttcttacactgtttatcgagagcac

SEQ ID NO: 213722 - DNA, 25 bp, SARS Virus
tcttacactgtctatcgagagcact

SEQ ID NO: 213723 - DNA, 25 bp, SARS Virus
cttacactgtctttcgagagcactt

SEQ ID NO: 213724 - DNA, 25 bp, SARS Virus
ttacactgtctatcgagagcacttc

SEQ ID NO: 213725 - DNA, 25 bp, SARS Virus
tacactgtctattgagagcacttcg

SEQ ID NO: 213726 - DNA, 25 bp, SARS Virus
acactgtctatctagagcacttcga

SEQ ID NO: 213727 - DNA, 25 bp, SARS Virus
cactgtctatcgtgagcacttcgac

SEQ ID NO: 213728 - DNA, 25 bp, SARS Virus
actgtctatcgatagcacttcgacc

SEQ ID NO: 213729 - DNA, 25 bp, SARS Virus
ctgtctatcgagtgcacttcgaccg

SEQ ID NO: 213730 - DNA, 25 bp, SARS Virus
tgtctatcgagatcacttcgaccga

SEQ ID NO: 213731 - DNA, 25 bp, SARS Virus
gtctatcgagagtacttcgaccgaa

SEQ ID NO: 213732 - DNA, 25 bp, SARS Virus
tctatcgagagctcttcgaccgaaa

SEQ ID NO: 213733 - DNA, 25 bp, SARS Virus
ctatcgagagcatttcgaccgaaac

SEQ ID NO: 213734 - DNA, 25 bp, SARS Virus
tatcgagagcacttcgaccgaaaca

SEQ ID NO: 213735 - DNA, 25 bp, SARS Virus
atcgagagcacttcgaccgaaacac

SEQ ID NO: 213736 - DNA, 25 bp, SARS Virus
tcgagagcactttgaccgaaacact

SEQ ID NO: 213737 - DNA, 25 bp, SARS Virus
cgagagcacttctaccgaaacactt

SEQ ID NO: 213738 - DNA, 25 bp, SARS Virus
gagagcacttcgtccgaaacacttc

SEQ ID NO: 213739 - DNA, 25 bp, SARS Virus
agagcacttcgatcgaaacacttcg

SEQ ID NO: 213740 - DNA, 25 bp, SARS Virus
gagcacttcgactgaaacacttcgg

SEQ ID NO: 213741 - DNA, 25 bp, SARS Virus
agcacttcgacctaaacacttcgga

SEQ ID NO: 213742 - DNA, 25 bp, SARS Virus
gcacttcgaccgtaacacttcggac

SEQ ID NO: 213743 - DNA, 25 bp, SARS Virus
cacttcgaccgatacacttcggaca

SEQ ID NO: 213744 - DNA, 25 bp, SARS Virus
acttcgaccgaatcacttcggacag

SEQ ID NO: 213745 - DNA, 25 bp, SARS Virus
cttcgaccgaaatacttcggacagt

SEQ ID NO: 213746 - DNA, 25 bp, SARS Virus
ttcgaccgaaactcttcggacagta

SEQ ID NO: 213747 - DNA, 25 bp, SARS Virus
tcgaccgaaacatttcggacagtaa

SEQ ID NO: 213748 - DNA, 25 bp, SARS Virus
cgaccgaaacacttcggacagtaaa

SEQ ID NO: 213749 - DNA, 25 bp, SARS Virus
gaccgaaacacttcggacagtaaac

SEQ ID NO: 213750 - DNA, 25 bp, SARS Virus
accgaaacactttggacagtaaact

SEQ ID NO: 213751 - DNA, 25 bp, SARS Virus
ccgaaacacttctgacagtaaacta

SEQ ID NO: 213752 - DNA, 25 bp, SARS Virus
cgaaacacttcgtacagtaaactaa

SEQ ID NO: 213753 - DNA, 25 bp, SARS Virus
gaaacacttcggtcagtaaactaaa

SEQ ID NO: 213754 - DNA, 25 bp, SARS Virus
aaacacttcggatagtaaactaaat

SEQ ID NO: 213755 - DNA, 25 bp, SARS Virus
aacacttcggactgtaaactaaatt

SEQ ID NO: 213756 - DNA, 25 bp, SARS Virus
acacttcggacattaaactaaattt

SEQ ID NO: 213757 - DNA, 25 bp, SARS Virus
cacttcggacagtaaactaaattta

SEQ ID NO: 213758 - DNA, 25 bp, SARS Virus
acttcggacagttaactaaatttag

SEQ ID NO: 213759 - DNA, 25 bp, SARS Virus
cttcggacagtatactaaatttagt

SEQ ID NO: 213760 - DNA, 25 bp, SARS Virus
ttcggacagtaatctaaatttagta

SEQ ID NO: 213761 - DNA, 25 bp, SARS Virus
tcggacagtaaattaaatttagtag

SEQ ID NO: 213762 - DNA, 25 bp, SARS Virus
cggacagtaaactaaatttagtagt

SEQ ID NO: 213763 - DNA, 25 bp, SARS Virus
ggacagtaaacttaatttagtagtc

SEQ ID NO: 213764 - DNA, 25 bp, SARS Virus
gacagtaaactatatttagtagtcg

SEQ ID NO: 213765 - DNA, 25 bp, SARS Virus
acagtaaactaattttagtagtcgt

SEQ ID NO: 213766 - DNA, 25 bp, SARS Virus
cagtaaactaaatttagtagtcgtt

SEQ ID NO: 213767 - DNA, 25 bp, SARS Virus
agtaaactaaatttagtagtcgttt

SEQ ID NO: 213768 - DNA, 25 bp, SARS Virus
gtaaactaaatttagtagtcgttta

SEQ ID NO: 213769 - DNA, 25 bp, SARS Virus
taaactaaattttgtagtcgtttaa

SEQ ID NO: 213770 - DNA, 25 bp, SARS Virus
aaactaaatttattagtcgtttaaa

SEQ ID NO: 213771 - DNA, 25 bp, SARS Virus
aactaaatttagtagtcgtttaaaa

SEQ ID NO: 213772 - DNA, 25 bp, SARS Virus
actaaatttagttgtcgtttaaaac

SEQ ID NO: 213773 - DNA, 25 bp, SARS Virus
ctaaatttagtattcgtttaaaaca

SEQ ID NO: 213774 - DNA, 25 bp, SARS Virus
taaatttagtagtcgtttaaaacac

SEQ ID NO: 213775 - DNA, 25 bp, SARS Virus
aaatttagtagttgtttaaaacaca

SEQ ID NO: 213776 - DNA, 25 bp, SARS Virus
aatttagtagtcttttaaaacacaa

SEQ ID NO: 213777 - DNA, 25 bp, SARS Virus
atttagtagtcgattaaaacacaat

SEQ ID NO: 213778 - DNA, 25 bp, SARS Virus
tttagtagtcgtataaaacacaatc

SEQ ID NO: 213779 - DNA, 25 bp, SARS Virus
ttagtagtcgttaaaaacacaatct

SEQ ID NO: 213780 - DNA, 25 bp, SARS Virus
tagtagtcgtttaaaacacaatctt

SEQ ID NO: 213781 - DNA, 25 bp, SARS Virus
agtagtcgtttaaaacacaatcttg

SEQ ID NO: 213782 - DNA, 25 bp, SARS Virus
gtagtcgtttaaaacacaatcttgt

SEQ ID NO: 213783 - DNA, 25 bp, SARS Virus
tagtcgtttaaaacacaatcttgta

SEQ ID NO: 213784 - DNA, 25 bp, SARS Virus
agtcgtttaaaaaacaatcttgtac

SEQ ID NO: 213785 - DNA, 25 bp, SARS Virus
gtcgtttaaaacacaatcttgtaca

SEQ ID NO: 213786 - DNA, 25 bp, SARS Virus
tcgtttaaaacaaaatcttgtacac

SEQ ID NO: 213787 - DNA, 25 bp, SARS Virus
cgtttaaaacacaatcttgtacact

SEQ ID NO: 213788 - DNA, 25 bp, SARS Virus
gtttaaaacacaatcttgtacactc

SEQ ID NO: 213789 - DNA, 25 bp, SARS Virus
tttaaaacacaaacttgtacactca

SEQ ID NO: 213790 - DNA, 25 bp, SARS Virus
ttaaaacacaatattgtacactcaa

SEQ ID NO: 213791 - DNA, 25 bp, SARS Virus
taaaacacaatcatgtacactcaaa

SEQ ID NO: 213792 - DNA, 25 bp, SARS Virus
aaaacacaatctagtacactcaaac

SEQ ID NO: 213793 - DNA, 25 bp, SARS Virus
aaacacaatcttatacactcaaact

SEQ ID NO: 213794 - DNA, 25 bp, SARS Virus
aacacaatcttgaacactcaaactt

SEQ ID NO: 213795 - DNA, 25 bp, SARS Virus
acacaatcttgtacactcaaacttt

SEQ ID NO: 213796 - DNA, 25 bp, SARS Virus
cacaatcttgtaaactcaaacttta

SEQ ID NO: 213797 - DNA, 25 bp, SARS Virus
acaatcttgtacactcaaactttaa

SEQ ID NO: 213798 - DNA, 25 bp, SARS Virus
caatcttgtacaatcaaactttaat

SEQ ID NO: 213799 - DNA, 25 bp, SARS Virus
aatcttgtacacacaaactttaata

SEQ ID NO: 213800 - DNA, 25 bp, SARS Virus
atcttgtacactaaaactttaatag

SEQ ID NO: 213801 - DNA, 25 bp, SARS Virus
tcttgtacactcaaactttaatagt

SEQ ID NO: 213802 - DNA, 25 bp, SARS Virus
cttgtacactcaaactttaatagtt

SEQ ID NO: 213803 - DNA, 25 bp, SARS Virus
ttgtacactcaaactttaatagttt

SEQ ID NO: 213804 - DNA, 25 bp, SARS Virus
tgtacactcaaaatttaatagtttt

SEQ ID NO: 213805 - DNA, 25 bp, SARS Virus
gtacactcaaacattaatagttttg

SEQ ID NO: 213806 - DNA, 25 bp, SARS Virus
tacactcaaactataatagttttga

SEQ ID NO: 213807 - DNA, 25 bp, SARS Virus
acactcaaacttaaatagttttgag

SEQ ID NO: 213808 - DNA, 25 bp, SARS Virus
cactcaaactttaatagttttgagc

SEQ ID NO: 213809 - DNA, 25 bp, SARS Virus
actcaaactttaatagttttgagcg

SEQ ID NO: 213810 - DNA, 25 bp, SARS Virus
ctcaaactttaaaagttttgagcgt

SEQ ID NO: 213811 - DNA, 25 bp, SARS Virus
tcaaactttaatagttttgagcgta

SEQ ID NO: 213812 - DNA, 25 bp, SARS Virus
caaactttaataattttgagcgtaa

SEQ ID NO: 213813 - DNA, 25 bp, SARS Virus
aaactttaatagatttgagcgtaaa

SEQ ID NO: 213814 - DNA, 25 bp, SARS Virus
aactttaatagtattgagcgtaaac

SEQ ID NO: 213815 - DNA, 25 bp, SARS Virus
actttaatagttatgagcgtaaacc

SEQ ID NO: 213816 - DNA, 25 bp, SARS Virus
ctttaatagtttagagcgtaaacca

SEQ ID NO: 213817 - DNA, 25 bp, SARS Virus
tttaatagttttaagcgtaaaccat

SEQ ID NO: 213818 - DNA, 25 bp, SARS Virus
ttaatagttttgagcgtaaaccatt

SEQ ID NO: 213819 - DNA, 25 bp, SARS Virus
taatagttttgaacgtaaaccatta

SEQ ID NO: 213820 - DNA, 25 bp, SARS Virus
aatagttttgagagtaaaccattac

SEQ ID NO: 213821 - DNA, 25 bp, SARS Virus
atagttttgagcataaaccattacc

SEQ ID NO: 213822 - DNA, 25 bp, SARS Virus
tagttttgagcgaaaaccattacca

SEQ ID NO: 213823 - DNA, 25 bp, SARS Virus
agttttgagcgtaaaccattaccaa

SEQ ID NO: 213824 - DNA, 25 bp, SARS Virus
gttttgagcgtaaaccattaccaac

SEQ ID NO: 213825 - DNA, 25 bp, SARS Virus
ttttgagcgtaaaccattaccaact

SEQ ID NO: 213826 - DNA, 25 bp, SARS Virus
tttgagcgtaaaacattaccaactc

SEQ ID NO: 213827 - DNA, 25 bp, SARS Virus
ttgagcgtaaacaattaccaactca

SEQ ID NO: 213828 - DNA, 25 bp, SARS Virus
tgagcgtaaaccattaccaactcaa

SEQ ID NO: 213829 - DNA, 25 bp, SARS Virus
gagcgtaaaccaataccaactcaac

SEQ ID NO: 213830 - DNA, 25 bp, SARS Virus
agcgtaaaccataaccaactcaacc

SEQ ID NO: 213831 - DNA, 25 bp, SARS Virus
gcgtaaaccattaccaactcaacca

SEQ ID NO: 213832 - DNA, 25 bp, SARS Virus
cgtaaaccattaacaactcaaccat

SEQ ID NO: 213833 - DNA, 25 bp, SARS Virus
gtaaaccattacaaactcaaccatg

SEQ ID NO: 213834 - DNA, 25 bp, SARS Virus
taaaccattaccaactcaaccatgt

SEQ ID NO: 213835 - DNA, 25 bp, SARS Virus
aaaccattaccaactcaaccatgtt

SEQ ID NO: 213836 - DNA, 25 bp, SARS Virus
aaccattaccaaatcaaccatgttc

SEQ ID NO: 213837 - DNA, 25 bp, SARS Virus
accattaccaacacaaccatgttcc

SEQ ID NO: 213838 - DNA, 25 bp, SARS Virus
ccattaccaactaaaccatgttcca

SEQ ID NO: 213839 - DNA, 25 bp, SARS Virus
cattaccaactcaaccatgttccag

SEQ ID NO: 213840 - DNA, 25 bp, SARS Virus
attaccaactcaaccatgttccaga

SEQ ID NO: 213841 - DNA, 25 bp, SARS Virus
ttaccaactcaaacatgttccagat

SEQ ID NO: 213842 - DNA, 25 bp, SARS Virus
taccaactcaacaatgttccagata

SEQ ID NO: 213843 - DNA, 25 bp, SARS Virus
accaactcaaccatgttccagatat

SEQ ID NO: 213844 - DNA, 25 bp, SARS Virus
ccaactcaaccaagttccagatatc

SEQ ID NO: 213845 - DNA, 25 bp, SARS Virus
caactcaaccatattccagatatcc

SEQ ID NO: 213846 - DNA, 25 bp, SARS Virus
aactcaaccatgatccagatatccg

SEQ ID NO: 213847 - DNA, 25 bp, SARS Virus
actcaaccatgtaccagatatccga

SEQ ID NO: 213848 - DNA, 25 bp, SARS Virus
ctcaaccatgttacagatatccgac

SEQ ID NO: 213849 - DNA, 25 bp, SARS Virus
tcaaccatgttcaagatatccgacg

SEQ ID NO: 213850 - DNA, 25 bp, SARS Virus
caaccatgttccagatatccgacga

SEQ ID NO: 213851 - DNA, 25 bp, SARS Virus
aaccatgttccaaatatccgacgag

SEQ ID NO: 213852 - DNA, 25 bp, SARS Virus
accatgttccagatatccgacgaga

SEQ ID NO: 213853 - DNA, 25 bp, SARS Virus
ccatgttccagaaatccgacgagac

SEQ ID NO: 213854 - DNA, 25 bp, SARS Virus
catgttccagatatccgacgagaca

SEQ ID NO: 213855 - DNA, 25 bp, SARS Virus
atgttccagataaccgacgagacat

SEQ ID NO: 213856 - DNA, 25 bp, SARS Virus
tgttccagatatacgacgagacata

SEQ ID NO: 213857 - DNA, 25 bp, SARS Virus
gttccagatatcagacgagacatat

SEQ ID NO: 213858 - DNA, 25 bp, SARS Virus
ttccagatatccaacgagacatatc

SEQ ID NO: 213859 - DNA, 25 bp, SARS Virus
tccagatatccgacgagacatatca

SEQ ID NO: 213860 - DNA, 25 bp, SARS Virus
ccagatatccgaagagacatatcat

SEQ ID NO: 213861 - DNA, 25 bp, SARS Virus
cagatatccgacaagacatatcatt

SEQ ID NO: 213862 - DNA, 25 bp, SARS Virus
agatatccgacgagacatatcattc

SEQ ID NO: 213863 - DNA, 25 bp, SARS Virus
gatatccgacgaaacatatcattcg

SEQ ID NO: 213864 - DNA, 25 bp, SARS Virus
atatccgacgagacatatcattcgt

SEQ ID NO: 213865 - DNA, 25 bp, SARS Virus
tatccgacgagaaatatcattcgta

SEQ ID NO: 213866 - DNA, 25 bp, SARS Virus
atccgacgagacatatcattcgtaa

SEQ ID NO: 213867 - DNA, 25 bp, SARS Virus
tccgacgagacaaatcattcgtaat

SEQ ID NO: 213868 - DNA, 25 bp, SARS Virus
ccgacgagacatatcattcgtaata

SEQ ID NO: 213869 - DNA, 25 bp, SARS Virus
cgacgagacataacattcgtaatag

SEQ ID NO: 213870 - DNA, 25 bp, SARS Virus
gacgagacatataattcgtaatagg

SEQ ID NO: 213871 - DNA, 25 bp, SARS Virus
acgagacatatcattcgtaatagga

SEQ ID NO: 213872 - DNA, 25 bp, SARS Virus
cgagacatatcaatcgtaataggaa

SEQ ID NO: 213873 - DNA, 25 bp, SARS Virus
gagacatatcatacgtaataggaaa

SEQ ID NO: 213874 - DNA, 25 bp, SARS Virus
agacatatcattagtaataggaaaa

SEQ ID NO: 213875 - DNA, 25 bp, SARS Virus
gacatatcattcataataggaaaaa

SEQ ID NO: 213876 - DNA, 25 bp, SARS Virus
acatatcattcgaaataggaaaaat

SEQ ID NO: 213877 - DNA, 25 bp, SARS Virus
catatcattcgtaataggaaaaata

SEQ ID NO: 213878 - DNA, 25 bp, SARS Virus
atatcattcgtaataggaaaaatat

SEQ ID NO: 213879 - DNA, 25 bp, SARS Virus
tatcattcgtaaaaggaaaaatatt

SEQ ID NO: 213880 - DNA, 25 bp, SARS Virus
atcattcgtaataggaaaaatatta

SEQ ID NO: 213881 - DNA, 25 bp, SARS Virus
tcattcgtaataagaaaaatattat

SEQ ID NO: 213882 - DNA, 25 bp, SARS Virus
cattcgtaatagaaaaaatattatg

SEQ ID NO: 213883 - DNA, 25 bp, SARS Virus
attcgtaataggaaaaatattatgg

SEQ ID NO: 213884 - DNA, 25 bp, SARS Virus
ttcgtaataggaaaaatattatggg

SEQ ID NO: 213885 - DNA, 25 bp, SARS Virus
tcgtaataggaaaaatattatgggt

SEQ ID NO: 213886 - DNA, 25 bp, SARS Virus
cgtaataggaaaaatattatgggta

SEQ ID NO: 213887 - DNA, 25 bp, SARS Virus
gtaataggaaaaatattatgggtag

SEQ ID NO: 213888 - DNA, 25 bp, SARS Virus
taataggaaaaaaattatgggtagg

SEQ ID NO: 213889 - DNA, 25 bp, SARS Virus
aataggaaaaatattatgggtaggt

SEQ ID NO: 213890 - DNA, 25 bp, SARS Virus
ataggaaaaataatatgggtaggtt

SEQ ID NO: 213891 - DNA, 25 bp, SARS Virus
taggaaaaatataatgggtaggtta

SEQ ID NO: 213892 - DNA, 25 bp, SARS Virus
aggaaaaatattatgggtaggttaa

SEQ ID NO: 213893 - DNA, 25 bp, SARS Virus
ggaaaaatattaagggtaggttaaa

SEQ ID NO: 213894 - DNA, 25 bp, SARS Virus
gaaaaatattataggtaggttaaaa

SEQ ID NO: 213895 - DNA, 25 bp, SARS Virus
aaaaatattatgagtaggttaaaac

SEQ ID NO: 213896 - DNA, 25 bp, SARS Virus
aaaatattatggataggttaaaacc

SEQ ID NO: 213897 - DNA, 25 bp, SARS Virus
aaatattatgggaaggttaaaacca

SEQ ID NO: 213898 - DNA, 25 bp, SARS Virus
aatattatgggtaggttaaaaccaa

SEQ ID NO: 213899 - DNA, 25 bp, SARS Virus
atattatgggtaagttaaaaccaag

SEQ ID NO: 213900 - DNA, 25 bp, SARS Virus
tattatgggtagattaaaaccaagt

SEQ ID NO: 213901 - DNA, 25 bp, SARS Virus
attatgggtaggataaaaccaagtt

SEQ ID NO: 213902 - DNA, 25 bp, SARS Virus
ttatgggtaggtaaaaaccaagtta

SEQ ID NO: 213903 - DNA, 25 bp, SARS Virus
tatgggtaggttaaaaccaagttag

SEQ ID NO: 213904 - DNA, 25 bp, SARS Virus
atgggtaggttaaaaccaagttaga

SEQ ID NO: 213905 - DNA, 25 bp, SARS Virus
tgggtaggttaaaaccaagttagag

SEQ ID NO: 213906 - DNA, 25 bp, SARS Virus
gggtaggttaaaaccaagttagaga

SEQ ID NO: 213907 - DNA, 25 bp, SARS Virus
ggtaggttaaaaacaagttagagac

SEQ ID NO: 213908 - DNA, 25 bp, SARS Virus
gtaggttaaaacaaagttagagaca

SEQ ID NO: 213909 - DNA, 25 bp, SARS Virus
taggttaaaaccaagttagagacac

SEQ ID NO: 213910 - DNA, 25 bp, SARS Virus
aggttaaaaccaagttagagacaca

SEQ ID NO: 213911 - DNA, 25 bp, SARS Virus
ggttaaaaccaaattagagacacat

SEQ ID NO: 213912 - DNA, 25 bp, SARS Virus
gttaaaaccaagatagagacacatt

SEQ ID NO: 213913 - DNA, 25 bp, SARS Virus
ttaaaaccaagtaagagacacattc

SEQ ID NO: 213914 - DNA, 25 bp, SARS Virus
taaaaccaagttagagacacattca

SEQ ID NO: 213915 - DNA, 25 bp, SARS Virus
aaaaccaagttaaagacacattcat

SEQ ID NO: 213916 - DNA, 25 bp, SARS Virus
aaaccaagttagagacacattcatt

SEQ ID NO: 213917 - DNA, 25 bp, SARS Virus
aaccaagttagaaacacattcattg

SEQ ID NO: 213918 - DNA, 25 bp, SARS Virus
accaagttagagacacattcattga

SEQ ID NO: 213919 - DNA, 25 bp, SARS Virus
ccaagttagagaaacattcattgag

SEQ ID NO: 213920 - DNA, 25 bp, SARS Virus
caagttagagacacattcattgagg

SEQ ID NO: 213921 - DNA, 25 bp, SARS Virus
aagttagagacaaattcattgaggt

SEQ ID NO: 213922 - DNA, 25 bp, SARS Virus
agttagagacacattcattgaggta

SEQ ID NO: 213923 - DNA, 25 bp, SARS Virus
gttagagacacaatcattgaggtag

SEQ ID NO: 213924 - DNA, 25 bp, SARS Virus
ttagagacacatacattgaggtagc

SEQ ID NO: 213925 - DNA, 25 bp, SARS Virus
tagagacacattaattgaggtagct

SEQ ID NO: 213926 - DNA, 25 bp, SARS Virus
agagacacattcattgaggtagctc

SEQ ID NO: 213927 - DNA, 25 bp, SARS Virus
gagacacattcaatgaggtagctca

SEQ ID NO: 213928 - DNA, 25 bp, SARS Virus
agacacattcatagaggtagctcaa

SEQ ID NO: 213929 - DNA, 25 bp, SARS Virus
gacacattcattaaggtagctcaaa

SEQ ID NO: 213930 - DNA, 25 bp, SARS Virus
acacattcattgaggtagctcaaat

SEQ ID NO: 213931 - DNA, 25 bp, SARS Virus
cacattcattgaagtagctcaaata

SEQ ID NO: 213932 - DNA, 25 bp, SARS Virus
acattcattgagatagctcaaatat

SEQ ID NO: 213933 - DNA, 25 bp, SARS Virus
cattcattgaggaagctcaaatatg

SEQ ID NO: 213934 - DNA, 25 bp, SARS Virus
attcattgaggtagctcaaatatgc

SEQ ID NO: 213935 - DNA, 25 bp, SARS Virus
ttcattgaggtaactcaaatatgct

SEQ ID NO: 213936 - DNA, 25 bp, SARS Virus
tcattgaggtagatcaaatatgctg

SEQ ID NO: 213937 - DNA, 25 bp, SARS Virus
cattgaggtagcacaaatatgctgt

SEQ ID NO: 213938 - DNA, 25 bp, SARS Virus
attgaggtagctaaaatatgctgtg

SEQ ID NO: 213939 - DNA, 25 bp, SARS Virus
ttgaggtagctcaaatatgctgtgt

SEQ ID NO: 213940 - DNA, 25 bp, SARS Virus
tgaggtagctcaaatatgctgtgtc

SEQ ID NO: 213941 - DNA, 25 bp, SARS Virus
gaggtagctcaaatatgctgtgtcc

SEQ ID NO: 213942 - DNA, 25 bp, SARS Virus
aggtagctcaaaaatgctgtgtccg

SEQ ID NO: 213943 - DNA, 25 bp, SARS Virus
ggtagctcaaatatgctgtgtccga

SEQ ID NO: 213944 - DNA, 25 bp, SARS Virus
gtagctcaaataagctgtgtccgaa

SEQ ID NO: 213945 - DNA, 25 bp, SARS Virus
tagctcaaatatactgtgtccgaac

SEQ ID NO: 213946 - DNA, 25 bp, SARS Virus
agctcaaatatgatgtgtccgaact

SEQ ID NO: 213947 - DNA, 25 bp, SARS Virus
gctcaaatatgcagtgtccgaacta

SEQ ID NO: 213948 - DNA, 25 bp, SARS Virus
ctcaaatatgctatgtccgaactac

SEQ ID NO: 213949 - DNA, 25 bp, SARS Virus
tcaaatatgctgagtccgaactacc

SEQ ID NO: 213950 - DNA, 25 bp, SARS Virus
caaatatgctgtatccgaactacca

SEQ ID NO: 213951 - DNA, 25 bp, SARS Virus
aaatatgctgtgaccgaactaccaa

SEQ ID NO: 213952 - DNA, 25 bp, SARS Virus
aatatgctgtgtacgaactaccaac

SEQ ID NO: 213953 - DNA, 25 bp, SARS Virus
atatgctgtgtcagaactaccaaca

SEQ ID NO: 213954 - DNA, 25 bp, SARS Virus
tatgctgtgtccaaactaccaacat

SEQ ID NO: 213955 - DNA, 25 bp, SARS Virus
atgctgtgtccgaactaccaacatc

SEQ ID NO: 213956 - DNA, 25 bp, SARS Virus
tgctgtgtccgaactaccaacatca

SEQ ID NO: 213957 - DNA, 25 bp, SARS Virus
gctgtgtccgaaataccaacatcac

SEQ ID NO: 213958 - DNA, 25 bp, SARS Virus
ctgtgtccgaacaaccaacatcaca

SEQ ID NO: 213959 - DNA, 25 bp, SARS Virus
tgtgtccgaactaccaacatcacat

SEQ ID NO: 213960 - DNA, 25 bp, SARS Virus
gtgtccgaactaacaacatcacatt

SEQ ID NO: 213961 - DNA, 25 bp, SARS Virus
tgtccgaactacaaacatcacattc

SEQ ID NO: 213962 - DNA, 25 bp, SARS Virus
gtccgaactaccaacatcacattct

SEQ ID NO: 213963 - DNA, 25 bp, SARS Virus
tccgaactaccaacatcacattcta

SEQ ID NO: 213964 - DNA, 25 bp, SARS Virus
ccgaactaccaaaatcacattctac

SEQ ID NO: 213965 - DNA, 25 bp, SARS Virus
cgaactaccaacatcacattctaca

SEQ ID NO: 213966 - DNA, 25 bp, SARS Virus
gaactaccaacaacacattctacaa

SEQ ID NO: 213967 - DNA, 25 bp, SARS Virus
aactaccaacataacattctacaaa

SEQ ID NO: 213968 - DNA, 25 bp, SARS Virus
actaccaacatcacattctacaaag

SEQ ID NO: 213969 - DNA, 25 bp, SARS Virus
ctaccaacatcaaattctacaaagg

SEQ ID NO: 213970 - DNA, 25 bp, SARS Virus
taccaacatcacattctacaaagga

SEQ ID NO: 213971 - DNA, 25 bp, SARS Virus
accaacatcacaatctacaaaggaa

SEQ ID NO: 213972 - DNA, 25 bp, SARS Virus
ccaacatcacatactacaaaggaac

SEQ ID NO: 213973 - DNA, 25 bp, SARS Virus
caacatcacattatacaaaggaaca

SEQ ID NO: 213974 - DNA, 25 bp, SARS Virus
aacatcacattcaacaaaggaacat

SEQ ID NO: 213975 - DNA, 25 bp, SARS Virus
acatcacattctacaaaggaacatc

SEQ ID NO: 213976 - DNA, 25 bp, SARS Virus
catcacattctaaaaaggaacatct

SEQ ID NO: 213977 - DNA, 25 bp, SARS Virus
atcacattctacaaaggaacatctt

SEQ ID NO: 213978 - DNA, 25 bp, SARS Virus
tcacattctacaaaggaacatcttt

SEQ ID NO: 213979 - DNA, 25 bp, SARS Virus
cacattctacaaaggaacatctttt

SEQ ID NO: 213980 - DNA, 25 bp, SARS Virus
acattctacaaaagaacatcttttg

SEQ ID NO: 213981 - DNA, 25 bp, SARS Virus
cattctacaaagaaacatcttttgt

SEQ ID NO: 213982 - DNA, 25 bp, SARS Virus
attctacaaaggaacatcttttgta

SEQ ID NO: 213983 - DNA, 25 bp, SARS Virus
ttctacaaaggaacatcttttgtag

SEQ ID NO: 213984 - DNA, 25 bp, SARS Virus
tctacaaaggaaaatcttttgtagt

SEQ ID NO: 213985 - DNA, 25 bp, SARS Virus
ctacaaaggaacatcttttgtagtc

SEQ ID NO: 213986 - DNA, 25 bp, SARS Virus
tacaaaggaacaacttttgtagtca

SEQ ID NO: 213987 - DNA, 25 bp, SARS Virus
acaaaggaacatattttgtagtcag

SEQ ID NO: 213988 - DNA, 25 bp, SARS Virus
caaaggaacatcatttgtagtcagt

SEQ ID NO: 213989 - DNA, 25 bp, SARS Virus
aaaggaacatctattgtagtcagtg

SEQ ID NO: 213990 - DNA, 25 bp, SARS Virus
aaggaacatcttatgtagtcagtga

SEQ ID NO: 213991 - DNA, 25 bp, SARS Virus
aggaacatctttagtagtcagtgac

SEQ ID NO: 213992 - DNA, 25 bp, SARS Virus
ggaacatcttttatagtcagtgacc

SEQ ID NO: 213993 - DNA, 25 bp, SARS Virus
gaacatcttttgaagtcagtgacca

SEQ ID NO: 213994 - DNA, 25 bp, SARS Virus
aacatcttttgtagtcagtgaccag

SEQ ID NO: 213995 - DNA, 25 bp, SARS Virus
acatcttttgtaatcagtgaccagg

SEQ ID NO: 213996 - DNA, 25 bp, SARS Virus
catcttttgtagacagtgaccagga

SEQ ID NO: 213997 - DNA, 25 bp, SARS Virus
atcttttgtagtaagtgaccaggaa

SEQ ID NO: 213998 - DNA, 25 bp, SARS Virus
tcttttgtagtcagtgaccaggaaa

SEQ ID NO: 213999 - DNA, 25 bp, SARS Virus
cttttgtagtcaatgaccaggaaac

SEQ ID NO: 214000 - DNA, 25 bp, SARS Virus
ttttgtagtcagagaccaggaaaca

SEQ ID NO: 214001 - DNA, 25 bp, SARS Virus
tttgtagtcagtaaccaggaaacat

SEQ ID NO: 214002 - DNA, 25 bp, SARS Virus
ttgtagtcagtgaccaggaaacatg

SEQ ID NO: 214003 - DNA, 25 bp, SARS Virus
tgtagtcagtgaacaggaaacatga

SEQ ID NO: 214004 - DNA, 25 bp, SARS Virus
gtagtcagtgacaaggaaacatgag

SEQ ID NO: 214005 - DNA, 25 bp, SARS Virus
tagtcagtgaccaggaaacatgaga

SEQ ID NO: 214006 - DNA, 25 bp, SARS Virus
agtcagtgaccaagaaacatgagac

SEQ ID NO: 214007 - DNA, 25 bp, SARS Virus
gtcagtgaccagaaaacatgagact

SEQ ID NO: 214008 - DNA, 25 bp, SARS Virus
tcagtgaccaggaaacatgagactg

SEQ ID NO: 214009 - DNA, 25 bp, SARS Virus
cagtgaccaggaaacatgagactgt

SEQ ID NO: 214010 - DNA, 25 bp, SARS Virus
agtgaccaggaaacatgagactgta

SEQ ID NO: 214011 - DNA, 25 bp, SARS Virus
gtgaccaggaaaaatgagactgtag

SEQ ID NO: 214012 - DNA, 25 bp, SARS Virus
tgaccaggaaacatgagactgtaga

SEQ ID NO: 214013 - DNA, 25 bp, SARS Virus
gaccaggaaacaagagactgtagaa

SEQ ID NO: 214014 - DNA, 25 bp, SARS Virus
accaggaaacataagactgtagaaa

SEQ ID NO: 214015 - DNA, 25 bp, SARS Virus
ccaggaaacatgagactgtagaaac

SEQ ID NO: 214016 - DNA, 25 bp, SARS Virus
caggaaacatgaaactgtagaaaca

SEQ ID NO: 214017 - DNA, 25 bp, SARS Virus
aggaaacatgagactgtagaaacat

SEQ ID NO: 214018 - DNA, 25 bp, SARS Virus
ggaaacatgagaatgtagaaacatt

SEQ ID NO: 214019 - DNA, 25 bp, SARS Virus
gaaacatgagacagtagaaacattc

SEQ ID NO: 214020 - DNA, 25 bp, SARS Virus
aaacatgagactatagaaacattcc

SEQ ID NO: 214021 - DNA, 25 bp, SARS Virus
aacatgagactgaagaaacattcca

SEQ ID NO: 214022 - DNA, 25 bp, SARS Virus
acatgagactgtagaaacattccac

SEQ ID NO: 214023 - DNA, 25 bp, SARS Virus
catgagactgtaaaaacattccact

SEQ ID NO: 214024 - DNA, 25 bp, SARS Virus
atgagactgtagaaacattccactc

SEQ ID NO: 214025 - DNA, 25 bp, SARS Virus
tgagactgtagaaacattccactcg

SEQ ID NO: 214026 - DNA, 25 bp, SARS Virus
gagactgtagaaacattccactcga

SEQ ID NO: 214027 - DNA, 25 bp, SARS Virus
agactgtagaaaaattccactcgag

SEQ ID NO: 214028 - DNA, 25 bp, SARS Virus
gactgtagaaacattccactcgagg

SEQ ID NO: 214029 - DNA, 25 bp, SARS Virus
actgtagaaacaatccactcgaggc

SEQ ID NO: 214030 - DNA, 25 bp, SARS Virus
ctgtagaaacataccactcgaggca

SEQ ID NO: 214031 - DNA, 25 bp, SARS Virus
tgtagaaacattacactcgaggcag

SEQ ID NO: 214032 - DNA, 25 bp, SARS Virus
gtagaaacattcaactcgaggcagt

SEQ ID NO: 214033 - DNA, 25 bp, SARS Virus
tagaaacattccactcgaggcagtt

SEQ ID NO: 214034 - DNA, 25 bp, SARS Virus
agaaacattccaatcgaggcagtta

SEQ ID NO: 214035 - DNA, 25 bp, SARS Virus
gaaacattccacacgaggcagttat

SEQ ID NO: 214036 - DNA, 25 bp, SARS Virus
aaacattccactagaggcagttatg

SEQ ID NO: 214037 - DNA, 25 bp, SARS Virus
aacattccactcaaggcagttatgc

SEQ ID NO: 214038 - DNA, 25 bp, SARS Virus
acattccactcgaggcagttatgct

SEQ ID NO: 214039 - DNA, 25 bp, SARS Virus
cattccactcgaagcagttatgcta

SEQ ID NO: 214040 - DNA, 25 bp, SARS Virus
attccactcgagacagttatgctat

SEQ ID NO: 214041 - DNA, 25 bp, SARS Virus
ttccactcgaggaagttatgctatc

SEQ ID NO: 214042 - DNA, 25 bp, SARS Virus
tccactcgaggcagttatgctatct

SEQ ID NO: 214043 - DNA, 25 bp, SARS Virus
ccactcgaggcaattatgctatctc

SEQ ID NO: 214044 - DNA, 25 bp, SARS Virus
cactcgaggcagatatgctatctcc

SEQ ID NO: 214045 - DNA, 25 bp, SARS Virus
actcgaggcagtaatgctatctccc

SEQ ID NO: 214046 - DNA, 25 bp, SARS Virus
ctcgaggcagttatgctatctccca

SEQ ID NO: 214047 - DNA, 25 bp, SARS Virus
tcgaggcagttaagctatctcccag

SEQ ID NO: 214048 - DNA, 25 bp, SARS Virus
cgaggcagttatactatctcccaga

SEQ ID NO: 214049 - DNA, 25 bp, SARS Virus
gaggcagttatgatatctcccagag

SEQ ID NO: 214050 - DNA, 25 bp, SARS Virus
aggcagttatgcaatctcccagagg

SEQ ID NO: 214051 - DNA, 25 bp, SARS Virus
ggcagttatgctatctcccagagga

SEQ ID NO: 214052 - DNA, 25 bp, SARS Virus
gcagttatgctaactcccagaggaa

SEQ ID NO: 214053 - DNA, 25 bp, SARS Virus
cagttatgctatatcccagaggaat

SEQ ID NO: 214054 - DNA, 25 bp, SARS Virus
agttatgctatcacccagaggaatc

SEQ ID NO: 214055 - DNA, 25 bp, SARS Virus
gttatgctatctaccagaggaatcg

SEQ ID NO: 214056 - DNA, 25 bp, SARS Virus
ttatgctatctcacagaggaatcgt

SEQ ID NO: 214057 - DNA, 25 bp, SARS Virus
tatgctatctccaagaggaatcgtc

SEQ ID NO: 214058 - DNA, 25 bp, SARS Virus
atgctatctcccagaggaatcgtca

SEQ ID NO: 214059 - DNA, 25 bp, SARS Virus
tgctatctcccaaaggaatcgtcaa

SEQ ID NO: 214060 - DNA, 25 bp, SARS Virus
gctatctcccagaggaatcgtcaat

SEQ ID NO: 214061 - DNA, 25 bp, SARS Virus
ctatctcccagaagaatcgtcaata

SEQ ID NO: 214062 - DNA, 25 bp, SARS Virus
tatctcccagagaaatcgtcaatat

SEQ ID NO: 214063 - DNA, 25 bp, SARS Virus
atctcccagaggaatcgtcaatata

SEQ ID NO: 214064 - DNA, 25 bp, SARS Virus
tctcccagaggaatcgtcaatatac

SEQ ID NO: 214065 - DNA, 25 bp, SARS Virus
ctcccagaggaaacgtcaatatact

SEQ ID NO: 214066 - DNA, 25 bp, SARS Virus
tcccagaggaatagtcaatatactc

SEQ ID NO: 214067 - DNA, 25 bp, SARS Virus
cccagaggaatcatcaatatactca

SEQ ID NO: 214068 - DNA, 25 bp, SARS Virus
ccagaggaatcgacaatatactcac

SEQ ID NO: 214069 - DNA, 25 bp, SARS Virus
cagaggaatcgtaaatatactcaca

SEQ ID NO: 214070 - DNA, 25 bp, SARS Virus
agaggaatcgtcaatatactcacat

SEQ ID NO: 214071 - DNA, 25 bp, SARS Virus
gaggaatcgtcaatatactcacatt

SEQ ID NO: 214072 - DNA, 25 bp, SARS Virus
aggaatcgtcaaaatactcacatta

SEQ ID NO: 214073 - DNA, 25 bp, SARS Virus
ggaatcgtcaatatactcacattac

SEQ ID NO: 214074 - DNA, 25 bp, SARS Virus
gaatcgtcaataaactcacattact

SEQ ID NO: 214075 - DNA, 25 bp, SARS Virus
aatcgtcaatatactcacattactg

SEQ ID NO: 214076 - DNA, 25 bp, SARS Virus
atcgtcaatataatcacattactgg

SEQ ID NO: 214077 - DNA, 25 bp, SARS Virus
tcgtcaatatacacacattactggt

SEQ ID NO: 214078 - DNA, 25 bp, SARS Virus
cgtcaatatactaacattactggtg

SEQ ID NO: 214079 - DNA, 25 bp, SARS Virus
gtcaatatactcacattactggtgt

SEQ ID NO: 214080 - DNA, 25 bp, SARS Virus
tcaatatactcaaattactggtgtg

SEQ ID NO: 214081 - DNA, 25 bp, SARS Virus
caatatactcacattactggtgtga

SEQ ID NO: 214082 - DNA, 25 bp, SARS Virus
aatatactcacaatactggtgtgac

SEQ ID NO: 214083 - DNA, 25 bp, SARS Virus
atatactcacataactggtgtgact

SEQ ID NO: 214084 - DNA, 25 bp, SARS Virus
tatactcacattactggtgtgacta

SEQ ID NO: 214085 - DNA, 25 bp, SARS Virus
atactcacattaatggtgtgactat

SEQ ID NO: 214086 - DNA, 25 bp, SARS Virus
tactcacattacaggtgtgactatc

SEQ ID NO: 214087 - DNA, 25 bp, SARS Virus
actcacattactagtgtgactatca

SEQ ID NO: 214088 - DNA, 25 bp, SARS Virus
ctcacattactgatgtgactatcaa

SEQ ID NO: 214089 - DNA, 25 bp, SARS Virus
tcacattactggagtgactatcaat

SEQ ID NO: 214090 - DNA, 25 bp, SARS Virus
cacattactggtatgactatcaatg

SEQ ID NO: 214091 - DNA, 25 bp, SARS Virus
acattactggtgagactatcaatgg

SEQ ID NO: 214092 - DNA, 25 bp, SARS Virus
cattactggtgtaactatcaatggt

SEQ ID NO: 214093 - DNA, 25 bp, SARS Virus
attactggtgtgactatcaatggtc

SEQ ID NO: 214094 - DNA, 25 bp, SARS Virus
ttactggtgtgaatatcaatggtca

SEQ ID NO: 214095 - DNA, 25 bp, SARS Virus
tactggtgtgacaatcaatggtcac

SEQ ID NO: 214096 - DNA, 25 bp, SARS Virus
actggtgtgactatcaatggtcaca

SEQ ID NO: 214097 - DNA, 25 bp, SARS Virus
ctggtgtgactaacaatggtcacat

SEQ ID NO: 214098 - DNA, 25 bp, SARS Virus
tggtgtgactataaatggtcacatg

SEQ ID NO: 214099 - DNA, 25 bp, SARS Virus
ggtgtgactatcaatggtcacatga

SEQ ID NO: 214100 - DNA, 25 bp, SARS Virus
gtgtgactatcaatggtcacatgag

SEQ ID NO: 214101 - DNA, 25 bp, SARS Virus
tgtgactatcaaaggtcacatgagt

SEQ ID NO: 214102 - DNA, 25 bp, SARS Virus
gtgactatcaatagtcacatgagta

SEQ ID NO: 214103 - DNA, 25 bp, SARS Virus
tgactatcaatgatcacatgagtaa

SEQ ID NO: 214104 - DNA, 25 bp, SARS Virus
gactatcaatggacacatgagtaag

SEQ ID NO: 214105 - DNA, 25 bp, SARS Virus
actatcaatggtaacatgagtaagc

SEQ ID NO: 214106 - DNA, 25 bp, SARS Virus
ctatcaatggtcacatgagtaagcg

SEQ ID NO: 214107 - DNA, 25 bp, SARS Virus
tatcaatggtcaaatgagtaagcgt

SEQ ID NO: 214108 - DNA, 25 bp, SARS Virus
atcaatggtcacatgagtaagcgtg

SEQ ID NO: 214109 - DNA, 25 bp, SARS Virus
tcaatggtcacaagagtaagcgtgt

SEQ ID NO: 214110 - DNA, 25 bp, SARS Virus
caatggtcacataagtaagcgtgta

SEQ ID NO: 214111 - DNA, 25 bp, SARS Virus
aatggtcacatgagtaagcgtgtat

SEQ ID NO: 214112 - DNA, 25 bp, SARS Virus
atggtcacatgaataagcgtgtatt

SEQ ID NO: 214113 - DNA, 25 bp, SARS Virus
tggtcacatgagaaagcgtgtattc

SEQ ID NO: 214114 - DNA, 25 bp, SARS Virus
ggtcacatgagtaagcgtgtattct

SEQ ID NO: 214115 - DNA, 25 bp, SARS Virus
gtcacatgagtaagcgtgtattctt

SEQ ID NO: 214116 - DNA, 25 bp, SARS Virus
tcacatgagtaaacgtgtattctta

SEQ ID NO: 214117 - DNA, 25 bp, SARS Virus
cacatgagtaagagtgtattcttac

SEQ ID NO: 214118 - DNA, 25 bp, SARS Virus
acatgagtaagcatgtattcttaca

SEQ ID NO: 214119 - DNA, 25 bp, SARS Virus
catgagtaagcgagtattcttacat

SEQ ID NO: 214120 - DNA, 25 bp, SARS Virus
atgagtaagcgtatattcttacatg

SEQ ID NO: 214121 - DNA, 25 bp, SARS Virus
tgagtaagcgtgaattcttacatgg

SEQ ID NO: 214122 - DNA, 25 bp, SARS Virus
gagtaagcgtgtattcttacatgga

SEQ ID NO: 214123 - DNA, 25 bp, SARS Virus
agtaagcgtgtaatcttacatggaa

SEQ ID NO: 214124 - DNA, 25 bp, SARS Virus
gtaagcgtgtatacttacatggaac

SEQ ID NO: 214125 - DNA, 25 bp, SARS Virus
taagcgtgtattattacatggaacg

SEQ ID NO: 214126 - DNA, 25 bp, SARS Virus
aagcgtgtattcatacatggaacga

SEQ ID NO: 214127 - DNA, 25 bp, SARS Virus
agcgtgtattctaacatggaacgac

SEQ ID NO: 214128 - DNA, 25 bp, SARS Virus
gcgtgtattcttacatggaacgaca

SEQ ID NO: 214129 - DNA, 25 bp, SARS Virus
cgtgtattcttaaatggaacgacat

SEQ ID NO: 214130 - DNA, 25 bp, SARS Virus
gtgtattcttacatggaacgacatt

SEQ ID NO: 214131 - DNA, 25 bp, SARS Virus
tgtattcttacaaggaacgacatta

SEQ ID NO: 214132 - DNA, 25 bp, SARS Virus
gtattcttacatagaacgacattaa

SEQ ID NO: 214133 - DNA, 25 bp, SARS Virus
tattcttacatgaaacgacattaaa

SEQ ID NO: 214134 - DNA, 25 bp, SARS Virus
attcttacatggaacgacattaaat

SEQ ID NO: 214135 - DNA, 25 bp, SARS Virus
ttcttacatggaacgacattaaata

SEQ ID NO: 214136 - DNA, 25 bp, SARS Virus
tcttacatggaaagacattaaatat

SEQ ID NO: 214137 - DNA, 25 bp, SARS Virus
cttacatggaacaacattaaatatg

SEQ ID NO: 214138 - DNA, 25 bp, SARS Virus
ttacatggaacgacattaaatatga

SEQ ID NO: 214139 - DNA, 25 bp, SARS Virus
tacatggaacgaaattaaatatgag

SEQ ID NO: 214140 - DNA, 25 bp, SARS Virus
acatggaacgacattaaatatgagt

SEQ ID NO: 214141 - DNA, 25 bp, SARS Virus
catggaacgacaataaatatgagtc

SEQ ID NO: 214142 - DNA, 25 bp, SARS Virus
atggaacgacataaaatatgagtcg

SEQ ID NO: 214143 - DNA, 25 bp, SARS Virus
tggaacgacattaaatatgagtcgt

SEQ ID NO: 214144 - DNA, 25 bp, SARS Virus
ggaacgacattaaatatgagtcgtc

SEQ ID NO: 214145 - DNA, 25 bp, SARS Virus
gaacgacattaaatatgagtcgtcc

SEQ ID NO: 214146 - DNA, 25 bp, SARS Virus
aacgacattaaaaatgagtcgtcca

SEQ ID NO: 214147 - DNA, 25 bp, SARS Virus
acgacattaaatatgagtcgtccac

SEQ ID NO: 214148 - DNA, 25 bp, SARS Virus
cgacattaaataagagtcgtccacc

SEQ ID NO: 214149 - DNA, 25 bp, SARS Virus
gacattaaatataagtcgtccacca

SEQ ID NO: 214150 - DNA, 25 bp, SARS Virus
acattaaatatgagtcgtccaccac

SEQ ID NO: 214151 - DNA, 25 bp, SARS Virus
cattaaatatgaatcgtccaccacg

SEQ ID NO: 214152 - DNA, 25 bp, SARS Virus
attaaatatgagacgtccaccacgt

SEQ ID NO: 214153 - DNA, 25 bp, SARS Virus
ttaaatatgagtagtccaccacgtc

SEQ ID NO: 214154 - DNA, 25 bp, SARS Virus
taaatatgagtcatccaccacgtct

SEQ ID NO: 214155 - DNA, 25 bp, SARS Virus
aaatatgagtcgaccaccacgtctg

SEQ ID NO: 214156 - DNA, 25 bp, SARS Virus
aatatgagtcgtacaccacgtctgt

SEQ ID NO: 214157 - DNA, 25 bp, SARS Virus
atatgagtcgtcaaccacgtctgta

SEQ ID NO: 214158 - DNA, 25 bp, SARS Virus
tatgagtcgtccaccacgtctgtag

SEQ ID NO: 214159 - DNA, 25 bp, SARS Virus
atgagtcgtccaacacgtctgtagt

SEQ ID NO: 214160 - DNA, 25 bp, SARS Virus
tgagtcgtccacaacgtctgtagta

SEQ ID NO: 214161 - DNA, 25 bp, SARS Virus
gagtcgtccaccacgtctgtagtat

SEQ ID NO: 214162 - DNA, 25 bp, SARS Virus
agtcgtccaccaagtctgtagtatt

SEQ ID NO: 214163 - DNA, 25 bp, SARS Virus
gtcgtccaccacatctgtagtattg

SEQ ID NO: 214164 - DNA, 25 bp, SARS Virus
tcgtccaccacgactgtagtattgt

SEQ ID NO: 214165 - DNA, 25 bp, SARS Virus
cgtccaccacgtatgtagtattgtt

SEQ ID NO: 214166 - DNA, 25 bp, SARS Virus
gtccaccacgtcagtagtattgttt

SEQ ID NO: 214167 - DNA, 25 bp, SARS Virus
tccaccacgtctatagtattgtttt

SEQ ID NO: 214168 - DNA, 25 bp, SARS Virus
ccaccacgtctgaagtattgttttc

SEQ ID NO: 214169 - DNA, 25 bp, SARS Virus
caccacgtctgtagtattgttttct

SEQ ID NO: 214170 - DNA, 25 bp, SARS Virus
accacgtctgtaatattgttttctt

SEQ ID NO: 214171 - DNA, 25 bp, SARS Virus
ccacgtctgtagaattgttttcttc

SEQ ID NO: 214172 - DNA, 25 bp, SARS Virus
cacgtctgtagtattgttttcttct

SEQ ID NO: 214173 - DNA, 25 bp, SARS Virus
acgtctgtagtaatgttttcttctg

SEQ ID NO: 214174 - DNA, 25 bp, SARS Virus
cgtctgtagtatagttttcttctga

SEQ ID NO: 214175 - DNA, 25 bp, SARS Virus
gtctgtagtattattttcttctgag

SEQ ID NO: 214176 - DNA, 25 bp, SARS Virus
tctgtagtattgatttcttctgaga

SEQ ID NO: 214177 - DNA, 25 bp, SARS Virus
ctgtagtattgtattcttctgagaa

SEQ ID NO: 214178 - DNA, 25 bp, SARS Virus
tgtagtattgttatcttctgagaac

SEQ ID NO: 214179 - DNA, 25 bp, SARS Virus
gtagtattgtttacttctgagaaca

SEQ ID NO: 214180 - DNA, 25 bp, SARS Virus
tagtattgttttattctgagaacaa

SEQ ID NO: 214181 - DNA, 25 bp, SARS Virus
agtattgttttcatctgagaacaac

SEQ ID NO: 214182 - DNA, 25 bp, SARS Virus
gtattgttttctactgagaacaaca

SEQ ID NO: 214183 - DNA, 25 bp, SARS Virus
tattgttttcttatgagaacaacat

SEQ ID NO: 214184 - DNA, 25 bp, SARS Virus
attgttttcttcagagaacaacatg

SEQ ID NO: 214185 - DNA, 25 bp, SARS Virus
ttgttttcttctaagaacaacatga

SEQ ID NO: 214186 - DNA, 25 bp, SARS Virus
tgttttcttctgagaacaacatgat

SEQ ID NO: 214187 - DNA, 25 bp, SARS Virus
gttttcttctgaaaacaacatgatc

SEQ ID NO: 214188 - DNA, 25 bp, SARS Virus
ttttcttctgagaacaacatgatct

SEQ ID NO: 214189 - DNA, 25 bp, SARS Virus
tttcttctgagaacaacatgatcta

SEQ ID NO: 214190 - DNA, 25 bp, SARS Virus
ttcttctgagaaaaacatgatctat

SEQ ID NO: 214191 - DNA, 25 bp, SARS Virus
tcttctgagaacaacatgatctata

SEQ ID NO: 214192 - DNA, 25 bp, SARS Virus
cttctgagaacaacatgatctataa

SEQ ID NO: 214193 - DNA, 25 bp, SARS Virus
ttctgagaacaaaatgatctataac

SEQ ID NO: 214194 - DNA, 25 bp, SARS Virus
tctgagaacaacatgatctataaca

SEQ ID NO: 214195 - DNA, 25 bp, SARS Virus
ctgagaacaacaagatctataacac

SEQ ID NO: 214196 - DNA, 25 bp, SARS Virus
tgagaacaacataatctataacaca

SEQ ID NO: 214197 - DNA, 25 bp, SARS Virus
gagaacaacatgatctataacacat

SEQ ID NO: 214198 - DNA, 25 bp, SARS Virus
agaacaacatgaactataacacatc

SEQ ID NO: 214199 - DNA, 25 bp, SARS Virus
gaacaacatgatatataacacatcg

SEQ ID NO: 214200 - DNA, 25 bp, SARS Virus
aacaacatgatcaataacacatcgt

SEQ ID NO: 214201 - DNA, 25 bp, SARS Virus
acaacatgatctataacacatcgta

SEQ ID NO: 214202 - DNA, 25 bp, SARS Virus
caacatgatctaaaacacatcgtag

SEQ ID NO: 214203 - DNA, 25 bp, SARS Virus
aacatgatctataacacatcgtagt

SEQ ID NO: 214204 - DNA, 25 bp, SARS Virus
acatgatctataacacatcgtagtg

SEQ ID NO: 214205 - DNA, 25 bp, SARS Virus
catgatctataaaacatcgtagtgc

SEQ ID NO: 214206 - DNA, 25 bp, SARS Virus
atgatctataacacatcgtagtgct

SEQ ID NO: 214207 - DNA, 25 bp, SARS Virus
tgatctataacaaatcgtagtgctg

SEQ ID NO: 214208 - DNA, 25 bp, SARS Virus
gatctataacacatcgtagtgctgg

SEQ ID NO: 214209 - DNA, 25 bp, SARS Virus
atctataacacaacgtagtgctggt

SEQ ID NO: 214210 - DNA, 25 bp, SARS Virus
tctataacacatagtagtgctggtg

SEQ ID NO: 214211 - DNA, 25 bp, SARS Virus
ctataacacatcatagtgctggtgt

SEQ ID NO: 214212 - DNA, 25 bp, SARS Virus
tataacacatcgaagtgctggtgtg

SEQ ID NO: 214213 - DNA, 25 bp, SARS Virus
ataacacatcgtagtgctggtgtgt

SEQ ID NO: 214214 - DNA, 25 bp, SARS Virus
taacacatcgtaatgctggtgtgtg

SEQ ID NO: 214215 - DNA, 25 bp, SARS Virus
aacacatcgtagagctggtgtgtgt

SEQ ID NO: 214216 - DNA, 25 bp, SARS Virus
acacatcgtagtactggtgtgtgtg

SEQ ID NO: 214217 - DNA, 25 bp, SARS Virus
cacatcgtagtgatggtgtgtgtgt

SEQ ID NO: 214218 - DNA, 25 bp, SARS Virus
acatcgtagtgcaggtgtgtgtgta

SEQ ID NO: 214219 - DNA, 25 bp, SARS Virus
catcgtagtgctagtgtgtgtgtac

SEQ ID NO: 214220 - DNA, 25 bp, SARS Virus
atcgtagtgctgatgtgtgtgtacc

SEQ ID NO: 214221 - DNA, 25 bp, SARS Virus
tcgtagtgctggagtgtgtgtacct

SEQ ID NO: 214222 - DNA, 25 bp, SARS Virus
cgtagtgctggtatgtgtgtacctt

SEQ ID NO: 214223 - DNA, 25 bp, SARS Virus
gtagtgctggtgagtgtgtacctta

SEQ ID NO: 214224 - DNA, 25 bp, SARS Virus
tagtgctggtgtatgtgtaccttac

SEQ ID NO: 214225 - DNA, 25 bp, SARS Virus
agtgctggtgtgagtgtaccttacc

SEQ ID NO: 214226 - DNA, 25 bp, SARS Virus
gtgctggtgtgtatgtaccttacct

SEQ ID NO: 214227 - DNA, 25 bp, SARS Virus
tgctggtgtgtgagtaccttacctt

SEQ ID NO: 214228 - DNA, 25 bp, SARS Virus
gctggtgtgtgtataccttaccttt

SEQ ID NO: 214229 - DNA, 25 bp, SARS Virus
ctggtgtgtgtgaaccttacctttg

SEQ ID NO: 214230 - DNA, 25 bp, SARS Virus
tggtgtgtgtgtaccttacctttgt

SEQ ID NO: 214231 - DNA, 25 bp, SARS Virus
ggtgtgtgtgtaacttacctttgtg

SEQ ID NO: 214232 - DNA, 25 bp, SARS Virus
gtgtgtgtgtacattacctttgtgg

SEQ ID NO: 214233 - DNA, 25 bp, SARS Virus
tgtgtgtgtaccatacctttgtgga

SEQ ID NO: 214234 - DNA, 25 bp, SARS Virus
gtgtgtgtacctaacctttgtggac

SEQ ID NO: 214235 - DNA, 25 bp, SARS Virus
tgtgtgtaccttacctttgtggaca

SEQ ID NO: 214236 - DNA, 25 bp, SARS Virus
gtgtgtaccttaactttgtggacag

SEQ ID NO: 214237 - DNA, 25 bp, SARS Virus
tgtgtaccttacatttgtggacaga

SEQ ID NO: 214238 - DNA, 25 bp, SARS Virus
gtgtaccttaccattgtggacagaa

SEQ ID NO: 214239 - DNA, 25 bp, SARS Virus
tgtaccttacctatgtggacagaat

SEQ ID NO: 214240 - DNA, 25 bp, SARS Virus
gtaccttaccttagtggacagaatt

SEQ ID NO: 214241 - DNA, 25 bp, SARS Virus
taccttacctttatggacagaattc

SEQ ID NO: 214242 - DNA, 25 bp, SARS Virus
accttacctttgaggacagaattct

SEQ ID NO: 214243 - DNA, 25 bp, SARS Virus
ccttacctttgtagacagaattcta

SEQ ID NO: 214244 - DNA, 25 bp, SARS Virus
cttacctttgtgaacagaattctaa

SEQ ID NO: 214245 - DNA, 25 bp, SARS Virus
ttacctttgtggacagaattctaat

SEQ ID NO: 214246 - DNA, 25 bp, SARS Virus
tacctttgtggaaagaattctaata

SEQ ID NO: 214247 - DNA, 25 bp, SARS Virus
acctttgtggacagaattctaatag

SEQ ID NO: 214248 - DNA, 25 bp, SARS Virus
cctttgtggacaaaattctaatagt

SEQ ID NO: 214249 - DNA, 25 bp, SARS Virus
ctttgtggacagaattctaatagta

SEQ ID NO: 214250 - DNA, 25 bp, SARS Virus
tttgtggacagaattctaatagtat

SEQ ID NO: 214251 - DNA, 25 bp, SARS Virus
ttgtggacagaaatctaatagtatt

SEQ ID NO: 214252 - DNA, 25 bp, SARS Virus
tgtggacagaatactaatagtattc

SEQ ID NO: 214253 - DNA, 25 bp, SARS Virus
gtggacagaattataatagtattct

SEQ ID NO: 214254 - DNA, 25 bp, SARS Virus
tggacagaattcaaatagtattcta

SEQ ID NO: 214255 - DNA, 25 bp, SARS Virus
ggacagaattctaatagtattctat

SEQ ID NO: 214256 - DNA, 25 bp, SARS Virus
gacagaattctaatagtattctatc

SEQ ID NO: 214257 - DNA, 25 bp, SARS Virus
acagaattctaaaagtattctatct

SEQ ID NO: 214258 - DNA, 25 bp, SARS Virus
cagaattctaatagtattctatctc

SEQ ID NO: 214259 - DNA, 25 bp, SARS Virus
agaattctaataatattctatctca

SEQ ID NO: 214260 - DNA, 25 bp, SARS Virus
gaattctaatagaattctatctcat

SEQ ID NO: 214261 - DNA, 25 bp, SARS Virus
aattctaatagtattctatctcatg

SEQ ID NO: 214262 - DNA, 25 bp, SARS Virus
attctaatagtaatctatctcatgg

SEQ ID NO: 214263 - DNA, 25 bp, SARS Virus
ttctaatagtatactatctcatggg

SEQ ID NO: 214264 - DNA, 25 bp, SARS Virus
tctaatagtattatatctcatgggt

SEQ ID NO: 214265 - DNA, 25 bp, SARS Virus
atttagtagtcgcttaaaacacaat

SEQ ID NO: 214266 - DNA, 25 bp, SARS Virus
tttagtagtcgtctaaaacacaatc

SEQ ID NO: 214267 - DNA, 25 bp, SARS Virus
ttagtagtcgttcaaaacacaatct

SEQ ID NO: 214268 - DNA, 25 bp, SARS Virus
tagtagtcgtttcaaacacaatctt

SEQ ID NO: 214269 - DNA, 25 bp, SARS Virus
agtagtcgtttacaacacaatcttg

SEQ ID NO: 214270 - DNA, 25 bp, SARS Virus
gtagtcgtttaacacacaatcttgt

SEQ ID NO: 214271 - DNA, 25 bp, SARS Virus
tagtcgtttaaaccacaatcttgta

SEQ ID NO: 214272 - DNA, 25 bp, SARS Virus
agtcgtttaaaacacaatcttgtac

SEQ ID NO: 214273 - DNA, 25 bp, SARS Virus
gtcgtttaaaacccaatcttgtaca

SEQ ID NO: 214274 - DNA, 25 bp, SARS Virus
tcgtttaaaacacaatcttgtacac

SEQ ID NO: 214275 - DNA, 25 bp, SARS Virus
cgtttaaaacaccatcttgtacact

SEQ ID NO: 214276 - DNA, 25 bp, SARS Virus
gtttaaaacacactcttgtacactc

SEQ ID NO: 214277 - DNA, 25 bp, SARS Virus
tttaaaacacaaccttgtacactca

SEQ ID NO: 214278 - DNA, 25 bp, SARS Virus
ttaaaacacaatcttgtacactcaa

SEQ ID NO: 214279 - DNA, 25 bp, SARS Virus
taaaacacaatcctgtacactcaaa

SEQ ID NO: 214280 - DNA, 25 bp, SARS Virus
aaaacacaatctcgtacactcaaac

SEQ ID NO: 214281 - DNA, 25 bp, SARS Virus
aaacacaatcttctacactcaaact

SEQ ID NO: 214282 - DNA, 25 bp, SARS Virus
aacacaatcttgcacactcaaactt

SEQ ID NO: 214283 - DNA, 25 bp, SARS Virus
acacaatcttgtccactcaaacttt

SEQ ID NO: 214284 - DNA, 25 bp, SARS Virus
cacaatcttgtacactcaaacttta

SEQ ID NO: 214285 - DNA, 25 bp, SARS Virus
acaatcttgtaccctcaaactttaa

SEQ ID NO: 214286 - DNA, 25 bp, SARS Virus
caatcttgtacactcaaactttaat

SEQ ID NO: 214287 - DNA, 25 bp, SARS Virus
aatcttgtacacccaaactttaata

SEQ ID NO: 214288 - DNA, 25 bp, SARS Virus
atcttgtacactcaaactttaatag

SEQ ID NO: 214289 - DNA, 25 bp, SARS Virus
tcttgtacactccaactttaatagt

SEQ ID NO: 214290 - DNA, 25 bp, SARS Virus
cttgtacactcacactttaatagtt

SEQ ID NO: 214291 - DNA, 25 bp, SARS Virus
ttgtacactcaacctttaatagttt

SEQ ID NO: 214292 - DNA, 25 bp, SARS Virus
tgtacactcaaactttaatagtttt

SEQ ID NO: 214293 - DNA, 25 bp, SARS Virus
gtacactcaaaccttaatagttttg

SEQ ID NO: 214294 - DNA, 25 bp, SARS Virus
tacactcaaactctaatagttttga

SEQ ID NO: 214295 - DNA, 25 bp, SARS Virus
acactcaaacttcaatagttttgag

SEQ ID NO: 214296 - DNA, 25 bp, SARS Virus
cactcaaactttcatagttttgagc

SEQ ID NO: 214297 - DNA, 25 bp, SARS Virus
actcaaactttactagttttgagcg

SEQ ID NO: 214298 - DNA, 25 bp, SARS Virus
ctcaaactttaacagttttgagcgt

SEQ ID NO: 214299 - DNA, 25 bp, SARS Virus
tcaaactttaatcgttttgagcgta

SEQ ID NO: 214300 - DNA, 25 bp, SARS Virus
caaactttaatacttttgagcgtaa

SEQ ID NO: 214301 - DNA, 25 bp, SARS Virus
aaactttaatagctttgagcgtaaa

SEQ ID NO: 214302 - DNA, 25 bp, SARS Virus
aactttaatagtcttgagcgtaaac

SEQ ID NO: 214303 - DNA, 25 bp, SARS Virus
actttaatagttctgagcgtaaacc

SEQ ID NO: 214304 - DNA, 25 bp, SARS Virus
ctttaatagtttcgagcgtaaacca

SEQ ID NO: 214305 - DNA, 25 bp, SARS Virus
tttaatagttttcagcgtaaaccat

SEQ ID NO: 214306 - DNA, 25 bp, SARS Virus
ttaatagttttgcgcgtaaaccatt

SEQ ID NO: 214307 - DNA, 25 bp, SARS Virus
taatagttttgaccgtaaaccatta

SEQ ID NO: 214308 - DNA, 25 bp, SARS Virus
aatagttttgagcgtaaaccattac

SEQ ID NO: 214309 - DNA, 25 bp, SARS Virus
atagttttgagcctaaaccattacc

SEQ ID NO: 214310 - DNA, 25 bp, SARS Virus
tagttttgagcgcaaaccattacca

SEQ ID NO: 214311 - DNA, 25 bp, SARS Virus
agttttgagcgtcaaccattaccaa

SEQ ID NO: 214312 - DNA, 25 bp, SARS Virus
gttttgagcgtacaccattaccaac

SEQ ID NO: 214313 - DNA, 25 bp, SARS Virus
ttttgagcgtaacccattaccaact

SEQ ID NO: 214314 - DNA, 25 bp, SARS Virus
tttgagcgtaaaccattaccaactc

SEQ ID NO: 214315 - DNA, 25 bp, SARS Virus
ttgagcgtaaaccattaccaactca

SEQ ID NO: 214316 - DNA, 25 bp, SARS Virus
tgagcgtaaacccttaccaactcaa

SEQ ID NO: 214317 - DNA, 25 bp, SARS Virus
gagcgtaaaccactaccaactcaac

SEQ ID NO: 214318 - DNA, 25 bp, SARS Virus
agcgtaaaccatcaccaactcaacc

SEQ ID NO: 214319 - DNA, 25 bp, SARS Virus
gcgtaaaccattcccaactcaacca

SEQ ID NO: 214320 - DNA, 25 bp, SARS Virus
cgtaaaccattaccaactcaaccat

SEQ ID NO: 214321 - DNA, 25 bp, SARS Virus
gtaaaccattaccaactcaaccatg

SEQ ID NO: 214322 - DNA, 25 bp, SARS Virus
taaaccattacccactcaaccatgt

SEQ ID NO: 214323 - DNA, 25 bp, SARS Virus
aaaccattaccacctcaaccatgtt

SEQ ID NO: 214324 - DNA, 25 bp, SARS Virus
aaccattaccaactcaaccatgttc

SEQ ID NO: 214325 - DNA, 25 bp, SARS Virus
accattaccaacccaaccatgttcc

SEQ ID NO: 214326 - DNA, 25 bp, SARS Virus
ccattaccaactcaaccatgttcca

SEQ ID NO: 214327 - DNA, 25 bp, SARS Virus
cattaccaactccaccatgttccag

SEQ ID NO: 214328 - DNA, 25 bp, SARS Virus
attaccaactcacccatgttccaga

SEQ ID NO: 214329 - DNA, 25 bp, SARS Virus
ttaccaactcaaccatgttccagat

SEQ ID NO: 214330 - DNA, 25 bp, SARS Virus
taccaactcaaccatgttccagata

SEQ ID NO: 214331 - DNA, 25 bp, SARS Virus
accaactcaaccctgttccagatat

SEQ ID NO: 214332 - DNA, 25 bp, SARS Virus
ccaactcaaccacgttccagatatc

SEQ ID NO: 214333 - DNA, 25 bp, SARS Virus
caactcaaccatcttccagatatcc

SEQ ID NO: 214334 - DNA, 25 bp, SARS Virus
aactcaaccatgctccagatatccg

SEQ ID NO: 214335 - DNA, 25 bp, SARS Virus
actcaaccatgtcccagatatccga

SEQ ID NO: 214336 - DNA, 25 bp, SARS Virus
ctcaaccatgttccagatatccgac

SEQ ID NO: 214337 - DNA, 25 bp, SARS Virus
tcaaccatgttccagatatccgacg

SEQ ID NO: 214338 - DNA, 25 bp, SARS Virus
caaccatgttcccgatatccgacga

SEQ ID NO: 214339 - DNA, 25 bp, SARS Virus
aaccatgttccacatatccgacgag

SEQ ID NO: 214340 - DNA, 25 bp, SARS Virus
accatgttccagctatccgacgaga

SEQ ID NO: 214341 - DNA, 25 bp, SARS Virus
ccatgttccagacatccgacgagac

SEQ ID NO: 214342 - DNA, 25 bp, SARS Virus
catgttccagatctccgacgagaca

SEQ ID NO: 214343 - DNA, 25 bp, SARS Virus
atgttccagatacccgacgagacat

SEQ ID NO: 214344 - DNA, 25 bp, SARS Virus
tgttccagatatccgacgagacata

SEQ ID NO: 214345 - DNA, 25 bp, SARS Virus
gttccagatatccgacgagacatat

SEQ ID NO: 214346 - DNA, 25 bp, SARS Virus
ttccagatatcccacgagacatatc

SEQ ID NO: 214347 - DNA, 25 bp, SARS Virus
tccagatatccgccgagacatatca

SEQ ID NO: 214348 - DNA, 25 bp, SARS Virus
ccagatatccgacgagacatatcat

SEQ ID NO: 214349 - DNA, 25 bp, SARS Virus
cagatatccgaccagacatatcatt

SEQ ID NO: 214350 - DNA, 25 bp, SARS Virus
agatatccgacgcgacatatcattc

SEQ ID NO: 214351 - DNA, 25 bp, SARS Virus
gatatccgacgacacatatcattcg

SEQ ID NO: 214352 - DNA, 25 bp, SARS Virus
atatccgacgagccatatcattcgt

SEQ ID NO: 214353 - DNA, 25 bp, SARS Virus
tatccgacgagacatatcattcgta

SEQ ID NO: 214354 - DNA, 25 bp, SARS Virus
atccgacgagacctatcattcgtaa

SEQ ID NO: 214355 - DNA, 25 bp, SARS Virus
tccgacgagacacatcattcgtaat

SEQ ID NO: 214356 - DNA, 25 bp, SARS Virus
ccgacgagacatctcattcgtaata

SEQ ID NO: 214357 - DNA, 25 bp, SARS Virus
cgacgagacataccattcgtaatag

SEQ ID NO: 214358 - DNA, 25 bp, SARS Virus
gacgagacatatcattcgtaatagg

SEQ ID NO: 214359 - DNA, 25 bp, SARS Virus
acgagacatatccttcgtaatagga

SEQ ID NO: 214360 - DNA, 25 bp, SARS Virus
cgagacatatcactcgtaataggaa

SEQ ID NO: 214361 - DNA, 25 bp, SARS Virus
gagacatatcatccgtaataggaaa

SEQ ID NO: 214362 - DNA, 25 bp, SARS Virus
agacatatcattcgtaataggaaaa

SEQ ID NO: 214363 - DNA, 25 bp, SARS Virus
gacatatcattcctaataggaaaaa

SEQ ID NO: 214364 - DNA, 25 bp, SARS Virus
acatatcattcgcaataggaaaaat

SEQ ID NO: 214365 - DNA, 25 bp, SARS Virus
catatcattcgtcataggaaaaata

SEQ ID NO: 214366 - DNA, 25 bp, SARS Virus
atatcattcgtactaggaaaaatat

SEQ ID NO: 214367 - DNA, 25 bp, SARS Virus
tatcattcgtaacaggaaaaatatt

SEQ ID NO: 214368 - DNA, 25 bp, SARS Virus
atcattcgtaatcggaaaaatatta

SEQ ID NO: 214369 - DNA, 25 bp, SARS Virus
tcattcgtaatacgaaaaatattat

SEQ ID NO: 214370 - DNA, 25 bp, SARS Virus
cattcgtaatagcaaaaatattatg

SEQ ID NO: 214371 - DNA, 25 bp, SARS Virus
attcgtaataggcaaaatattatgg

SEQ ID NO: 214372 - DNA, 25 bp, SARS Virus
ttcgtaataggacaaatattatggg

SEQ ID NO: 214373 - DNA, 25 bp, SARS Virus
tcgtaataggaacaatattatgggt

SEQ ID NO: 214374 - DNA, 25 bp, SARS Virus
cgtaataggaaacatattatgggta

SEQ ID NO: 214375 - DNA, 25 bp, SARS Virus
gtaataggaaaactattatgggtag

SEQ ID NO: 214376 - DNA, 25 bp, SARS Virus
taataggaaaaacattatgggtagg

SEQ ID NO: 214377 - DNA, 25 bp, SARS Virus
aataggaaaaatcttatgggtaggt

SEQ ID NO: 214378 - DNA, 25 bp, SARS Virus
ataggaaaaatactatgggtaggtt

SEQ ID NO: 214379 - DNA, 25 bp, SARS Virus
taggaaaaatatcatgggtaggtta

SEQ ID NO: 214380 - DNA, 25 bp, SARS Virus
aggaaaaatattctgggtaggttaa

SEQ ID NO: 214381 - DNA, 25 bp, SARS Virus
ggaaaaatattacgggtaggttaaa

SEQ ID NO: 214382 - DNA, 25 bp, SARS Virus
gaaaaatattatcggtaggttaaaa

SEQ ID NO: 214383 - DNA, 25 bp, SARS Virus
aaaaatattatgcgtaggttaaaac

SEQ ID NO: 214384 - DNA, 25 bp, SARS Virus
aaaatattatggctaggttaaaacc

SEQ ID NO: 214385 - DNA, 25 bp, SARS Virus
aaatattatgggcaggttaaaacca

SEQ ID NO: 214386 - DNA, 25 bp, SARS Virus
aatattatgggtcggttaaaaccaa

SEQ ID NO: 214387 - DNA, 25 bp, SARS Virus
atattatgggtacgttaaaaccaag

SEQ ID NO: 214388 - DNA, 25 bp, SARS Virus
tattatgggtagcttaaaaccaagt

SEQ ID NO: 214389 - DNA, 25 bp, SARS Virus
attatgggtaggctaaaaccaagtt

SEQ ID NO: 214390 - DNA, 25 bp, SARS Virus
ttatgggtaggtcaaaaccaagtta

SEQ ID NO: 214391 - DNA, 25 bp, SARS Virus
tatgggtaggttcaaaccaagttag

SEQ ID NO: 214392 - DNA, 25 bp, SARS Virus
atgggtaggttacaaccaagttaga

SEQ ID NO: 214393 - DNA, 25 bp, SARS Virus
tgggtaggttaacaccaagttagag

SEQ ID NO: 214394 - DNA, 25 bp, SARS Virus
gggtaggttaaacccaagttagaga

SEQ ID NO: 214395 - DNA, 25 bp, SARS Virus
ggtaggttaaaaccaagttagagac

SEQ ID NO: 214396 - DNA, 25 bp, SARS Virus
gtaggttaaaaccaagttagagaca

SEQ ID NO: 214397 - DNA, 25 bp, SARS Virus
taggttaaaacccagttagagacac

SEQ ID NO: 214398 - DNA, 25 bp, SARS Virus
aggttaaaaccacgttagagacaca

SEQ ID NO: 214399 - DNA, 25 bp, SARS Virus
ggttaaaaccaacttagagacacat

SEQ ID NO: 214400 - DNA, 25 bp, SARS Virus
gttaaaaccaagctagagacacatt

SEQ ID NO: 214401 - DNA, 25 bp, SARS Virus
ttaaaaccaagtcagagacacattc

SEQ ID NO: 214402 - DNA, 25 bp, SARS Virus
taaaaccaagttcgagacacattca

SEQ ID NO: 214403 - DNA, 25 bp, SARS Virus
aaaaccaagttacagacacattcat

SEQ ID NO: 214404 - DNA, 25 bp, SARS Virus
aaaccaagttagcgacacattcatt

SEQ ID NO: 214405 - DNA, 25 bp, SARS Virus
aaccaagttagacacacattcattg

SEQ ID NO: 214406 - DNA, 25 bp, SARS Virus
accaagttagagccacattcattga

SEQ ID NO: 214407 - DNA, 25 bp, SARS Virus
ccaagttagagacacattcattgag

SEQ ID NO: 214408 - DNA, 25 bp, SARS Virus
caagttagagacccattcattgagg

SEQ ID NO: 214409 - DNA, 25 bp, SARS Virus
aagttagagacacattcattgaggt

SEQ ID NO: 214410 - DNA, 25 bp, SARS Virus
agttagagacaccttcattgaggta

SEQ ID NO: 214411 - DNA, 25 bp, SARS Virus
gttagagacacactcattgaggtag

SEQ ID NO: 214412 - DNA, 25 bp, SARS Virus
ttagagacacatccattgaggtagc

SEQ ID NO: 214413 - DNA, 25 bp, SARS Virus
tagagacacattcattgaggtagct

SEQ ID NO: 214414 - DNA, 25 bp, SARS Virus
agagacacattccttgaggtagctc

SEQ ID NO: 214415 - DNA, 25 bp, SARS Virus
gagacacattcactgaggtagctca

SEQ ID NO: 214416 - DNA, 25 bp, SARS Virus
agacacattcatcgaggtagctcaa

SEQ ID NO: 214417 - DNA, 25 bp, SARS Virus
gacacattcattcaggtagctcaaa

SEQ ID NO: 214418 - DNA, 25 bp, SARS Virus
acacattcattgcggtagctcaaat

SEQ ID NO: 214419 - DNA, 25 bp, SARS Virus
cacattcattgacgtagctcaaata

SEQ ID NO: 214420 - DNA, 25 bp, SARS Virus
acattcattgagctagctcaaatat

SEQ ID NO: 214421 - DNA, 25 bp, SARS Virus
cattcattgaggcagctcaaatatg

SEQ ID NO: 214422 - DNA, 25 bp, SARS Virus
attcattgaggtcgctcaaatatgc

SEQ ID NO: 214423 - DNA, 25 bp, SARS Virus
ttcattgaggtacctcaaatatgct

SEQ ID NO: 214424 - DNA, 25 bp, SARS Virus
tcattgaggtagctcaaatatgctg

SEQ ID NO: 214425 - DNA, 25 bp, SARS Virus
cattgaggtagcccaaatatgctgt

SEQ ID NO: 214426 - DNA, 25 bp, SARS Virus
attgaggtagctcaaatatgctgtg

SEQ ID NO: 214427 - DNA, 25 bp, SARS Virus
ttgaggtagctccaatatgctgtgt

SEQ ID NO: 214428 - DNA, 25 bp, SARS Virus
tgaggtagctcacatatgctgtgtc

SEQ ID NO: 214429 - DNA, 25 bp, SARS Virus
gaggtagctcaactatgctgtgtcc

SEQ ID NO: 214430 - DNA, 25 bp, SARS Virus
aggtagctcaaacatgctgtgtccg

SEQ ID NO: 214431 - DNA, 25 bp, SARS Virus
ggtagctcaaatctgctgtgtccga

SEQ ID NO: 214432 - DNA, 25 bp, SARS Virus
gtagctcaaatacgctgtgtccgaa

SEQ ID NO: 214433 - DNA, 25 bp, SARS Virus
tagctcaaatatcctgtgtccgaac

SEQ ID NO: 214434 - DNA, 25 bp, SARS Virus
agctcaaatatgctgtgtccgaact

SEQ ID NO: 214435 - DNA, 25 bp, SARS Virus
gctcaaatatgccgtgtccgaacta

SEQ ID NO: 214436 - DNA, 25 bp, SARS Virus
ctcaaatatgctctgtccgaactac

SEQ ID NO: 214437 - DNA, 25 bp, SARS Virus
tcaaatatgctgcgtccgaactacc

SEQ ID NO: 214438 - DNA, 25 bp, SARS Virus
caaatatgctgtctccgaactacca

SEQ ID NO: 214439 - DNA, 25 bp, SARS Virus
aaatatgctgtgcccgaactaccaa

SEQ ID NO: 214440 - DNA, 25 bp, SARS Virus
aatatgctgtgtccgaactaccaac

SEQ ID NO: 214441 - DNA, 25 bp, SARS Virus
atatgctgtgtccgaactaccaaca

SEQ ID NO: 214442 - DNA, 25 bp, SARS Virus
tatgctgtgtcccaactaccaacat

SEQ ID NO: 214443 - DNA, 25 bp, SARS Virus
atgctgtgtccgcactaccaacatc

SEQ ID NO: 214444 - DNA, 25 bp, SARS Virus
tgctgtgtccgacctaccaacatca

SEQ ID NO: 214445 - DNA, 25 bp, SARS Virus
gctgtgtccgaactaccaacatcac

SEQ ID NO: 214446 - DNA, 25 bp, SARS Virus
ctgtgtccgaaccaccaacatcaca

SEQ ID NO: 214447 - DNA, 25 bp, SARS Virus
tgtgtccgaactcccaacatcacat

SEQ ID NO: 214448 - DNA, 25 bp, SARS Virus
gtgtccgaactaccaacatcacatt

SEQ ID NO: 214449 - DNA, 25 bp, SARS Virus
tgtccgaactaccaacatcacattc

SEQ ID NO: 214450 - DNA, 25 bp, SARS Virus
gtccgaactacccacatcacattct

SEQ ID NO: 214451 - DNA, 25 bp, SARS Virus
tccgaactaccaccatcacattcta

SEQ ID NO: 214452 - DNA, 25 bp, SARS Virus
ccgaactaccaacatcacattctac

SEQ ID NO: 214453 - DNA, 25 bp, SARS Virus
cgaactaccaacctcacattctaca

SEQ ID NO: 214454 - DNA, 25 bp, SARS Virus
gaactaccaacaccacattctacaa

SEQ ID NO: 214455 - DNA, 25 bp, SARS Virus
aactaccaacatcacattctacaaa

SEQ ID NO: 214456 - DNA, 25 bp, SARS Virus
actaccaacatcccattctacaaag

SEQ ID NO: 214457 - DNA, 25 bp, SARS Virus
ctaccaacatcacattctacaaagg

SEQ ID NO: 214458 - DNA, 25 bp, SARS Virus
taccaacatcaccttctacaaagga

SEQ ID NO: 214459 - DNA, 25 bp, SARS Virus
accaacatcacactctacaaaggaa

SEQ ID NO: 214460 - DNA, 25 bp, SARS Virus
ccaacatcacatcctacaaaggaac

SEQ ID NO: 214461 - DNA, 25 bp, SARS Virus
caacatcacattctacaaaggaaca

SEQ ID NO: 214462 - DNA, 25 bp, SARS Virus
aacatcacattccacaaaggaacat

SEQ ID NO: 214463 - DNA, 25 bp, SARS Virus
acatcacattctccaaaggaacatc

SEQ ID NO: 214464 - DNA, 25 bp, SARS Virus
catcacattctacaaaggaacatct

SEQ ID NO: 214465 - DNA, 25 bp, SARS Virus
atcacattctaccaaggaacatctt

SEQ ID NO: 214466 - DNA, 25 bp, SARS Virus
tcacattctacacaggaacatcttt

SEQ ID NO: 214467 - DNA, 25 bp, SARS Virus
cacattctacaacggaacatctttt

SEQ ID NO: 214468 - DNA, 25 bp, SARS Virus
acattctacaaacgaacatcttttg

SEQ ID NO: 214469 - DNA, 25 bp, SARS Virus
cattctacaaagcaacatcttttgt

SEQ ID NO: 214470 - DNA, 25 bp, SARS Virus
attctacaaaggcacatcttttgta

SEQ ID NO: 214471 - DNA, 25 bp, SARS Virus
ttctacaaaggaccatcttttgtag

SEQ ID NO: 214472 - DNA, 25 bp, SARS Virus
tctacaaaggaacatcttttgtagt

SEQ ID NO: 214473 - DNA, 25 bp, SARS Virus
ctacaaaggaacctcttttgtagtc

SEQ ID NO: 214474 - DNA, 25 bp, SARS Virus
tacaaaggaacaccttttgtagtca

SEQ ID NO: 214475 - DNA, 25 bp, SARS Virus
acaaaggaacatcttttgtagtcag

SEQ ID NO: 214476 - DNA, 25 bp, SARS Virus
caaaggaacatcctttgtagtcagt

SEQ ID NO: 214477 - DNA, 25 bp, SARS Virus
aaaggaacatctcttgtagtcagtg

SEQ ID NO: 214478 - DNA, 25 bp, SARS Virus
aaggaacatcttctgtagtcagtga

SEQ ID NO: 214479 - DNA, 25 bp, SARS Virus
aggaacatctttcgtagtcagtgac

SEQ ID NO: 214480 - DNA, 25 bp, SARS Virus
ggaacatcttttctagtcagtgacc

SEQ ID NO: 214481 - DNA, 25 bp, SARS Virus
gaacatcttttgcagtcagtgacca

SEQ ID NO: 214482 - DNA, 25 bp, SARS Virus
aacatcttttgtcgtcagtgaccag

SEQ ID NO: 214483 - DNA, 25 bp, SARS Virus
acatcttttgtactcagtgaccagg

SEQ ID NO: 214484 - DNA, 25 bp, SARS Virus
catcttttgtagccagtgaccagga

SEQ ID NO: 214485 - DNA, 25 bp, SARS Virus
atcttttgtagtcagtgaccaggaa

SEQ ID NO: 214486 - DNA, 25 bp, SARS Virus
tcttttgtagtccgtgaccaggaaa

SEQ ID NO: 214487 - DNA, 25 bp, SARS Virus
cttttgtagtcactgaccaggaaac

SEQ ID NO: 214488 - DNA, 25 bp, SARS Virus
ttttgtagtcagcgaccaggaaaca

SEQ ID NO: 214489 - DNA, 25 bp, SARS Virus
tttgtagtcagtcaccaggaaacat

SEQ ID NO: 214490 - DNA, 25 bp, SARS Virus
ttgtagtcagtgcccaggaaacatg

SEQ ID NO: 214491 - DNA, 25 bp, SARS Virus
tgtagtcagtgaccaggaaacatga

SEQ ID NO: 214492 - DNA, 25 bp, SARS Virus
gtagtcagtgaccaggaaacatgag

SEQ ID NO: 214493 - DNA, 25 bp, SARS Virus
tagtcagtgacccggaaacatgaga

SEQ ID NO: 214494 - DNA, 25 bp, SARS Virus
agtcagtgaccacgaaacatgagac

SEQ ID NO: 214495 - DNA, 25 bp, SARS Virus
gtcagtgaccagcaaacatgagact

SEQ ID NO: 214496 - DNA, 25 bp, SARS Virus
tcagtgaccaggcaacatgagactg

SEQ ID NO: 214497 - DNA, 25 bp, SARS Virus
cagtgaccaggacacatgagactgt

SEQ ID NO: 214498 - DNA, 25 bp, SARS Virus
agtgaccaggaaccatgagactgta

SEQ ID NO: 214499 - DNA, 25 bp, SARS Virus
gtgaccaggaaacatgagactgtag

SEQ ID NO: 214500 - DNA, 25 bp, SARS Virus
tgaccaggaaacctgagactgtaga

SEQ ID NO: 214501 - DNA, 25 bp, SARS Virus
gaccaggaaacacgagactgtagaa

SEQ ID NO: 214502 - DNA, 25 bp, SARS Virus
accaggaaacatcagactgtagaaa

SEQ ID NO: 214503 - DNA, 25 bp, SARS Virus
ccaggaaacatgcgactgtagaaac

SEQ ID NO: 214504 - DNA, 25 bp, SARS Virus
caggaaacatgacactgtagaaaca

SEQ ID NO: 214505 - DNA, 25 bp, SARS Virus
aggaaacatgagcctgtagaaacat

SEQ ID NO: 214506 - DNA, 25 bp, SARS Virus
ggaaacatgagactgtagaaacatt

SEQ ID NO: 214507 - DNA, 25 bp, SARS Virus
gaaacatgagaccgtagaaacattc

SEQ ID NO: 214508 - DNA, 25 bp, SARS Virus
aaacatgagactctagaaacattcc

SEQ ID NO: 214509 - DNA, 25 bp, SARS Virus
aacatgagactgcagaaacattcca

SEQ ID NO: 214510 - DNA, 25 bp, SARS Virus
acatgagactgtcgaaacattccac

SEQ ID NO: 214511 - DNA, 25 bp, SARS Virus
catgagactgtacaaacattccact

SEQ ID NO: 214512 - DNA, 25 bp, SARS Virus
atgagactgtagcaacattccactc

SEQ ID NO: 214513 - DNA, 25 bp, SARS Virus
tgagactgtagacacattccactcg

SEQ ID NO: 214514 - DNA, 25 bp, SARS Virus
gagactgtagaaccattccactcga

SEQ ID NO: 214515 - DNA, 25 bp, SARS Virus
agactgtagaaacattccactcgag

SEQ ID NO: 214516 - DNA, 25 bp, SARS Virus
gactgtagaaaccttccactcgagg

SEQ ID NO: 214517 - DNA, 25 bp, SARS Virus
actgtagaaacactccactcgaggc

SEQ ID NO: 214518 - DNA, 25 bp, SARS Virus
ctgtagaaacatcccactcgaggca

SEQ ID NO: 214519 - DNA, 25 bp, SARS Virus
tgtagaaacattccactcgaggcag

SEQ ID NO: 214520 - DNA, 25 bp, SARS Virus
gtagaaacattccactcgaggcagt

SEQ ID NO: 214521 - DNA, 25 bp, SARS Virus
tagaaacattcccctcgaggcagtt

SEQ ID NO: 214522 - DNA, 25 bp, SARS Virus
agaaacattccactcgaggcagtta

SEQ ID NO: 214523 - DNA, 25 bp, SARS Virus
gaaacattccacccgaggcagttat

SEQ ID NO: 214524 - DNA, 25 bp, SARS Virus
aaacattccactcgaggcagttatg

SEQ ID NO: 214525 - DNA, 25 bp, SARS Virus
aacattccactccaggcagttatgc

SEQ ID NO: 214526 - DNA, 25 bp, SARS Virus
acattccactcgcggcagttatgct

SEQ ID NO: 214527 - DNA, 25 bp, SARS Virus
cattccactcgacgcagttatgcta

SEQ ID NO: 214528 - DNA, 25 bp, SARS Virus
attccactcgagccagttatgctat

SEQ ID NO: 214529 - DNA, 25 bp, SARS Virus
ttccactcgaggcagttatgctatc

SEQ ID NO: 214530 - DNA, 25 bp, SARS Virus
tccactcgaggccgttatgctatct

SEQ ID NO: 214531 - DNA, 25 bp, SARS Virus
ccactcgaggcacttatgctatctc

SEQ ID NO: 214532 - DNA, 25 bp, SARS Virus
cactcgaggcagctatgctatctcc

SEQ ID NO: 214533 - DNA, 25 bp, SARS Virus
actcgaggcagtcatgctatctccc

SEQ ID NO: 214534 - DNA, 25 bp, SARS Virus
ctcgaggcagttctgctatctccca

SEQ ID NO: 214535 - DNA, 25 bp, SARS Virus
tcgaggcagttacgctatctcccag

SEQ ID NO: 214536 - DNA, 25 bp, SARS Virus
cgaggcagttatcctatctcccaga

SEQ ID NO: 214537 - DNA, 25 bp, SARS Virus
gaggcagttatgctatctcccagag

SEQ ID NO: 214538 - DNA, 25 bp, SARS Virus
aggcagttatgccatctcccagagg

SEQ ID NO: 214539 - DNA, 25 bp, SARS Virus
ggcagttatgctctctcccagagga

SEQ ID NO: 214540 - DNA, 25 bp, SARS Virus
gcagttatgctacctcccagaggaa

SEQ ID NO: 214541 - DNA, 25 bp, SARS Virus
cagttatgctatctcccagaggaat

SEQ ID NO: 214542 - DNA, 25 bp, SARS Virus
agttatgctatcccccagaggaatc

SEQ ID NO: 214543 - DNA, 25 bp, SARS Virus
gttatgctatctcccagaggaatcg

SEQ ID NO: 214544 - DNA, 25 bp, SARS Virus
ttatgctatctcccagaggaatcgt

SEQ ID NO: 214545 - DNA, 25 bp, SARS Virus
tatgctatctcccagaggaatcgtc

SEQ ID NO: 214546 - DNA, 25 bp, SARS Virus
atgctatctccccgaggaatcgtca

SEQ ID NO: 214547 - DNA, 25 bp, SARS Virus
tgctatctcccacaggaatcgtcaa

SEQ ID NO: 214548 - DNA, 25 bp, SARS Virus
gctatctcccagcggaatcgtcaat

SEQ ID NO: 214549 - DNA, 25 bp, SARS Virus
ctatctcccagacgaatcgtcaata

SEQ ID NO: 214550 - DNA, 25 bp, SARS Virus
tatctcccagagcaatcgtcaatat

SEQ ID NO: 214551 - DNA, 25 bp, SARS Virus
atctcccagaggcatcgtcaatata

SEQ ID NO: 214552 - DNA, 25 bp, SARS Virus
tctcccagaggactcgtcaatatac

SEQ ID NO: 214553 - DNA, 25 bp, SARS Virus
ctcccagaggaaccgtcaatatact

SEQ ID NO: 214554 - DNA, 25 bp, SARS Virus
tcccagaggaatcgtcaatatactc

SEQ ID NO: 214555 - DNA, 25 bp, SARS Virus
cccagaggaatcctcaatatactca

SEQ ID NO: 214556 - DNA, 25 bp, SARS Virus
ccagaggaatcgccaatatactcac

SEQ ID NO: 214557 - DNA, 25 bp, SARS Virus
cagaggaatcgtcaatatactcaca

SEQ ID NO: 214558 - DNA, 25 bp, SARS Virus
agaggaatcgtccatatactcacat

SEQ ID NO: 214559 - DNA, 25 bp, SARS Virus
gaggaatcgtcactatactcacatt

SEQ ID NO: 214560 - DNA, 25 bp, SARS Virus
aggaatcgtcaacatactcacatta

SEQ ID NO: 214561 - DNA, 25 bp, SARS Virus
ggaatcgtcaatctactcacattac

SEQ ID NO: 214562 - DNA, 25 bp, SARS Virus
gaatcgtcaatacactcacattact

SEQ ID NO: 214563 - DNA, 25 bp, SARS Virus
aatcgtcaatatcctcacattactg

SEQ ID NO: 214564 - DNA, 25 bp, SARS Virus
atcgtcaatatactcacattactgg

SEQ ID NO: 214565 - DNA, 25 bp, SARS Virus
tcgtcaatatacccacattactggt

SEQ ID NO: 214566 - DNA, 25 bp, SARS Virus
cgtcaatatactcacattactggtg

SEQ ID NO: 214567 - DNA, 25 bp, SARS Virus
gtcaatatactcccattactggtgt

SEQ ID NO: 214568 - DNA, 25 bp, SARS Virus
tcaatatactcacattactggtgtg

SEQ ID NO: 214569 - DNA, 25 bp, SARS Virus
caatatactcaccttactggtgtga

SEQ ID NO: 214570 - DNA, 25 bp, SARS Virus
aatatactcacactactggtgtgac

SEQ ID NO: 214571 - DNA, 25 bp, SARS Virus
atatactcacatcactggtgtgact

SEQ ID NO: 214572 - DNA, 25 bp, SARS Virus
tatactcacattcctggtgtgacta

SEQ ID NO: 214573 - DNA, 25 bp, SARS Virus
atactcacattactggtgtgactat

SEQ ID NO: 214574 - DNA, 25 bp, SARS Virus
tactcacattaccggtgtgactatc

SEQ ID NO: 214575 - DNA, 25 bp, SARS Virus
actcacattactcgtgtgactatca

SEQ ID NO: 214576 - DNA, 25 bp, SARS Virus
ctcacattactgctgtgactatcaa

SEQ ID NO: 214577 - DNA, 25 bp, SARS Virus
tcacattactggcgtgactatcaat

SEQ ID NO: 214578 - DNA, 25 bp, SARS Virus
cacattactggtctgactatcaatg

SEQ ID NO: 214579 - DNA, 25 bp, SARS Virus
acattactggtgcgactatcaatgg

SEQ ID NO: 214580 - DNA, 25 bp, SARS Virus
cattactggtgtcactatcaatggt

SEQ ID NO: 214581 - DNA, 25 bp, SARS Virus
attactggtgtgcctatcaatggtc

SEQ ID NO: 214582 - DNA, 25 bp, SARS Virus
ttactggtgtgactatcaatggtca

SEQ ID NO: 214583 - DNA, 25 bp, SARS Virus
tactggtgtgaccatcaatggtcac

SEQ ID NO: 214584 - DNA, 25 bp, SARS Virus
actggtgtgactctcaatggtcaca

SEQ ID NO: 214585 - DNA, 25 bp, SARS Virus
ctggtgtgactaccaatggtcacat

SEQ ID NO: 214586 - DNA, 25 bp, SARS Virus
tggtgtgactatcaatggtcacatg

SEQ ID NO: 214587 - DNA, 25 bp, SARS Virus
ggtgtgactatccatggtcacatga

SEQ ID NO: 214588 - DNA, 25 bp, SARS Virus
gtgtgactatcactggtcacatgag

SEQ ID NO: 214589 - DNA, 25 bp, SARS Virus
tgtgactatcaacggtcacatgagt

SEQ ID NO: 214590 - DNA, 25 bp, SARS Virus
gtgactatcaatcgtcacatgagta

SEQ ID NO: 214591 - DNA, 25 bp, SARS Virus
tgactatcaatgctcacatgagtaa

SEQ ID NO: 214592 - DNA, 25 bp, SARS Virus
gactatcaatggccacatgagtaag

SEQ ID NO: 214593 - DNA, 25 bp, SARS Virus
actatcaatggtcacatgagtaagc

SEQ ID NO: 214594 - DNA, 25 bp, SARS Virus
ctatcaatggtcccatgagtaagcg

SEQ ID NO: 214595 - DNA, 25 bp, SARS Virus
tatcaatggtcacatgagtaagcgt

SEQ ID NO: 214596 - DNA, 25 bp, SARS Virus
atcaatggtcacctgagtaagcgtg

SEQ ID NO: 214597 - DNA, 25 bp, SARS Virus
tcaatggtcacacgagtaagcgtgt

SEQ ID NO: 214598 - DNA, 25 bp, SARS Virus
caatggtcacatcagtaagcgtgta

SEQ ID NO: 214599 - DNA, 25 bp, SARS Virus
aatggtcacatgcgtaagcgtgtat

SEQ ID NO: 214600 - DNA, 25 bp, SARS Virus
atggtcacatgactaagcgtgtatt

SEQ ID NO: 214601 - DNA, 25 bp, SARS Virus
tggtcacatgagcaagcgtgtattc

SEQ ID NO: 214602 - DNA, 25 bp, SARS Virus
ggtcacatgagtcagcgtgtattct

SEQ ID NO: 214603 - DNA, 25 bp, SARS Virus
gtcacatgagtacgcgtgtattctt

SEQ ID NO: 214604 - DNA, 25 bp, SARS Virus
tcacatgagtaaccgtgtattctta

SEQ ID NO: 214605 - DNA, 25 bp, SARS Virus
cacatgagtaagcgtgtattcttac

SEQ ID NO: 214606 - DNA, 25 bp, SARS Virus
acatgagtaagcctgtattcttaca

SEQ ID NO: 214607 - DNA, 25 bp, SARS Virus
catgagtaagcgcgtattcttacat

SEQ ID NO: 214608 - DNA, 25 bp, SARS Virus
atgagtaagcgtctattcttacatg

SEQ ID NO: 214609 - DNA, 25 bp, SARS Virus
tgagtaagcgtgcattcttacatgg

SEQ ID NO: 214610 - DNA, 25 bp, SARS Virus
gagtaagcgtgtcttcttacatgga

SEQ ID NO: 214611 - DNA, 25 bp, SARS Virus
agtaagcgtgtactcttacatggaa

SEQ ID NO: 214612 - DNA, 25 bp, SARS Virus
gtaagcgtgtatccttacatggaac

SEQ ID NO: 214613 - DNA, 25 bp, SARS Virus
taagcgtgtattcttacatggaacg

SEQ ID NO: 214614 - DNA, 25 bp, SARS Virus
aagcgtgtattcctacatggaacga

SEQ ID NO: 214615 - DNA, 25 bp, SARS Virus
agcgtgtattctcacatggaacgac

SEQ ID NO: 214616 - DNA, 25 bp, SARS Virus
gcgtgtattcttccatggaacgaca

SEQ ID NO: 214617 - DNA, 25 bp, SARS Virus
cgtgtattcttacatggaacgacat

SEQ ID NO: 214618 - DNA, 25 bp, SARS Virus
gtgtattcttacctggaacgacatt

SEQ ID NO: 214619 - DNA, 25 bp, SARS Virus
tgtattcttacacggaacgacatta

SEQ ID NO: 214620 - DNA, 25 bp, SARS Virus
gtattcttacatcgaacgacattaa

SEQ ID NO: 214621 - DNA, 25 bp, SARS Virus
tattcttacatgcaacgacattaaa

SEQ ID NO: 214622 - DNA, 25 bp, SARS Virus
attcttacatggcacgacattaaat

SEQ ID NO: 214623 - DNA, 25 bp, SARS Virus
ttcttacatggaccgacattaaata

SEQ ID NO: 214624 - DNA, 25 bp, SARS Virus
tcttacatggaacgacattaaatat

SEQ ID NO: 214625 - DNA, 25 bp, SARS Virus
cttacatggaaccacattaaatatg

SEQ ID NO: 214626 - DNA, 25 bp, SARS Virus
ttacatggaacgccattaaatatga

SEQ ID NO: 214627 - DNA, 25 bp, SARS Virus
tacatggaacgacattaaatatgag

SEQ ID NO: 214628 - DNA, 25 bp, SARS Virus
acatggaacgaccttaaatatgagt

SEQ ID NO: 214629 - DNA, 25 bp, SARS Virus
catggaacgacactaaatatgagtc

SEQ ID NO: 214630 - DNA, 25 bp, SARS Virus
atggaacgacatcaaatatgagtcg

SEQ ID NO: 214631 - DNA, 25 bp, SARS Virus
tggaacgacattcaatatgagtcgt

SEQ ID NO: 214632 - DNA, 25 bp, SARS Virus
ggaacgacattacatatgagtcgtc

SEQ ID NO: 214633 - DNA, 25 bp, SARS Virus
gaacgacattaactatgagtcgtcc

SEQ ID NO: 214634 - DNA, 25 bp, SARS Virus
aacgacattaaacatgagtcgtcca

SEQ ID NO: 214635 - DNA, 25 bp, SARS Virus
acgacattaaatctgagtcgtccac

SEQ ID NO: 214636 - DNA, 25 bp, SARS Virus
cgacattaaatacgagtcgtccacc

SEQ ID NO: 214637 - DNA, 25 bp, SARS Virus
gacattaaatatcagtcgtccacca

SEQ ID NO: 214638 - DNA, 25 bp, SARS Virus
acattaaatatgcgtcgtccaccac

SEQ ID NO: 214639 - DNA, 25 bp, SARS Virus
cattaaatatgactcgtccaccacg

SEQ ID NO: 214640 - DNA, 25 bp, SARS Virus
attaaatatgagccgtccaccacgt

SEQ ID NO: 214641 - DNA, 25 bp, SARS Virus
ttaaatatgagtcgtccaccacgtc

SEQ ID NO: 214642 - DNA, 25 bp, SARS Virus
taaatatgagtcctccaccacgtct

SEQ ID NO: 214643 - DNA, 25 bp, SARS Virus
aaatatgagtcgcccaccacgtctg

SEQ ID NO: 214644 - DNA, 25 bp, SARS Virus
aatatgagtcgtccaccacgtctgt

SEQ ID NO: 214645 - DNA, 25 bp, SARS Virus
atatgagtcgtccaccacgtctgta

SEQ ID NO: 214646 - DNA, 25 bp, SARS Virus
tatgagtcgtcccccacgtctgtag

SEQ ID NO: 214647 - DNA, 25 bp, SARS Virus
atgagtcgtccaccacgtctgtagt

SEQ ID NO: 214648 - DNA, 25 bp, SARS Virus
tgagtcgtccaccacgtctgtagta

SEQ ID NO: 214649 - DNA, 25 bp, SARS Virus
gagtcgtccaccccgtctgtagtat

SEQ ID NO: 214650 - DNA, 25 bp, SARS Virus
agtcgtccaccacgtctgtagtatt

SEQ ID NO: 214651 - DNA, 25 bp, SARS Virus
gtcgtccaccacctctgtagtattg

SEQ ID NO: 214652 - DNA, 25 bp, SARS Virus
tcgtccaccacgcctgtagtattgt

SEQ ID NO: 214653 - DNA, 25 bp, SARS Virus
cgtccaccacgtctgtagtattgtt

SEQ ID NO: 214654 - DNA, 25 bp, SARS Virus
gtccaccacgtccgtagtattgttt

SEQ ID NO: 214655 - DNA, 25 bp, SARS Virus
tccaccacgtctctagtattgtttt

SEQ ID NO: 214656 - DNA, 25 bp, SARS Virus
ccaccacgtctgcagtattgttttc

SEQ ID NO: 214657 - DNA, 25 bp, SARS Virus
caccacgtctgtcgtattgttttct

SEQ ID NO: 214658 - DNA, 25 bp, SARS Virus
accacgtctgtactattgttttctt

SEQ ID NO: 214659 - DNA, 25 bp, SARS Virus
ccacgtctgtagcattgttttcttc

SEQ ID NO: 214660 - DNA, 25 bp, SARS Virus
cacgtctgtagtcttgttttcttct

SEQ ID NO: 214661 - DNA, 25 bp, SARS Virus
acgtctgtagtactgttttcttctg

SEQ ID NO: 214662 - DNA, 25 bp, SARS Virus
cgtctgtagtatcgttttcttctga

SEQ ID NO: 214663 - DNA, 25 bp, SARS Virus
gtctgtagtattcttttcttctgag

SEQ ID NO: 214664 - DNA, 25 bp, SARS Virus
tctgtagtattgctttcttctgaga

SEQ ID NO: 214665 - DNA, 25 bp, SARS Virus
ctgtagtattgtcttcttctgagaa

SEQ ID NO: 214666 - DNA, 25 bp, SARS Virus
tgtagtattgttctcttctgagaac

SEQ ID NO: 214667 - DNA, 25 bp, SARS Virus
gtagtattgtttccttctgagaaca

SEQ ID NO: 214668 - DNA, 25 bp, SARS Virus
tagtattgttttcttctgagaacaa

SEQ ID NO: 214669 - DNA, 25 bp, SARS Virus
agtattgttttcctctgagaacaac

SEQ ID NO: 214670 - DNA, 25 bp, SARS Virus
gtattgttttctcctgagaacaaca

SEQ ID NO: 214671 - DNA, 25 bp, SARS Virus
tattgttttcttctgagaacaacat

SEQ ID NO: 214672 - DNA, 25 bp, SARS Virus
attgttttcttccgagaacaacatg

SEQ ID NO: 214673 - DNA, 25 bp, SARS Virus
ttgttttcttctcagaacaacatga

SEQ ID NO: 214674 - DNA, 25 bp, SARS Virus
tgttttcttctgcgaacaacatgat

SEQ ID NO: 214675 - DNA, 25 bp, SARS Virus
gttttcttctgacaacaacatgatc

SEQ ID NO: 214676 - DNA, 25 bp, SARS Virus
ttttcttctgagcacaacatgatct

SEQ ID NO: 214677 - DNA, 25 bp, SARS Virus
tttcttctgagaccaacatgatcta

SEQ ID NO: 214678 - DNA, 25 bp, SARS Virus
ttcttctgagaacaacatgatctat

SEQ ID NO: 214679 - DNA, 25 bp, SARS Virus
tcttctgagaaccacatgatctata

SEQ ID NO: 214680 - DNA, 25 bp, SARS Virus
cttctgagaacaccatgatctataa

SEQ ID NO: 214681 - DNA, 25 bp, SARS Virus
ttctgagaacaacatgatctataac

SEQ ID NO: 214682 - DNA, 25 bp, SARS Virus
tctgagaacaacctgatctataaca

SEQ ID NO: 214683 - DNA, 25 bp, SARS Virus
ctgagaacaacacgatctataacac

SEQ ID NO: 214684 - DNA, 25 bp, SARS Virus
tgagaacaacatcatctataacaca

SEQ ID NO: 214685 - DNA, 25 bp, SARS Virus
gagaacaacatgctctataacacat

SEQ ID NO: 214686 - DNA, 25 bp, SARS Virus
agaacaacatgacctataacacatc

SEQ ID NO: 214687 - DNA, 25 bp, SARS Virus
gaacaacatgatctataacacatcg

SEQ ID NO: 214688 - DNA, 25 bp, SARS Virus
aacaacatgatccataacacatcgt

SEQ ID NO: 214689 - DNA, 25 bp, SARS Virus
acaacatgatctctaacacatcgta

SEQ ID NO: 214690 - DNA, 25 bp, SARS Virus
caacatgatctacaacacatcgtag

SEQ ID NO: 214691 - DNA, 25 bp, SARS Virus
aacatgatctatcacacatcgtagt

SEQ ID NO: 214692 - DNA, 25 bp, SARS Virus
acatgatctataccacatcgtagtg

SEQ ID NO: 214693 - DNA, 25 bp, SARS Virus
catgatctataacacatcgtagtgc

SEQ ID NO: 214694 - DNA, 25 bp, SARS Virus
atgatctataacccatcgtagtgct

SEQ ID NO: 214695 - DNA, 25 bp, SARS Virus
tgatctataacacatcgtagtgctg

SEQ ID NO: 214696 - DNA, 25 bp, SARS Virus
gatctataacacctcgtagtgctgg

SEQ ID NO: 214697 - DNA, 25 bp, SARS Virus
atctataacacaccgtagtgctggt

SEQ ID NO: 214698 - DNA, 25 bp, SARS Virus
tctataacacatcgtagtgctggtg

SEQ ID NO: 214699 - DNA, 25 bp, SARS Virus
ctataacacatcctagtgctggtgt

SEQ ID NO: 214700 - DNA, 25 bp, SARS Virus
tataacacatcgcagtgctggtgtg

SEQ ID NO: 214701 - DNA, 25 bp, SARS Virus
ataacacatcgtcgtgctggtgtgt

SEQ ID NO: 214702 - DNA, 25 bp, SARS Virus
taacacatcgtactgctggtgtgtg

SEQ ID NO: 214703 - DNA, 25 bp, SARS Virus
aacacatcgtagcgctggtgtgtgt

SEQ ID NO: 214704 - DNA, 25 bp, SARS Virus
acacatcgtagtcctggtgtgtgtg

SEQ ID NO: 214705 - DNA, 25 bp, SARS Virus
cacatcgtagtgctggtgtgtgtgt

SEQ ID NO: 214706 - DNA, 25 bp, SARS Virus
acatcgtagtgccggtgtgtgtgta

SEQ ID NO: 214707 - DNA, 25 bp, SARS Virus
catcgtagtgctcgtgtgtgtgtac

SEQ ID NO: 214708 - DNA, 25 bp, SARS Virus
atcgtagtgctgctgtgtgtgtacc

SEQ ID NO: 214709 - DNA, 25 bp, SARS Virus
tcgtagtgctggcgtgtgtgtacct

SEQ ID NO: 214710 - DNA, 25 bp, SARS Virus
cgtagtgctggtctgtgtgtacctt

SEQ ID NO: 214711 - DNA, 25 bp, SARS Virus
gtagtgctggtgcgtgtgtacctta

SEQ ID NO: 214712 - DNA, 25 bp, SARS Virus
tagtgctggtgtctgtgtaccttac

SEQ ID NO: 214713 - DNA, 25 bp, SARS Virus
agtgctggtgtgcgtgtaccttacc

SEQ ID NO: 214714 - DNA, 25 bp, SARS Virus
gtgctggtgtgtctgtaccttacct

SEQ ID NO: 214715 - DNA, 25 bp, SARS Virus
tgctggtgtgtgcgtaccttacctt

SEQ ID NO: 214716 - DNA, 25 bp, SARS Virus
gctggtgtgtgtctaccttaccttt

SEQ ID NO: 214717 - DNA, 25 bp, SARS Virus
ctggtgtgtgtgcaccttacctttg

SEQ ID NO: 214718 - DNA, 25 bp, SARS Virus
tggtgtgtgtgtcccttacctttgt

SEQ ID NO: 214719 - DNA, 25 bp, SARS Virus
ggtgtgtgtgtaccttacctttgtg

SEQ ID NO: 214720 - DNA, 25 bp, SARS Virus
gtgtgtgtgtaccttacctttgtgg

SEQ ID NO: 214721 - DNA, 25 bp, SARS Virus
tgtgtgtgtaccctacctttgtgga

SEQ ID NO: 214722 - DNA, 25 bp, SARS Virus
gtgtgtgtacctcacctttgtggac

SEQ ID NO: 214723 - DNA, 25 bp, SARS Virus
tgtgtgtaccttccctttgtggaca

SEQ ID NO: 214724 - DNA, 25 bp, SARS Virus
gtgtgtaccttacctttgtggacag

SEQ ID NO: 214725 - DNA, 25 bp, SARS Virus
tgtgtaccttacctttgtggacaga

SEQ ID NO: 214726 - DNA, 25 bp, SARS Virus
gtgtaccttacccttgtggacagaa

SEQ ID NO: 214727 - DNA, 25 bp, SARS Virus
tgtaccttacctctgtggacagaat

SEQ ID NO: 214728 - DNA, 25 bp, SARS Virus
gtaccttaccttcgtggacagaatt

SEQ ID NO: 214729 - DNA, 25 bp, SARS Virus
taccttacctttctggacagaattc

SEQ ID NO: 214730 - DNA, 25 bp, SARS Virus
accttacctttgcggacagaattct

SEQ ID NO: 214731 - DNA, 25 bp, SARS Virus
ccttacctttgtcgacagaattcta

SEQ ID NO: 214732 - DNA, 25 bp, SARS Virus
cttacctttgtgcacagaattctaa

SEQ ID NO: 214733 - DNA, 25 bp, SARS Virus
ttacctttgtggccagaattctaat

SEQ ID NO: 214734 - DNA, 25 bp, SARS Virus
tacctttgtggacagaattctaata

SEQ ID NO: 214735 - DNA, 25 bp, SARS Virus
acctttgtggaccgaattctaatag

SEQ ID NO: 214736 - DNA, 25 bp, SARS Virus
cctttgtggacacaattctaatagt

SEQ ID NO: 214737 - DNA, 25 bp, SARS Virus
ctttgtggacagcattctaatagta

SEQ ID NO: 214738 - DNA, 25 bp, SARS Virus
tttgtggacagacttctaatagtat

SEQ ID NO: 214739 - DNA, 25 bp, SARS Virus
ttgtggacagaactctaatagtatt

SEQ ID NO: 214740 - DNA, 25 bp, SARS Virus
tgtggacagaatcctaatagtattc

SEQ ID NO: 214741 - DNA, 25 bp, SARS Virus
gtggacagaattctaatagtattct

SEQ ID NO: 214742 - DNA, 25 bp, SARS Virus
tggacagaattccaatagtattcta

SEQ ID NO: 214743 - DNA, 25 bp, SARS Virus
ggacagaattctcatagtattctat

SEQ ID NO: 214744 - DNA, 25 bp, SARS Virus
gacagaattctactagtattctatc

SEQ ID NO: 214745 - DNA, 25 bp, SARS Virus
acagaattctaacagtattctatct

SEQ ID NO: 214746 - DNA, 25 bp, SARS Virus
cagaattctaatcgtattctatctc

SEQ ID NO: 214747 - DNA, 25 bp, SARS Virus
agaattctaatactattctatctca

SEQ ID NO: 214748 - DNA, 25 bp, SARS Virus
gaattctaatagcattctatctcat

SEQ ID NO: 214749 - DNA, 25 bp, SARS Virus
aattctaatagtcttctatctcatg

SEQ ID NO: 214750 - DNA, 25 bp, SARS Virus
attctaatagtactctatctcatgg

SEQ ID NO: 214751 - DNA, 25 bp, SARS Virus
ttctaatagtatcctatctcatggg

SEQ ID NO: 214752 - DNA, 25 bp, SARS Virus
tctaatagtattctatctcatgggt

SEQ ID NO: 214753 - DNA, 25 bp, SARS Virus
atttagtagtcggttaaaacacaat

SEQ ID NO: 214754 - DNA, 25 bp, SARS Virus
tttagtagtcgtgtaaaacacaatc

SEQ ID NO: 214755 - DNA, 25 bp, SARS Virus
ttagtagtcgttgaaaacacaatct

SEQ ID NO: 214756 - DNA, 25 bp, SARS Virus
tagtagtcgtttgaaacacaatctt

SEQ ID NO: 214757 - DNA, 25 bp, SARS Virus
agtagtcgtttagaacacaatcttg

SEQ ID NO: 214758 - DNA, 25 bp, SARS Virus
gtagtcgtttaagacacaatcttgt

SEQ ID NO: 214759 - DNA, 25 bp, SARS Virus
tagtcgtttaaagcacaatcttgta

SEQ ID NO: 214760 - DNA, 25 bp, SARS Virus
agtcgtttaaaagacaatcttgtac

SEQ ID NO: 214761 - DNA, 25 bp, SARS Virus
gtcgtttaaaacgcaatcttgtaca

SEQ ID NO: 214762 - DNA, 25 bp, SARS Virus
tcgtttaaaacagaatcttgtacac

SEQ ID NO: 214763 - DNA, 25 bp, SARS Virus
cgtttaaaacacgatcttgtacact

SEQ ID NO: 214764 - DNA, 25 bp, SARS Virus
gtttaaaacacagtcttgtacactc

SEQ ID NO: 214765 - DNA, 25 bp, SARS Virus
tttaaaacacaagcttgtacactca

SEQ ID NO: 214766 - DNA, 25 bp, SARS Virus
ttaaaacacaatgttgtacactcaa

SEQ ID NO: 214767 - DNA, 25 bp, SARS Virus
taaaacacaatcgtgtacactcaaa

SEQ ID NO: 214768 - DNA, 25 bp, SARS Virus
aaaacacaatctggtacactcaaac

SEQ ID NO: 214769 - DNA, 25 bp, SARS Virus
aaacacaatcttgtacactcaaact

SEQ ID NO: 214770 - DNA, 25 bp, SARS Virus
aacacaatcttggacactcaaactt

SEQ ID NO: 214771 - DNA, 25 bp, SARS Virus
acacaatcttgtgcactcaaacttt

SEQ ID NO: 214772 - DNA, 25 bp, SARS Virus
cacaatcttgtagactcaaacttta

SEQ ID NO: 214773 - DNA, 25 bp, SARS Virus
acaatcttgtacgctcaaactttaa

SEQ ID NO: 214774 - DNA, 25 bp, SARS Virus
caatcttgtacagtcaaactttaat

SEQ ID NO: 214775 - DNA, 25 bp, SARS Virus
aatcttgtacacgcaaactttaata

SEQ ID NO: 214776 - DNA, 25 bp, SARS Virus
atcttgtacactgaaactttaatag

SEQ ID NO: 214777 - DNA, 25 bp, SARS Virus
tcttgtacactcgaactttaatagt

SEQ ID NO: 214778 - DNA, 25 bp, SARS Virus
cttgtacactcagactttaatagtt

SEQ ID NO: 214779 - DNA, 25 bp, SARS Virus
ttgtacactcaagctttaatagttt

SEQ ID NO: 214780 - DNA, 25 bp, SARS Virus
tgtacactcaaagtttaatagtttt

SEQ ID NO: 214781 - DNA, 25 bp, SARS Virus
gtacactcaaacgttaatagttttg

SEQ ID NO: 214782 - DNA, 25 bp, SARS Virus
tacactcaaactgtaatagttttga

SEQ ID NO: 214783 - DNA, 25 bp, SARS Virus
acactcaaacttgaatagttttgag

SEQ ID NO: 214784 - DNA, 25 bp, SARS Virus
cactcaaactttgatagttttgagc

SEQ ID NO: 214785 - DNA, 25 bp, SARS Virus
actcaaactttagtagttttgagcg

SEQ ID NO: 214786 - DNA, 25 bp, SARS Virus
ctcaaactttaagagttttgagcgt

SEQ ID NO: 214787 - DNA, 25 bp, SARS Virus
tcaaactttaatggttttgagcgta

SEQ ID NO: 214788 - DNA, 25 bp, SARS Virus
caaactttaatagttttgagcgtaa

SEQ ID NO: 214789 - DNA, 25 bp, SARS Virus
aaactttaataggtttgagcgtaaa

SEQ ID NO: 214790 - DNA, 25 bp, SARS Virus
aactttaatagtgttgagcgtaaac

SEQ ID NO: 214791 - DNA, 25 bp, SARS Virus
actttaatagttgtgagcgtaaacc

SEQ ID NO: 214792 - DNA, 25 bp, SARS Virus
ctttaatagtttggagcgtaaacca

SEQ ID NO: 214793 - DNA, 25 bp, SARS Virus
tttaatagttttgagcgtaaaccat

SEQ ID NO: 214794 - DNA, 25 bp, SARS Virus
ttaatagttttgggcgtaaaccatt

SEQ ID NO: 214795 - DNA, 25 bp, SARS Virus
taatagttttgagcgtaaaccatta

SEQ ID NO: 214796 - DNA, 25 bp, SARS Virus
aatagttttgagggtaaaccattac

SEQ ID NO: 214797 - DNA, 25 bp, SARS Virus
atagttttgagcgtaaaccattacc

SEQ ID NO: 214798 - DNA, 25 bp, SARS Virus
tagttttgagcggaaaccattacca

SEQ ID NO: 214799 - DNA, 25 bp, SARS Virus
agttttgagcgtgaaccattaccaa

SEQ ID NO: 214800 - DNA, 25 bp, SARS Virus
gttttgagcgtagaccattaccaac

SEQ ID NO: 214801 - DNA, 25 bp, SARS Virus
ttttgagcgtaagccattaccaact

SEQ ID NO: 214802 - DNA, 25 bp, SARS Virus
tttgagcgtaaagcattaccaactc

SEQ ID NO: 214803 - DNA, 25 bp, SARS Virus
ttgagcgtaaacgattaccaactca

SEQ ID NO: 214804 - DNA, 25 bp, SARS Virus
tgagcgtaaaccgttaccaactcaa

SEQ ID NO: 214805 - DNA, 25 bp, SARS Virus
gagcgtaaaccagtaccaactcaac

SEQ ID NO: 214806 - DNA, 25 bp, SARS Virus
agcgtaaaccatgaccaactcaacc

SEQ ID NO: 214807 - DNA, 25 bp, SARS Virus
gcgtaaaccattgccaactcaacca

SEQ ID NO: 214808 - DNA, 25 bp, SARS Virus
cgtaaaccattagcaactcaaccat

SEQ ID NO: 214809 - DNA, 25 bp, SARS Virus
gtaaaccattacgaactcaaccatg

SEQ ID NO: 214810 - DNA, 25 bp, SARS Virus
taaaccattaccgactcaaccatgt

SEQ ID NO: 214811 - DNA, 25 bp, SARS Virus
aaaccattaccagctcaaccatgtt

SEQ ID NO: 214812 - DNA, 25 bp, SARS Virus
aaccattaccaagtcaaccatgttc

SEQ ID NO: 214813 - DNA, 25 bp, SARS Virus
accattaccaacgcaaccatgttcc

SEQ ID NO: 214814 - DNA, 25 bp, SARS Virus
ccattaccaactgaaccatgttcca

SEQ ID NO: 214815 - DNA, 25 bp, SARS Virus
cattaccaactcgaccatgttccag

SEQ ID NO: 214816 - DNA, 25 bp, SARS Virus
attaccaactcagccatgttccaga

SEQ ID NO: 214817 - DNA, 25 bp, SARS Virus
ttaccaactcaagcatgttccagat

SEQ ID NO: 214818 - DNA, 25 bp, SARS Virus
taccaactcaacgatgttccagata

SEQ ID NO: 214819 - DNA, 25 bp, SARS Virus
accaactcaaccgtgttccagatat

SEQ ID NO: 214820 - DNA, 25 bp, SARS Virus
ccaactcaaccaggttccagatatc

SEQ ID NO: 214821 - DNA, 25 bp, SARS Virus
caactcaaccatgttccagatatcc

SEQ ID NO: 214822 - DNA, 25 bp, SARS Virus
aactcaaccatggtccagatatccg

SEQ ID NO: 214823 - DNA, 25 bp, SARS Virus
actcaaccatgtgccagatatccga

SEQ ID NO: 214824 - DNA, 25 bp, SARS Virus
ctcaaccatgttgcagatatccgac

SEQ ID NO: 214825 - DNA, 25 bp, SARS Virus
tcaaccatgttcgagatatccgacg

SEQ ID NO: 214826 - DNA, 25 bp, SARS Virus
caaccatgttccggatatccgacga

SEQ ID NO: 214827 - DNA, 25 bp, SARS Virus
aaccatgttccagatatccgacgag

SEQ ID NO: 214828 - DNA, 25 bp, SARS Virus
accatgttccaggtatccgacgaga

SEQ ID NO: 214829 - DNA, 25 bp, SARS Virus
ccatgttccagagatccgacgagac

SEQ ID NO: 214830 - DNA, 25 bp, SARS Virus
catgttccagatgtccgacgagaca

SEQ ID NO: 214831 - DNA, 25 bp, SARS Virus
atgttccagatagccgacgagacat

SEQ ID NO: 214832 - DNA, 25 bp, SARS Virus
tgttccagatatgcgacgagacata

SEQ ID NO: 214833 - DNA, 25 bp, SARS Virus
gttccagatatcggacgagacatat

SEQ ID NO: 214834 - DNA, 25 bp, SARS Virus
ttccagatatccgacgagacatatc

SEQ ID NO: 214835 - DNA, 25 bp, SARS Virus
tccagatatccggcgagacatatca

SEQ ID NO: 214836 - DNA, 25 bp, SARS Virus
ccagatatccgaggagacatatcat

SEQ ID NO: 214837 - DNA, 25 bp, SARS Virus
cagatatccgacgagacatatcatt

SEQ ID NO: 214838 - DNA, 25 bp, SARS Virus
agatatccgacgggacatatcattc

SEQ ID NO: 214839 - DNA, 25 bp, SARS Virus
gatatccgacgagacatatcattcg

SEQ ID NO: 214840 - DNA, 25 bp, SARS Virus
atatccgacgaggcatatcattcgt

SEQ ID NO: 214841 - DNA, 25 bp, SARS Virus
tatccgacgagagatatcattcgta

SEQ ID NO: 214842 - DNA, 25 bp, SARS Virus
atccgacgagacgtatcattcgtaa

SEQ ID NO: 214843 - DNA, 25 bp, SARS Virus
tccgacgagacagatcattcgtaat

SEQ ID NO: 214844 - DNA, 25 bp, SARS Virus
ccgacgagacatgtcattcgtaata

SEQ ID NO: 214845 - DNA, 25 bp, SARS Virus
cgacgagacatagcattcgtaatag

SEQ ID NO: 214846 - DNA, 25 bp, SARS Virus
gacgagacatatgattcgtaatagg

SEQ ID NO: 214847 - DNA, 25 bp, SARS Virus
acgagacatatcgttcgtaatagga

SEQ ID NO: 214848 - DNA, 25 bp, SARS Virus
cgagacatatcagtcgtaataggaa

SEQ ID NO: 214849 - DNA, 25 bp, SARS Virus
gagacatatcatgcgtaataggaaa

SEQ ID NO: 214850 - DNA, 25 bp, SARS Virus
agacatatcattggtaataggaaaa

SEQ ID NO: 214851 - DNA, 25 bp, SARS Virus
gacatatcattcgtaataggaaaaa

SEQ ID NO: 214852 - DNA, 25 bp, SARS Virus
acatatcattcggaataggaaaaat

SEQ ID NO: 214853 - DNA, 25 bp, SARS Virus
catatcattcgtgataggaaaaata

SEQ ID NO: 214854 - DNA, 25 bp, SARS Virus
atatcattcgtagtaggaaaaatat

SEQ ID NO: 214855 - DNA, 25 bp, SARS Virus
tatcattcgtaagaggaaaaatatt

SEQ ID NO: 214856 - DNA, 25 bp, SARS Virus
atcattcgtaatgggaaaaatatta

SEQ ID NO: 214857 - DNA, 25 bp, SARS Virus
tcattcgtaataggaaaaatattat

SEQ ID NO: 214858 - DNA, 25 bp, SARS Virus
cattcgtaataggaaaaatattatg

SEQ ID NO: 214859 - DNA, 25 bp, SARS Virus
attcgtaatagggaaaatattatgg

SEQ ID NO: 214860 - DNA, 25 bp, SARS Virus
ttcgtaataggagaaatattatggg

SEQ ID NO: 214861 - DNA, 25 bp, SARS Virus
tcgtaataggaagaatattatgggt

SEQ ID NO: 214862 - DNA, 25 bp, SARS Virus
cgtaataggaaagatattatgggta

SEQ ID NO: 214863 - DNA, 25 bp, SARS Virus
gtaataggaaaagtattatgggtag

SEQ ID NO: 214864 - DNA, 25 bp, SARS Virus
taataggaaaaagattatgggtagg

SEQ ID NO: 214865 - DNA, 25 bp, SARS Virus
aataggaaaaatgttatgggtaggt

SEQ ID NO: 214866 - DNA, 25 bp, SARS Virus
ataggaaaaatagtatgggtaggtt

SEQ ID NO: 214867 - DNA, 25 bp, SARS Virus
taggaaaaatatgatgggtaggtta

SEQ ID NO: 214868 - DNA, 25 bp, SARS Virus
aggaaaaatattgtgggtaggttaa

SEQ ID NO: 214869 - DNA, 25 bp, SARS Virus
ggaaaaatattaggggtaggttaaa

SEQ ID NO: 214870 - DNA, 25 bp, SARS Virus
gaaaaatattatgggtaggttaaaa

SEQ ID NO: 214871 - DNA, 25 bp, SARS Virus
aaaaatattatgggtaggttaaaac

SEQ ID NO: 214872 - DNA, 25 bp, SARS Virus
aaaatattatgggtaggttaaaacc

SEQ ID NO: 214873 - DNA, 25 bp, SARS Virus
aaatattatggggaggttaaaacca

SEQ ID NO: 214874 - DNA, 25 bp, SARS Virus
aatattatgggtgggttaaaaccaa

SEQ ID NO: 214875 - DNA, 25 bp, SARS Virus
atattatgggtaggttaaaaccaag

SEQ ID NO: 214876 - DNA, 25 bp, SARS Virus
tattatgggtaggttaaaaccaagt

SEQ ID NO: 214877 - DNA, 25 bp, SARS Virus
attatgggtagggtaaaaccaagtt

SEQ ID NO: 214878 - DNA, 25 bp, SARS Virus
ttatgggtaggtgaaaaccaagtta

SEQ ID NO: 214879 - DNA, 25 bp, SARS Virus
tatgggtaggttgaaaccaagttag

SEQ ID NO: 214880 - DNA, 25 bp, SARS Virus
atgggtaggttagaaccaagttaga

SEQ ID NO: 214881 - DNA, 25 bp, SARS Virus
tgggtaggttaagaccaagttagag

SEQ ID NO: 214882 - DNA, 25 bp, SARS Virus
gggtaggttaaagccaagttagaga

SEQ ID NO: 214883 - DNA, 25 bp, SARS Virus
ggtaggttaaaagcaagttagagac

SEQ ID NO: 214884 - DNA, 25 bp, SARS Virus
gtaggttaaaacgaagttagagaca

SEQ ID NO: 214885 - DNA, 25 bp, SARS Virus
taggttaaaaccgagttagagacac

SEQ ID NO: 214886 - DNA, 25 bp, SARS Virus
aggttaaaaccaggttagagacaca

SEQ ID NO: 214887 - DNA, 25 bp, SARS Virus
ggttaaaaccaagttagagacacat

SEQ ID NO: 214888 - DNA, 25 bp, SARS Virus
gttaaaaccaaggtagagacacatt

SEQ ID NO: 214889 - DNA, 25 bp, SARS Virus
ttaaaaccaagtgagagacacattc

SEQ ID NO: 214890 - DNA, 25 bp, SARS Virus
taaaaccaagttggagacacattca

SEQ ID NO: 214891 - DNA, 25 bp, SARS Virus
aaaaccaagttagagacacattcat

SEQ ID NO: 214892 - DNA, 25 bp, SARS Virus
aaaccaagttagggacacattcatt

SEQ ID NO: 214893 - DNA, 25 bp, SARS Virus
aaccaagttagagacacattcattg

SEQ ID NO: 214894 - DNA, 25 bp, SARS Virus
accaagttagaggcacattcattga

SEQ ID NO: 214895 - DNA, 25 bp, SARS Virus
ccaagttagagagacattcattgag

SEQ ID NO: 214896 - DNA, 25 bp, SARS Virus
caagttagagacgcattcattgagg

SEQ ID NO: 214897 - DNA, 25 bp, SARS Virus
aagttagagacagattcattgaggt

SEQ ID NO: 214898 - DNA, 25 bp, SARS Virus
agttagagacacgttcattgaggta

SEQ ID NO: 214899 - DNA, 25 bp, SARS Virus
gttagagacacagtcattgaggtag

SEQ ID NO: 214900 - DNA, 25 bp, SARS Virus
ttagagacacatgcattgaggtagc

SEQ ID NO: 214901 - DNA, 25 bp, SARS Virus
tagagacacattgattgaggtagct

SEQ ID NO: 214902 - DNA, 25 bp, SARS Virus
agagacacattcgttgaggtagctc

SEQ ID NO: 214903 - DNA, 25 bp, SARS Virus
gagacacattcagtgaggtagctca

SEQ ID NO: 214904 - DNA, 25 bp, SARS Virus
agacacattcatggaggtagctcaa

SEQ ID NO: 214905 - DNA, 25 bp, SARS Virus
gacacattcattgaggtagctcaaa

SEQ ID NO: 214906 - DNA, 25 bp, SARS Virus
acacattcattggggtagctcaaat

SEQ ID NO: 214907 - DNA, 25 bp, SARS Virus
cacattcattgaggtagctcaaata

SEQ ID NO: 214908 - DNA, 25 bp, SARS Virus
acattcattgaggtagctcaaatat

SEQ ID NO: 214909 - DNA, 25 bp, SARS Virus
cattcattgagggagctcaaatatg

SEQ ID NO: 214910 - DNA, 25 bp, SARS Virus
attcattgaggtggctcaaatatgc

SEQ ID NO: 214911 - DNA, 25 bp, SARS Virus
ttcattgaggtagctcaaatatgct

SEQ ID NO: 214912 - DNA, 25 bp, SARS Virus
tcattgaggtaggtcaaatatgctg

SEQ ID NO: 214913 - DNA, 25 bp, SARS Virus
cattgaggtagcgcaaatatgctgt

SEQ ID NO: 214914 - DNA, 25 bp, SARS Virus
attgaggtagctgaaatatgctgtg

SEQ ID NO: 214915 - DNA, 25 bp, SARS Virus
ttgaggtagctcgaatatgctgtgt

SEQ ID NO: 214916 - DNA, 25 bp, SARS Virus
tgaggtagctcagatatgctgtgtc

SEQ ID NO: 214917 - DNA, 25 bp, SARS Virus
gaggtagctcaagtatgctgtgtcc

SEQ ID NO: 214918 - DNA, 25 bp, SARS Virus
aggtagctcaaagatgctgtgtccg

SEQ ID NO: 214919 - DNA, 25 bp, SARS Virus
ggtagctcaaatgtgctgtgtccga

SEQ ID NO: 214920 - DNA, 25 bp, SARS Virus
gtagctcaaataggctgtgtccgaa

SEQ ID NO: 214921 - DNA, 25 bp, SARS Virus
tagctcaaatatgctgtgtccgaac

SEQ ID NO: 214922 - DNA, 25 bp, SARS Virus
agctcaaatatggtgtgtccgaact

SEQ ID NO: 214923 - DNA, 25 bp, SARS Virus
gctcaaatatgcggtgtccgaacta

SEQ ID NO: 214924 - DNA, 25 bp, SARS Virus
ctcaaatatgctgtgtccgaactac

SEQ ID NO: 214925 - DNA, 25 bp, SARS Virus
tcaaatatgctgggtccgaactacc

SEQ ID NO: 214926 - DNA, 25 bp, SARS Virus
caaatatgctgtgtccgaactacca

SEQ ID NO: 214927 - DNA, 25 bp, SARS Virus
aaatatgctgtggccgaactaccaa

SEQ ID NO: 214928 - DNA, 25 bp, SARS Virus
aatatgctgtgtgcgaactaccaac

SEQ ID NO: 214929 - DNA, 25 bp, SARS Virus
atatgctgtgtcggaactaccaaca

SEQ ID NO: 214930 - DNA, 25 bp, SARS Virus
tatgctgtgtccgaactaccaacat

SEQ ID NO: 214931 - DNA, 25 bp, SARS Virus
atgctgtgtccggactaccaacatc

SEQ ID NO: 214932 - DNA, 25 bp, SARS Virus
tgctgtgtccgagctaccaacatca

SEQ ID NO: 214933 - DNA, 25 bp, SARS Virus
gctgtgtccgaagtaccaacatcac

SEQ ID NO: 214934 - DNA, 25 bp, SARS Virus
ctgtgtccgaacgaccaacatcaca

SEQ ID NO: 214935 - DNA, 25 bp, SARS Virus
tgtgtccgaactgccaacatcacat

SEQ ID NO: 214936 - DNA, 25 bp, SARS Virus
gtgtccgaactagcaacatcacatt

SEQ ID NO: 214937 - DNA, 25 bp, SARS Virus
tgtccgaactacgaacatcacattc

SEQ ID NO: 214938 - DNA, 25 bp, SARS Virus
gtccgaactaccgacatcacattct

SEQ ID NO: 214939 - DNA, 25 bp, SARS Virus
tccgaactaccagcatcacattcta

SEQ ID NO: 214940 - DNA, 25 bp, SARS Virus
ccgaactaccaagatcacattctac

SEQ ID NO: 214941 - DNA, 25 bp, SARS Virus
cgaactaccaacgtcacattctaca

SEQ ID NO: 214942 - DNA, 25 bp, SARS Virus
gaactaccaacagcacattctacaa

SEQ ID NO: 214943 - DNA, 25 bp, SARS Virus
aactaccaacatgacattctacaaa

SEQ ID NO: 214944 - DNA, 25 bp, SARS Virus
actaccaacatcgcattctacaaag

SEQ ID NO: 214945 - DNA, 25 bp, SARS Virus
ctaccaacatcagattctacaaagg

SEQ ID NO: 214946 - DNA, 25 bp, SARS Virus
taccaacatcacgttctacaaagga

SEQ ID NO: 214947 - DNA, 25 bp, SARS Virus
accaacatcacagtctacaaaggaa

SEQ ID NO: 214948 - DNA, 25 bp, SARS Virus
ccaacatcacatgctacaaaggaac

SEQ ID NO: 214949 - DNA, 25 bp, SARS Virus
caacatcacattgtacaaaggaaca

SEQ ID NO: 214950 - DNA, 25 bp, SARS Virus
aacatcacattcgacaaaggaacat

SEQ ID NO: 214951 - DNA, 25 bp, SARS Virus
acatcacattctgcaaaggaacatc

SEQ ID NO: 214952 - DNA, 25 bp, SARS Virus
catcacattctagaaaggaacatct

SEQ ID NO: 214953 - DNA, 25 bp, SARS Virus
atcacattctacgaaggaacatctt

SEQ ID NO: 214954 - DNA, 25 bp, SARS Virus
tcacattctacagaggaacatcttt

SEQ ID NO: 214955 - DNA, 25 bp, SARS Virus
cacattctacaagggaacatctttt

SEQ ID NO: 214956 - DNA, 25 bp, SARS Virus
acattctacaaaggaacatcttttg

SEQ ID NO: 214957 - DNA, 25 bp, SARS Virus
cattctacaaaggaacatcttttgt

SEQ ID NO: 214958 - DNA, 25 bp, SARS Virus
attctacaaagggacatcttttgta

SEQ ID NO: 214959 - DNA, 25 bp, SARS Virus
ttctacaaaggagcatcttttgtag

SEQ ID NO: 214960 - DNA, 25 bp, SARS Virus
tctacaaaggaagatcttttgtagt

SEQ ID NO: 214961 - DNA, 25 bp, SARS Virus
ctacaaaggaacgtcttttgtagtc

SEQ ID NO: 214962 - DNA, 25 bp, SARS Virus
tacaaaggaacagcttttgtagtca

SEQ ID NO: 214963 - DNA, 25 bp, SARS Virus
acaaaggaacatgttttgtagtcag

SEQ ID NO: 214964 - DNA, 25 bp, SARS Virus
caaaggaacatcgtttgtagtcagt

SEQ ID NO: 214965 - DNA, 25 bp, SARS Virus
aaaggaacatctgttgtagtcagtg

SEQ ID NO: 214966 - DNA, 25 bp, SARS Virus
aaggaacatcttgtgtagtcagtga

SEQ ID NO: 214967 - DNA, 25 bp, SARS Virus
aggaacatctttggtagtcagtgac

SEQ ID NO: 214968 - DNA, 25 bp, SARS Virus
ggaacatcttttgtagtcagtgacc

SEQ ID NO: 214969 - DNA, 25 bp, SARS Virus
gaacatcttttggagtcagtgacca

SEQ ID NO: 214970 - DNA, 25 bp, SARS Virus
aacatcttttgtggtcagtgaccag

SEQ ID NO: 214971 - DNA, 25 bp, SARS Virus
acatcttttgtagtcagtgaccagg

SEQ ID NO: 214972 - DNA, 25 bp, SARS Virus
catcttttgtaggcagtgaccagga

SEQ ID NO: 214973 - DNA, 25 bp, SARS Virus
atcttttgtagtgagtgaccaggaa

SEQ ID NO: 214974 - DNA, 25 bp, SARS Virus
tcttttgtagtcggtgaccaggaaa

SEQ ID NO: 214975 - DNA, 25 bp, SARS Virus
cttttgtagtcagtgaccaggaaac

SEQ ID NO: 214976 - DNA, 25 bp, SARS Virus
ttttgtagtcagggaccaggaaaca

SEQ ID NO: 214977 - DNA, 25 bp, SARS Virus
tttgtagtcagtgaccaggaaacat

SEQ ID NO: 214978 - DNA, 25 bp, SARS Virus
ttgtagtcagtggccaggaaacatg

SEQ ID NO: 214979 - DNA, 25 bp, SARS Virus
tgtagtcagtgagcaggaaacatga

SEQ ID NO: 214980 - DNA, 25 bp, SARS Virus
gtagtcagtgacgaggaaacatgag

SEQ ID NO: 214981 - DNA, 25 bp, SARS Virus
tagtcagtgaccgggaaacatgaga

SEQ ID NO: 214982 - DNA, 25 bp, SARS Virus
agtcagtgaccaggaaacatgagac

SEQ ID NO: 214983 - DNA, 25 bp, SARS Virus
gtcagtgaccaggaaacatgagact

SEQ ID NO: 214984 - DNA, 25 bp, SARS Virus
tcagtgaccagggaacatgagactg

SEQ ID NO: 214985 - DNA, 25 bp, SARS Virus
cagtgaccaggagacatgagactgt

SEQ ID NO: 214986 - DNA, 25 bp, SARS Virus
agtgaccaggaagcatgagactgta

SEQ ID NO: 214987 - DNA, 25 bp, SARS Virus
gtgaccaggaaagatgagactgtag

SEQ ID NO: 214988 - DNA, 25 bp, SARS Virus
tgaccaggaaacgtgagactgtaga

SEQ ID NO: 214989 - DNA, 25 bp, SARS Virus
gaccaggaaacaggagactgtagaa

SEQ ID NO: 214990 - DNA, 25 bp, SARS Virus
accaggaaacatgagactgtagaaa

SEQ ID NO: 214991 - DNA, 25 bp, SARS Virus
ccaggaaacatgggactgtagaaac

SEQ ID NO: 214992 - DNA, 25 bp, SARS Virus
caggaaacatgagactgtagaaaca

SEQ ID NO: 214993 - DNA, 25 bp, SARS Virus
aggaaacatgaggctgtagaaacat

SEQ ID NO: 214994 - DNA, 25 bp, SARS Virus
ggaaacatgagagtgtagaaacatt

SEQ ID NO: 214995 - DNA, 25 bp, SARS Virus
gaaacatgagacggtagaaacattc

SEQ ID NO: 214996 - DNA, 25 bp, SARS Virus
aaacatgagactgtagaaacattcc

SEQ ID NO: 214997 - DNA, 25 bp, SARS Virus
aacatgagactggagaaacattcca

SEQ ID NO: 214998 - DNA, 25 bp, SARS Virus
acatgagactgtggaaacattccac

SEQ ID NO: 214999 - DNA, 25 bp, SARS Virus
catgagactgtagaaacattccact

SEQ ID NO: 215000 - DNA, 25 bp, SARS Virus
atgagactgtaggaacattccactc

SEQ ID NO: 215001 - DNA, 25 bp, SARS Virus
tgagactgtagagacattccactcg

SEQ ID NO: 215002 - DNA, 25 bp, SARS Virus
gagactgtagaagcattccactcga

SEQ ID NO: 215003 - DNA, 25 bp, SARS Virus
agactgtagaaagattccactcgag

SEQ ID NO: 215004 - DNA, 25 bp, SARS Virus
gactgtagaaacgttccactcgagg

SEQ ID NO: 215005 - DNA, 25 bp, SARS Virus
actgtagaaacagtccactcgaggc

SEQ ID NO: 215006 - DNA, 25 bp, SARS Virus
ctgtagaaacatgccactcgaggca

SEQ ID NO: 215007 - DNA, 25 bp, SARS Virus
tgtagaaacattgcactcgaggcag

SEQ ID NO: 215008 - DNA, 25 bp, SARS Virus
gtagaaacattcgactcgaggcagt

SEQ ID NO: 215009 - DNA, 25 bp, SARS Virus
tagaaacattccgctcgaggcagtt

SEQ ID NO: 215010 - DNA, 25 bp, SARS Virus
agaaacattccagtcgaggcagtta

SEQ ID NO: 215011 - DNA, 25 bp, SARS Virus
gaaacattccacgcgaggcagttat

SEQ ID NO: 215012 - DNA, 25 bp, SARS Virus
aaacattccactggaggcagttatg

SEQ ID NO: 215013 - DNA, 25 bp, SARS Virus
aacattccactcgaggcagttatgc

SEQ ID NO: 215014 - DNA, 25 bp, SARS Virus
acattccactcggggcagttatgct

SEQ ID NO: 215015 - DNA, 25 bp, SARS Virus
cattccactcgaggcagttatgcta

SEQ ID NO: 215016 - DNA, 25 bp, SARS Virus
attccactcgaggcagttatgctat

SEQ ID NO: 215017 - DNA, 25 bp, SARS Virus
ttccactcgagggagttatgctatc

SEQ ID NO: 215018 - DNA, 25 bp, SARS Virus
tccactcgaggcggttatgctatct

SEQ ID NO: 215019 - DNA, 25 bp, SARS Virus
ccactcgaggcagttatgctatctc

SEQ ID NO: 215020 - DNA, 25 bp, SARS Virus
cactcgaggcaggtatgctatctcc

SEQ ID NO: 215021 - DNA, 25 bp, SARS Virus
actcgaggcagtgatgctatctccc

SEQ ID NO: 215022 - DNA, 25 bp, SARS Virus
ctcgaggcagttgtgctatctccca

SEQ ID NO: 215023 - DNA, 25 bp, SARS Virus
tcgaggcagttaggctatctcccag

SEQ ID NO: 215024 - DNA, 25 bp, SARS Virus
cgaggcagttatgctatctcccaga

SEQ ID NO: 215025 - DNA, 25 bp, SARS Virus
gaggcagttatggtatctcccagag

SEQ ID NO: 215026 - DNA, 25 bp, SARS Virus
aggcagttatgcgatctcccagagg

SEQ ID NO: 215027 - DNA, 25 bp, SARS Virus
ggcagttatgctgtctcccagagga

SEQ ID NO: 215028 - DNA, 25 bp, SARS Virus
gcagttatgctagctcccagaggaa

SEQ ID NO: 215029 - DNA, 25 bp, SARS Virus
cagttatgctatgtcccagaggaat

SEQ ID NO: 215030 - DNA, 25 bp, SARS Virus
agttatgctatcgcccagaggaatc

SEQ ID NO: 215031 - DNA, 25 bp, SARS Virus
gttatgctatctgccagaggaatcg

SEQ ID NO: 215032 - DNA, 25 bp, SARS Virus
ttatgctatctcgcagaggaatcgt

SEQ ID NO: 215033 - DNA, 25 bp, SARS Virus
tatgctatctccgagaggaatcgtc

SEQ ID NO: 215034 - DNA, 25 bp, SARS Virus
atgctatctcccggaggaatcgtca

SEQ ID NO: 215035 - DNA, 25 bp, SARS Virus
tgctatctcccagaggaatcgtcaa

SEQ ID NO: 215036 - DNA, 25 bp, SARS Virus
gctatctcccaggggaatcgtcaat

SEQ ID NO: 215037 - DNA, 25 bp, SARS Virus
ctatctcccagaggaatcgtcaata

SEQ ID NO: 215038 - DNA, 25 bp, SARS Virus
tatctcccagaggaatcgtcaatat

SEQ ID NO: 215039 - DNA, 25 bp, SARS Virus
atctcccagagggatcgtcaatata

SEQ ID NO: 215040 - DNA, 25 bp, SARS Virus
tctcccagaggagtcgtcaatatac

SEQ ID NO: 215041 - DNA, 25 bp, SARS Virus
ctcccagaggaagcgtcaatatact

SEQ ID NO: 215042 - DNA, 25 bp, SARS Virus
tcccagaggaatggtcaatatactc

SEQ ID NO: 215043 - DNA, 25 bp, SARS Virus
cccagaggaatcgtcaatatactca

SEQ ID NO: 215044 - DNA, 25 bp, SARS Virus
ccagaggaatcggcaatatactcac

SEQ ID NO: 215045 - DNA, 25 bp, SARS Virus
cagaggaatcgtgaatatactcaca

SEQ ID NO: 215046 - DNA, 25 bp, SARS Virus
agaggaatcgtcgatatactcacat

SEQ ID NO: 215047 - DNA, 25 bp, SARS Virus
gaggaatcgtcagtatactcacatt

SEQ ID NO: 215048 - DNA, 25 bp, SARS Virus
aggaatcgtcaagatactcacatta

SEQ ID NO: 215049 - DNA, 25 bp, SARS Virus
ggaatcgtcaatgtactcacattac

SEQ ID NO: 215050 - DNA, 25 bp, SARS Virus
gaatcgtcaatagactcacattact

SEQ ID NO: 215051 - DNA, 25 bp, SARS Virus
aatcgtcaatatgctcacattactg

SEQ ID NO: 215052 - DNA, 25 bp, SARS Virus
atcgtcaatatagtcacattactgg

SEQ ID NO: 215053 - DNA, 25 bp, SARS Virus
tcgtcaatatacgcacattactggt

SEQ ID NO: 215054 - DNA, 25 bp, SARS Virus
cgtcaatatactgacattactggtg

SEQ ID NO: 215055 - DNA, 25 bp, SARS Virus
gtcaatatactcgcattactggtgt

SEQ ID NO: 215056 - DNA, 25 bp, SARS Virus
tcaatatactcagattactggtgtg

SEQ ID NO: 215057 - DNA, 25 bp, SARS Virus
caatatactcacgttactggtgtga

SEQ ID NO: 215058 - DNA, 25 bp, SARS Virus
aatatactcacagtactggtgtgac

SEQ ID NO: 215059 - DNA, 25 bp, SARS Virus
atatactcacatgactggtgtgact

SEQ ID NO: 215060 - DNA, 25 bp, SARS Virus
tatactcacattgctggtgtgacta

SEQ ID NO: 215061 - DNA, 25 bp, SARS Virus
atactcacattagtggtgtgactat

SEQ ID NO: 215062 - DNA, 25 bp, SARS Virus
tactcacattacgggtgtgactatc

SEQ ID NO: 215063 - DNA, 25 bp, SARS Virus
actcacattactggtgtgactatca

SEQ ID NO: 215064 - DNA, 25 bp, SARS Virus
ctcacattactggtgtgactatcaa

SEQ ID NO: 215065 - DNA, 25 bp, SARS Virus
tcacattactggggtgactatcaat

SEQ ID NO: 215066 - DNA, 25 bp, SARS Virus
cacattactggtgtgactatcaatg

SEQ ID NO: 215067 - DNA, 25 bp, SARS Virus
acattactggtgggactatcaatgg

SEQ ID NO: 215068 - DNA, 25 bp, SARS Virus
cattactggtgtgactatcaatggt

SEQ ID NO: 215069 - DNA, 25 bp, SARS Virus
attactggtgtggctatcaatggtc

SEQ ID NO: 215070 - DNA, 25 bp, SARS Virus
ttactggtgtgagtatcaatggtca

SEQ ID NO: 215071 - DNA, 25 bp, SARS Virus
tactggtgtgacgatcaatggtcac

SEQ ID NO: 215072 - DNA, 25 bp, SARS Virus
actggtgtgactgtcaatggtcaca

SEQ ID NO: 215073 - DNA, 25 bp, SARS Virus
ctggtgtgactagcaatggtcacat

SEQ ID NO: 215074 - DNA, 25 bp, SARS Virus
tggtgtgactatgaatggtcacatg

SEQ ID NO: 215075 - DNA, 25 bp, SARS Virus
ggtgtgactatcgatggtcacatga

SEQ ID NO: 215076 - DNA, 25 bp, SARS Virus
gtgtgactatcagtggtcacatgag

SEQ ID NO: 215077 - DNA, 25 bp, SARS Virus
tgtgactatcaagggtcacatgagt

SEQ ID NO: 215078 - DNA, 25 bp, SARS Virus
gtgactatcaatggtcacatgagta

SEQ ID NO: 215079 - DNA, 25 bp, SARS Virus
tgactatcaatggtcacatgagtaa

SEQ ID NO: 215080 - DNA, 25 bp, SARS Virus
gactatcaatgggcacatgagtaag

SEQ ID NO: 215081 - DNA, 25 bp, SARS Virus
actatcaatggtgacatgagtaagc

SEQ ID NO: 215082 - DNA, 25 bp, SARS Virus
ctatcaatggtcgcatgagtaagcg

SEQ ID NO: 215083 - DNA, 25 bp, SARS Virus
tatcaatggtcagatgagtaagcgt

SEQ ID NO: 215084 - DNA, 25 bp, SARS Virus
atcaatggtcacgtgagtaagcgtg

SEQ ID NO: 215085 - DNA, 25 bp, SARS Virus
tcaatggtcacaggagtaagcgtgt

SEQ ID NO: 215086 - DNA, 25 bp, SARS Virus
caatggtcacatgagtaagcgtgta

SEQ ID NO: 215087 - DNA, 25 bp, SARS Virus
aatggtcacatgggtaagcgtgtat

SEQ ID NO: 215088 - DNA, 25 bp, SARS Virus
atggtcacatgagtaagcgtgtatt

SEQ ID NO: 215089 - DNA, 25 bp, SARS Virus
tggtcacatgaggaagcgtgtattc

SEQ ID NO: 215090 - DNA, 25 bp, SARS Virus
ggtcacatgagtgagcgtgtattct

SEQ ID NO: 215091 - DNA, 25 bp, SARS Virus
gtcacatgagtaggcgtgtattctt

SEQ ID NO: 215092 - DNA, 25 bp, SARS Virus
tcacatgagtaagcgtgtattctta

SEQ ID NO: 215093 - DNA, 25 bp, SARS Virus
cacatgagtaagggtgtattcttac

SEQ ID NO: 215094 - DNA, 25 bp, SARS Virus
acatgagtaagcgtgtattcttaca

SEQ ID NO: 215095 - DNA, 25 bp, SARS Virus
catgagtaagcgggtattcttacat

SEQ ID NO: 215096 - DNA, 25 bp, SARS Virus
atgagtaagcgtgtattcttacatg

SEQ ID NO: 215097 - DNA, 25 bp, SARS Virus
tgagtaagcgtggattcttacatgg

SEQ ID NO: 215098 - DNA, 25 bp, SARS Virus
gagtaagcgtgtgttcttacatgga

SEQ ID NO: 215099 - DNA, 25 bp, SARS Virus
agtaagcgtgtagtcttacatggaa

SEQ ID NO: 215100 - DNA, 25 bp, SARS Virus
gtaagcgtgtatgcttacatggaac

SEQ ID NO: 215101 - DNA, 25 bp, SARS Virus
taagcgtgtattgttacatggaacg

SEQ ID NO: 215102 - DNA, 25 bp, SARS Virus
aagcgtgtattcgtacatggaacga

SEQ ID NO: 215103 - DNA, 25 bp, SARS Virus
agcgtgtattctgacatggaacgac

SEQ ID NO: 215104 - DNA, 25 bp, SARS Virus
gcgtgtattcttgcatggaacgaca

SEQ ID NO: 215105 - DNA, 25 bp, SARS Virus
cgtgtattcttagatggaacgacat

SEQ ID NO: 215106 - DNA, 25 bp, SARS Virus
gtgtattcttacgtggaacgacatt

SEQ ID NO: 215107 - DNA, 25 bp, SARS Virus
tgtattcttacagggaacgacatta

SEQ ID NO: 215108 - DNA, 25 bp, SARS Virus
gtattcttacatggaacgacattaa

SEQ ID NO: 215109 - DNA, 25 bp, SARS Virus
tattcttacatggaacgacattaaa

SEQ ID NO: 215110 - DNA, 25 bp, SARS Virus
attcttacatgggacgacattaaat

SEQ ID NO: 215111 - DNA, 25 bp, SARS Virus
ttcttacatggagcgacattaaata

SEQ ID NO: 215112 - DNA, 25 bp, SARS Virus
tcttacatggaaggacattaaatat

SEQ ID NO: 215113 - DNA, 25 bp, SARS Virus
cttacatggaacgacattaaatatg

SEQ ID NO: 215114 - DNA, 25 bp, SARS Virus
ttacatggaacggcattaaatatga

SEQ ID NO: 215115 - DNA, 25 bp, SARS Virus
tacatggaacgagattaaatatgag

SEQ ID NO: 215116 - DNA, 25 bp, SARS Virus
acatggaacgacgttaaatatgagt

SEQ ID NO: 215117 - DNA, 25 bp, SARS Virus
catggaacgacagtaaatatgagtc

SEQ ID NO: 215118 - DNA, 25 bp, SARS Virus
atggaacgacatgaaatatgagtcg

SEQ ID NO: 215119 - DNA, 25 bp, SARS Virus
tggaacgacattgaatatgagtcgt

SEQ ID NO: 215120 - DNA, 25 bp, SARS Virus
ggaacgacattagatatgagtcgtc

SEQ ID NO: 215121 - DNA, 25 bp, SARS Virus
gaacgacattaagtatgagtcgtcc

SEQ ID NO: 215122 - DNA, 25 bp, SARS Virus
aacgacattaaagatgagtcgtcca

SEQ ID NO: 215123 - DNA, 25 bp, SARS Virus
acgacattaaatgtgagtcgtccac

SEQ ID NO: 215124 - DNA, 25 bp, SARS Virus
cgacattaaataggagtcgtccacc

SEQ ID NO: 215125 - DNA, 25 bp, SARS Virus
gacattaaatatgagtcgtccacca

SEQ ID NO: 215126 - DNA, 25 bp, SARS Virus
acattaaatatgggtcgtccaccac

SEQ ID NO: 215127 - DNA, 25 bp, SARS Virus
cattaaatatgagtcgtccaccacg

SEQ ID NO: 215128 - DNA, 25 bp, SARS Virus
attaaatatgaggcgtccaccacgt

SEQ ID NO: 215129 - DNA, 25 bp, SARS Virus
ttaaatatgagtggtccaccacgtc

SEQ ID NO: 215130 - DNA, 25 bp, SARS Virus
taaatatgagtcgtccaccacgtct

SEQ ID NO: 215131 - DNA, 25 bp, SARS Virus
aaatatgagtcggccaccacgtctg

SEQ ID NO: 215132 - DNA, 25 bp, SARS Virus
aatatgagtcgtgcaccacgtctgt

SEQ ID NO: 215133 - DNA, 25 bp, SARS Virus
atatgagtcgtcgaccacgtctgta

SEQ ID NO: 215134 - DNA, 25 bp, SARS Virus
tatgagtcgtccgccacgtctgtag

SEQ ID NO: 215135 - DNA, 25 bp, SARS Virus
atgagtcgtccagcacgtctgtagt

SEQ ID NO: 215136 - DNA, 25 bp, SARS Virus
tgagtcgtccacgacgtctgtagta

SEQ ID NO: 215137 - DNA, 25 bp, SARS Virus
gagtcgtccaccgcgtctgtagtat

SEQ ID NO: 215138 - DNA, 25 bp, SARS Virus
agtcgtccaccaggtctgtagtatt

SEQ ID NO: 215139 - DNA, 25 bp, SARS Virus
gtcgtccaccacgtctgtagtattg

SEQ ID NO: 215140 - DNA, 25 bp, SARS Virus
tcgtccaccacggctgtagtattgt

SEQ ID NO: 215141 - DNA, 25 bp, SARS Virus
cgtccaccacgtgtgtagtattgtt

SEQ ID NO: 215142 - DNA, 25 bp, SARS Virus
gtccaccacgtcggtagtattgttt

SEQ ID NO: 215143 - DNA, 25 bp, SARS Virus
tccaccacgtctgtagtattgtttt

SEQ ID NO: 215144 - DNA, 25 bp, SARS Virus
ccaccacgtctggagtattgttttc

SEQ ID NO: 215145 - DNA, 25 bp, SARS Virus
caccacgtctgtggtattgttttct

SEQ ID NO: 215146 - DNA, 25 bp, SARS Virus
accacgtctgtagtattgttttctt

SEQ ID NO: 215147 - DNA, 25 bp, SARS Virus
ccacgtctgtaggattgttttcttc

SEQ ID NO: 215148 - DNA, 25 bp, SARS Virus
cacgtctgtagtgttgttttcttct

SEQ ID NO: 215149 - DNA, 25 bp, SARS Virus
acgtctgtagtagtgttttcttctg

SEQ ID NO: 215150 - DNA, 25 bp, SARS Virus
cgtctgtagtatggttttcttctga

SEQ ID NO: 215151 - DNA, 25 bp, SARS Virus
gtctgtagtattgttttcttctgag

SEQ ID NO: 215152 - DNA, 25 bp, SARS Virus
tctgtagtattggtttcttctgaga

SEQ ID NO: 215153 - DNA, 25 bp, SARS Virus
ctgtagtattgtgttcttctgagaa

SEQ ID NO: 215154 - DNA, 25 bp, SARS Virus
tgtagtattgttgtcttctgagaac

SEQ ID NO: 215155 - DNA, 25 bp, SARS Virus
gtagtattgtttgcttctgagaaca

SEQ ID NO: 215156 - DNA, 25 bp, SARS Virus
tagtattgttttgttctgagaacaa

SEQ ID NO: 215157 - DNA, 25 bp, SARS Virus
agtattgttttcgtctgagaacaac

SEQ ID NO: 215158 - DNA, 25 bp, SARS Virus
gtattgttttctgctgagaacaaca

SEQ ID NO: 215159 - DNA, 25 bp, SARS Virus
tattgttttcttgtgagaacaacat

SEQ ID NO: 215160 - DNA, 25 bp, SARS Virus
attgttttcttcggagaacaacatg

SEQ ID NO: 215161 - DNA, 25 bp, SARS Virus
ttgttttcttctgagaacaacatga

SEQ ID NO: 215162 - DNA, 25 bp, SARS Virus
tgttttcttctgggaacaacatgat

SEQ ID NO: 215163 - DNA, 25 bp, SARS Virus
gttttcttctgagaacaacatgatc

SEQ ID NO: 215164 - DNA, 25 bp, SARS Virus
ttttcttctgaggacaacatgatct

SEQ ID NO: 215165 - DNA, 25 bp, SARS Virus
tttcttctgagagcaacatgatcta

SEQ ID NO: 215166 - DNA, 25 bp, SARS Virus
ttcttctgagaagaacatgatctat

SEQ ID NO: 215167 - DNA, 25 bp, SARS Virus
tcttctgagaacgacatgatctata

SEQ ID NO: 215168 - DNA, 25 bp, SARS Virus
cttctgagaacagcatgatctataa

SEQ ID NO: 215169 - DNA, 25 bp, SARS Virus
ttctgagaacaagatgatctataac

SEQ ID NO: 215170 - DNA, 25 bp, SARS Virus
tctgagaacaacgtgatctataaca

SEQ ID NO: 215171 - DNA, 25 bp, SARS Virus
ctgagaacaacaggatctataacac

SEQ ID NO: 215172 - DNA, 25 bp, SARS Virus
tgagaacaacatgatctataacaca

SEQ ID NO: 215173 - DNA, 25 bp, SARS Virus
gagaacaacatggtctataacacat

SEQ ID NO: 215174 - DNA, 25 bp, SARS Virus
agaacaacatgagctataacacatc

SEQ ID NO: 215175 - DNA, 25 bp, SARS Virus
gaacaacatgatgtataacacatcg

SEQ ID NO: 215176 - DNA, 25 bp, SARS Virus
aacaacatgatcgataacacatcgt

SEQ ID NO: 215177 - DNA, 25 bp, SARS Virus
acaacatgatctgtaacacatcgta

SEQ ID NO: 215178 - DNA, 25 bp, SARS Virus
caacatgatctagaacacatcgtag

SEQ ID NO: 215179 - DNA, 25 bp, SARS Virus
aacatgatctatgacacatcgtagt

SEQ ID NO: 215180 - DNA, 25 bp, SARS Virus
acatgatctatagcacatcgtagtg

SEQ ID NO: 215181 - DNA, 25 bp, SARS Virus
catgatctataagacatcgtagtgc

SEQ ID NO: 215182 - DNA, 25 bp, SARS Virus
atgatctataacgcatcgtagtgct

SEQ ID NO: 215183 - DNA, 25 bp, SARS Virus
tgatctataacagatcgtagtgctg

SEQ ID NO: 215184 - DNA, 25 bp, SARS Virus
gatctataacacgtcgtagtgctgg

SEQ ID NO: 215185 - DNA, 25 bp, SARS Virus
atctataacacagcgtagtgctggt

SEQ ID NO: 215186 - DNA, 25 bp, SARS Virus
tctataacacatggtagtgctggtg

SEQ ID NO: 215187 - DNA, 25 bp, SARS Virus
ctataacacatcgtagtgctggtgt

SEQ ID NO: 215188 - DNA, 25 bp, SARS Virus
tataacacatcggagtgctggtgtg

SEQ ID NO: 215189 - DNA, 25 bp, SARS Virus
ataacacatcgtggtgctggtgtgt

SEQ ID NO: 215190 - DNA, 25 bp, SARS Virus
taacacatcgtagtgctggtgtgtg

SEQ ID NO: 215191 - DNA, 25 bp, SARS Virus
aacacatcgtagggctggtgtgtgt

SEQ ID NO: 215192 - DNA, 25 bp, SARS Virus
acacatcgtagtgctggtgtgtgtg

SEQ ID NO: 215193 - DNA, 25 bp, SARS Virus
cacatcgtagtggtggtgtgtgtgt

SEQ ID NO: 215194 - DNA, 25 bp, SARS Virus
acatcgtagtgcgggtgtgtgtgta

SEQ ID NO: 215195 - DNA, 25 bp, SARS Virus
catcgtagtgctggtgtgtgtgtac

SEQ ID NO: 215196 - DNA, 25 bp, SARS Virus
atcgtagtgctggtgtgtgtgtacc

SEQ ID NO: 215197 - DNA, 25 bp, SARS Virus
tcgtagtgctggggtgtgtgtacct

SEQ ID NO: 215198 - DNA, 25 bp, SARS Virus
cgtagtgctggtgtgtgtgtacctt

SEQ ID NO: 215199 - DNA, 25 bp, SARS Virus
gtagtgctggtgggtgtgtacctta

SEQ ID NO: 215200 - DNA, 25 bp, SARS Virus
tagtgctggtgtgtgtgtaccttac

SEQ ID NO: 215201 - DNA, 25 bp, SARS Virus
agtgctggtgtgggtgtaccttacc

SEQ ID NO: 215202 - DNA, 25 bp, SARS Virus
gtgctggtgtgtgtgtaccttacct

SEQ ID NO: 215203 - DNA, 25 bp, SARS Virus
tgctggtgtgtgggtaccttacctt

SEQ ID NO: 215204 - DNA, 25 bp, SARS Virus
gctggtgtgtgtgtaccttaccttt

SEQ ID NO: 215205 - DNA, 25 bp, SARS Virus
ctggtgtgtgtggaccttacctttg

SEQ ID NO: 215206 - DNA, 25 bp, SARS Virus
tggtgtgtgtgtgccttacctttgt

SEQ ID NO: 215207 - DNA, 25 bp, SARS Virus
ggtgtgtgtgtagcttacctttgtg

SEQ ID NO: 215208 - DNA, 25 bp, SARS Virus
gtgtgtgtgtacgttacctttgtgg

SEQ ID NO: 215209 - DNA, 25 bp, SARS Virus
tgtgtgtgtaccgtacctttgtgga

SEQ ID NO: 215210 - DNA, 25 bp, SARS Virus
gtgtgtgtacctgacctttgtggac

SEQ ID NO: 215211 - DNA, 25 bp, SARS Virus
tgtgtgtaccttgcctttgtggaca

SEQ ID NO: 215212 - DNA, 25 bp, SARS Virus
gtgtgtaccttagctttgtggacag

SEQ ID NO: 215213 - DNA, 25 bp, SARS Virus
tgtgtaccttacgtttgtggacaga

SEQ ID NO: 215214 - DNA, 25 bp, SARS Virus
gtgtaccttaccgttgtggacagaa

SEQ ID NO: 215215 - DNA, 25 bp, SARS Virus
tgtaccttacctgtgtggacagaat

SEQ ID NO: 215216 - DNA, 25 bp, SARS Virus
gtaccttaccttggtggacagaatt

SEQ ID NO: 215217 - DNA, 25 bp, SARS Virus
taccttacctttgtggacagaattc

SEQ ID NO: 215218 - DNA, 25 bp, SARS Virus
accttacctttggggacagaattct

SEQ ID NO: 215219 - DNA, 25 bp, SARS Virus
ccttacctttgtggacagaattcta

SEQ ID NO: 215220 - DNA, 25 bp, SARS Virus
cttacctttgtggacagaattctaa

SEQ ID NO: 215221 - DNA, 25 bp, SARS Virus
ttacctttgtgggcagaattctaat

SEQ ID NO: 215222 - DNA, 25 bp, SARS Virus
tacctttgtggagagaattctaata

SEQ ID NO: 215223 - DNA, 25 bp, SARS Virus
acctttgtggacggaattctaatag

SEQ ID NO: 215224 - DNA, 25 bp, SARS Virus
cctttgtggacagaattctaatagt

SEQ ID NO: 215225 - DNA, 25 bp, SARS Virus
ctttgtggacaggattctaatagta

SEQ ID NO: 215226 - DNA, 25 bp, SARS Virus
tttgtggacagagttctaatagtat

SEQ ID NO: 215227 - DNA, 25 bp, SARS Virus
ttgtggacagaagtctaatagtatt

SEQ ID NO: 215228 - DNA, 25 bp, SARS Virus
tgtggacagaatgctaatagtattc

SEQ ID NO: 215229 - DNA, 25 bp, SARS Virus
gtggacagaattgtaatagtattct

SEQ ID NO: 215230 - DNA, 25 bp, SARS Virus
tggacagaattcgaatagtattcta

SEQ ID NO: 215231 - DNA, 25 bp, SARS Virus
ggacagaattctgatagtattctat

SEQ ID NO: 215232 - DNA, 25 bp, SARS Virus
gacagaattctagtagtattctatc

SEQ ID NO: 215233 - DNA, 25 bp, SARS Virus
acagaattctaagagtattctatct

SEQ ID NO: 215234 - DNA, 25 bp, SARS Virus
cagaattctaatggtattctatctc

SEQ ID NO: 215235 - DNA, 25 bp, SARS Virus
agaattctaatagtattctatctca

SEQ ID NO: 215236 - DNA, 25 bp, SARS Virus
gaattctaataggattctatctcat

SEQ ID NO: 215237 - DNA, 25 bp, SARS Virus
aattctaatagtgttctatctcatg

SEQ ID NO: 215238 - DNA, 25 bp, SARS Virus
attctaatagtagtctatctcatgg

SEQ ID NO: 215239 - DNA, 25 bp, SARS Virus
ttctaatagtatgctatctcatggg

SEQ ID NO: 215240 - DNA, 25 bp, SARS Virus
tctaatagtattgtatctcatgggt

SEQ ID NO: 215241 - DNA, 25 bp, SARS Virus
atttagtagtcgtttaaaacacaat

SEQ ID NO: 215242 - DNA, 25 bp, SARS Virus
tttagtagtcgtttaaaacacaatc

SEQ ID NO: 215243 - DNA, 25 bp, SARS Virus
ttagtagtcgtttaaaacacaatct

SEQ ID NO: 215244 - DNA, 25 bp, SARS Virus
tagtagtcgttttaaacacaatctt

SEQ ID NO: 215245 - DNA, 25 bp, SARS Virus
agtagtcgtttataacacaatcttg

SEQ ID NO: 215246 - DNA, 25 bp, SARS Virus
gtagtcgtttaatacacaatcttgt

SEQ ID NO: 215247 - DNA, 25 bp, SARS Virus
tagtcgtttaaatcacaatcttgta

SEQ ID NO: 215248 - DNA, 25 bp, SARS Virus
agtcgtttaaaatacaatcttgtac

SEQ ID NO: 215249 - DNA, 25 bp, SARS Virus
gtcgtttaaaactcaatcttgtaca

SEQ ID NO: 215250 - DNA, 25 bp, SARS Virus
tcgtttaaaacataatcttgtacac

SEQ ID NO: 215251 - DNA, 25 bp, SARS Virus
cgtttaaaacactatcttgtacact

SEQ ID NO: 215252 - DNA, 25 bp, SARS Virus
gtttaaaacacattcttgtacactc

SEQ ID NO: 215253 - DNA, 25 bp, SARS Virus
tttaaaacacaatcttgtacactca

SEQ ID NO: 215254 - DNA, 25 bp, SARS Virus
ttaaaacacaattttgtacactcaa

SEQ ID NO: 215255 - DNA, 25 bp, SARS Virus
taaaacacaatcttgtacactcaaa

SEQ ID NO: 215256 - DNA, 25 bp, SARS Virus
aaaacacaatcttgtacactcaaac

SEQ ID NO: 215257 - DNA, 25 bp, SARS Virus
aaacacaatcttttacactcaaact

SEQ ID NO: 215258 - DNA, 25 bp, SARS Virus
aacacaatcttgtacactcaaactt

SEQ ID NO: 215259 - DNA, 25 bp, SARS Virus
acacaatcttgttcactcaaacttt

SEQ ID NO: 215260 - DNA, 25 bp, SARS Virus
cacaatcttgtatactcaaacttta

SEQ ID NO: 215261 - DNA, 25 bp, SARS Virus
acaatcttgtactctcaaactttaa

SEQ ID NO: 215262 - DNA, 25 bp, SARS Virus
caatcttgtacattcaaactttaat

SEQ ID NO: 215263 - DNA, 25 bp, SARS Virus
aatcttgtacactcaaactttaata

SEQ ID NO: 215264 - DNA, 25 bp, SARS Virus
atcttgtacacttaaactttaatag

SEQ ID NO: 215265 - DNA, 25 bp, SARS Virus
tcttgtacactctaactttaatagt

SEQ ID NO: 215266 - DNA, 25 bp, SARS Virus
cttgtacactcatactttaatagtt

SEQ ID NO: 215267 - DNA, 25 bp, SARS Virus
ttgtacactcaatctttaatagttt

SEQ ID NO: 215268 - DNA, 25 bp, SARS Virus
tgtacactcaaattttaatagtttt

SEQ ID NO: 215269 - DNA, 25 bp, SARS Virus
gtacactcaaactttaatagttttg

SEQ ID NO: 215270 - DNA, 25 bp, SARS Virus
tacactcaaactttaatagttttga

SEQ ID NO: 215271 - DNA, 25 bp, SARS Virus
acactcaaactttaatagttttgag

SEQ ID NO: 215272 - DNA, 25 bp, SARS Virus
cactcaaacttttatagttttgagc

SEQ ID NO: 215273 - DNA, 25 bp, SARS Virus
actcaaactttattagttttgagcg

SEQ ID NO: 215274 - DNA, 25 bp, SARS Virus
ctcaaactttaatagttttgagcgt

SEQ ID NO: 215275 - DNA, 25 bp, SARS Virus
tcaaactttaattgttttgagcgta

SEQ ID NO: 215276 - DNA, 25 bp, SARS Virus
caaactttaatatttttgagcgtaa

SEQ ID NO: 215277 - DNA, 25 bp, SARS Virus
aaactttaatagttttgagcgtaaa

SEQ ID NO: 215278 - DNA, 25 bp, SARS Virus
aactttaatagttttgagcgtaaac

SEQ ID NO: 215279 - DNA, 25 bp, SARS Virus
actttaatagttttgagcgtaaacc

SEQ ID NO: 215280 - DNA, 25 bp, SARS Virus
ctttaatagttttgagcgtaaacca

SEQ ID NO: 215281 - DNA, 25 bp, SARS Virus
tttaatagtttttagcgtaaaccat

SEQ ID NO: 215282 - DNA, 25 bp, SARS Virus
ttaatagttttgtgcgtaaaccatt

SEQ ID NO: 215283 - DNA, 25 bp, SARS Virus
taatagttttgatcgtaaaccatta

SEQ ID NO: 215284 - DNA, 25 bp, SARS Virus
aatagttttgagtgtaaaccattac

SEQ ID NO: 215285 - DNA, 25 bp, SARS Virus
atagttttgagcttaaaccattacc

SEQ ID NO: 215286 - DNA, 25 bp, SARS Virus
tagttttgagcgtaaaccattacca

SEQ ID NO: 215287 - DNA, 25 bp, SARS Virus
agttttgagcgttaaccattaccaa

SEQ ID NO: 215288 - DNA, 25 bp, SARS Virus
gttttgagcgtataccattaccaac

SEQ ID NO: 215289 - DNA, 25 bp, SARS Virus
ttttgagcgtaatccattaccaact

SEQ ID NO: 215290 - DNA, 25 bp, SARS Virus
tttgagcgtaaatcattaccaactc

SEQ ID NO: 215291 - DNA, 25 bp, SARS Virus
ttgagcgtaaactattaccaactca

SEQ ID NO: 215292 - DNA, 25 bp, SARS Virus
tgagcgtaaacctttaccaactcaa

SEQ ID NO: 215293 - DNA, 25 bp, SARS Virus
gagcgtaaaccattaccaactcaac

SEQ ID NO: 215294 - DNA, 25 bp, SARS Virus
agcgtaaaccattaccaactcaacc

SEQ ID NO: 215295 - DNA, 25 bp, SARS Virus
gcgtaaaccatttccaactcaacca

SEQ ID NO: 215296 - DNA, 25 bp, SARS Virus
cgtaaaccattatcaactcaaccat

SEQ ID NO: 215297 - DNA, 25 bp, SARS Virus
gtaaaccattactaactcaaccatg

SEQ ID NO: 215298 - DNA, 25 bp, SARS Virus
taaaccattacctactcaaccatgt

SEQ ID NO: 215299 - DNA, 25 bp, SARS Virus
aaaccattaccatctcaaccatgtt

SEQ ID NO: 215300 - DNA, 25 bp, SARS Virus
aaccattaccaattcaaccatgttc

SEQ ID NO: 215301 - DNA, 25 bp, SARS Virus
accattaccaactcaaccatgttcc

SEQ ID NO: 215302 - DNA, 25 bp, SARS Virus
ccattaccaacttaaccatgttcca

SEQ ID NO: 215303 - DNA, 25 bp, SARS Virus
cattaccaactctaccatgttccag

SEQ ID NO: 215304 - DNA, 25 bp, SARS Virus
attaccaactcatccatgttccaga

SEQ ID NO: 215305 - DNA, 25 bp, SARS Virus
ttaccaactcaatcatgttccagat

SEQ ID NO: 215306 - DNA, 25 bp, SARS Virus
taccaactcaactatgttccagata

SEQ ID NO: 215307 - DNA, 25 bp, SARS Virus
accaactcaaccttgttccagatat

SEQ ID NO: 215308 - DNA, 25 bp, SARS Virus
ccaactcaaccatgttccagatatc

SEQ ID NO: 215309 - DNA, 25 bp, SARS Virus
caactcaaccattttccagatatcc

SEQ ID NO: 215310 - DNA, 25 bp, SARS Virus
aactcaaccatgttccagatatccg

SEQ ID NO: 215311 - DNA, 25 bp, SARS Virus
actcaaccatgttccagatatccga

SEQ ID NO: 215312 - DNA, 25 bp, SARS Virus
ctcaaccatgtttcagatatccgac

SEQ ID NO: 215313 - DNA, 25 bp, SARS Virus
tcaaccatgttctagatatccgacg

SEQ ID NO: 215314 - DNA, 25 bp, SARS Virus
caaccatgttcctgatatccgacga

SEQ ID NO: 215315 - DNA, 25 bp, SARS Virus
aaccatgttccatatatccgacgag

SEQ ID NO: 215316 - DNA, 25 bp, SARS Virus
accatgttccagttatccgacgaga

SEQ ID NO: 215317 - DNA, 25 bp, SARS Virus
ccatgttccagatatccgacgagac

SEQ ID NO: 215318 - DNA, 25 bp, SARS Virus
catgttccagatttccgacgagaca

SEQ ID NO: 215319 - DNA, 25 bp, SARS Virus
atgttccagatatccgacgagacat

SEQ ID NO: 215320 - DNA, 25 bp, SARS Virus
tgttccagatattcgacgagacata

SEQ ID NO: 215321 - DNA, 25 bp, SARS Virus
gttccagatatctgacgagacatat

SEQ ID NO: 215322 - DNA, 25 bp, SARS Virus
ttccagatatcctacgagacatatc

SEQ ID NO: 215323 - DNA, 25 bp, SARS Virus
tccagatatccgtcgagacatatca

SEQ ID NO: 215324 - DNA, 25 bp, SARS Virus
ccagatatccgatgagacatatcat

SEQ ID NO: 215325 - DNA, 25 bp, SARS Virus
cagatatccgactagacatatcatt

SEQ ID NO: 215326 - DNA, 25 bp, SARS Virus
agatatccgacgtgacatatcattc

SEQ ID NO: 215327 - DNA, 25 bp, SARS Virus
gatatccgacgatacatatcattcg

SEQ ID NO: 215328 - DNA, 25 bp, SARS Virus
atatccgacgagtcatatcattcgt

SEQ ID NO: 215329 - DNA, 25 bp, SARS Virus
tatccgacgagatatatcattcgta

SEQ ID NO: 215330 - DNA, 25 bp, SARS Virus
atccgacgagacttatcattcgtaa

SEQ ID NO: 215331 - DNA, 25 bp, SARS Virus
tccgacgagacatatcattcgtaat

SEQ ID NO: 215332 - DNA, 25 bp, SARS Virus
ccgacgagacatttcattcgtaata

SEQ ID NO: 215333 - DNA, 25 bp, SARS Virus
cgacgagacatatcattcgtaatag

SEQ ID NO: 215334 - DNA, 25 bp, SARS Virus
gacgagacatattattcgtaatagg

SEQ ID NO: 215335 - DNA, 25 bp, SARS Virus
acgagacatatctttcgtaatagga

SEQ ID NO: 215336 - DNA, 25 bp, SARS Virus
cgagacatatcattcgtaataggaa

SEQ ID NO: 215337 - DNA, 25 bp, SARS Virus
gagacatatcattcgtaataggaaa

SEQ ID NO: 215338 - DNA, 25 bp, SARS Virus
agacatatcatttgtaataggaaaa

SEQ ID NO: 215339 - DNA, 25 bp, SARS Virus
gacatatcattcttaataggaaaaa

SEQ ID NO: 215340 - DNA, 25 bp, SARS Virus
acatatcattcgtaataggaaaaat

SEQ ID NO: 215341 - DNA, 25 bp, SARS Virus
catatcattcgttataggaaaaata

SEQ ID NO: 215342 - DNA, 25 bp, SARS Virus
atatcattcgtattaggaaaaatat

SEQ ID NO: 215343 - DNA, 25 bp, SARS Virus
tatcattcgtaataggaaaaatatt

SEQ ID NO: 215344 - DNA, 25 bp, SARS Virus
atcattcgtaattggaaaaatatta

SEQ ID NO: 215345 - DNA, 25 bp, SARS Virus
tcattcgtaatatgaaaaatattat

SEQ ID NO: 215346 - DNA, 25 bp, SARS Virus
cattcgtaatagtaaaaatattatg

SEQ ID NO: 215347 - DNA, 25 bp, SARS Virus
attcgtaataggtaaaatattatgg

SEQ ID NO: 215348 - DNA, 25 bp, SARS Virus
ttcgtaataggataaatattatggg

SEQ ID NO: 215349 - DNA, 25 bp, SARS Virus
tcgtaataggaataatattatgggt

SEQ ID NO: 215350 - DNA, 25 bp, SARS Virus
cgtaataggaaatatattatgggta

SEQ ID NO: 215351 - DNA, 25 bp, SARS Virus
gtaataggaaaattattatgggtag

SEQ ID NO: 215352 - DNA, 25 bp, SARS Virus
taataggaaaaatattatgggtagg

SEQ ID NO: 215353 - DNA, 25 bp, SARS Virus
aataggaaaaattttatgggtaggt

SEQ ID NO: 215354 - DNA, 25 bp, SARS Virus
ataggaaaaatattatgggtaggtt

SEQ ID NO: 215355 - DNA, 25 bp, SARS Virus
taggaaaaatattatgggtaggtta

SEQ ID NO: 215356 - DNA, 25 bp, SARS Virus
aggaaaaatattttgggtaggttaa

SEQ ID NO: 215357 - DNA, 25 bp, SARS Virus
ggaaaaatattatgggtaggttaaa

SEQ ID NO: 215358 - DNA, 25 bp, SARS Virus
gaaaaatattattggtaggttaaaa

SEQ ID NO: 215359 - DNA, 25 bp, SARS Virus
aaaaatattatgtgtaggttaaaac

SEQ ID NO: 215360 - DNA, 25 bp, SARS Virus
aaaatattatggttaggttaaaacc

SEQ ID NO: 215361 - DNA, 25 bp, SARS Virus
aaatattatgggtaggttaaaacca

SEQ ID NO: 215362 - DNA, 25 bp, SARS Virus
aatattatgggttggttaaaaccaa

SEQ ID NO: 215363 - DNA, 25 bp, SARS Virus
atattatgggtatgttaaaaccaag

SEQ ID NO: 215364 - DNA, 25 bp, SARS Virus
tattatgggtagtttaaaaccaagt

SEQ ID NO: 215365 - DNA, 25 bp, SARS Virus
attatgggtaggttaaaaccaagtt

SEQ ID NO: 215366 - DNA, 25 bp, SARS Virus
ttatgggtaggttaaaaccaagtta

SEQ ID NO: 215367 - DNA, 25 bp, SARS Virus
tatgggtaggtttaaaccaagttag

SEQ ID NO: 215368 - DNA, 25 bp, SARS Virus
atgggtaggttataaccaagttaga

SEQ ID NO: 215369 - DNA, 25 bp, SARS Virus
tgggtaggttaataccaagttagag

SEQ ID NO: 215370 - DNA, 25 bp, SARS Virus
gggtaggttaaatccaagttagaga

SEQ ID NO: 215371 - DNA, 25 bp, SARS Virus
ggtaggttaaaatcaagttagagac

SEQ ID NO: 215372 - DNA, 25 bp, SARS Virus
gtaggttaaaactaagttagagaca

SEQ ID NO: 215373 - DNA, 25 bp, SARS Virus
taggttaaaacctagttagagacac

SEQ ID NO: 215374 - DNA, 25 bp, SARS Virus
aggttaaaaccatgttagagacaca

SEQ ID NO: 215375 - DNA, 25 bp, SARS Virus
ggttaaaaccaatttagagacacat

SEQ ID NO: 215376 - DNA, 25 bp, SARS Virus
gttaaaaccaagttagagacacatt

SEQ ID NO: 215377 - DNA, 25 bp, SARS Virus
ttaaaaccaagttagagacacattc

SEQ ID NO: 215378 - DNA, 25 bp, SARS Virus
taaaaccaagtttgagacacattca

SEQ ID NO: 215379 - DNA, 25 bp, SARS Virus
aaaaccaagttatagacacattcat

SEQ ID NO: 215380 - DNA, 25 bp, SARS Virus
aaaccaagttagtgacacattcatt

SEQ ID NO: 215381 - DNA, 25 bp, SARS Virus
aaccaagttagatacacattcattg

SEQ ID NO: 215382 - DNA, 25 bp, SARS Virus
accaagttagagtcacattcattga

SEQ ID NO: 215383 - DNA, 25 bp, SARS Virus
ccaagttagagatacattcattgag

SEQ ID NO: 215384 - DNA, 25 bp, SARS Virus
caagttagagactcattcattgagg

SEQ ID NO: 215385 - DNA, 25 bp, SARS Virus
aagttagagacatattcattgaggt

SEQ ID NO: 215386 - DNA, 25 bp, SARS Virus
agttagagacactttcattgaggta

SEQ ID NO: 215387 - DNA, 25 bp, SARS Virus
gttagagacacattcattgaggtag

SEQ ID NO: 215388 - DNA, 25 bp, SARS Virus
ttagagacacattcattgaggtagc

SEQ ID NO: 215389 - DNA, 25 bp, SARS Virus
tagagacacatttattgaggtagct

SEQ ID NO: 215390 - DNA, 25 bp, SARS Virus
agagacacattctttgaggtagctc

SEQ ID NO: 215391 - DNA, 25 bp, SARS Virus
gagacacattcattgaggtagctca

SEQ ID NO: 215392 - DNA, 25 bp, SARS Virus
agacacattcattgaggtagctcaa

SEQ ID NO: 215393 - DNA, 25 bp, SARS Virus
gacacattcatttaggtagctcaaa

SEQ ID NO: 215394 - DNA, 25 bp, SARS Virus
acacattcattgtggtagctcaaat

SEQ ID NO: 215395 - DNA, 25 bp, SARS Virus
cacattcattgatgtagctcaaata

SEQ ID NO: 215396 - DNA, 25 bp, SARS Virus
acattcattgagttagctcaaatat

SEQ ID NO: 215397 - DNA, 25 bp, SARS Virus
cattcattgaggtagctcaaatatg

SEQ ID NO: 215398 - DNA, 25 bp, SARS Virus
attcattgaggttgctcaaatatgc

SEQ ID NO: 215399 - DNA, 25 bp, SARS Virus
ttcattgaggtatctcaaatatgct

SEQ ID NO: 215400 - DNA, 25 bp, SARS Virus
tcattgaggtagttcaaatatgctg

SEQ ID NO: 215401 - DNA, 25 bp, SARS Virus
cattgaggtagctcaaatatgctgt

SEQ ID NO: 215402 - DNA, 25 bp, SARS Virus
attgaggtagcttaaatatgctgtg

SEQ ID NO: 215403 - DNA, 25 bp, SARS Virus
ttgaggtagctctaatatgctgtgt

SEQ ID NO: 215404 - DNA, 25 bp, SARS Virus
tgaggtagctcatatatgctgtgtc

SEQ ID NO: 215405 - DNA, 25 bp, SARS Virus
gaggtagctcaattatgctgtgtcc

SEQ ID NO: 215406 - DNA, 25 bp, SARS Virus
aggtagctcaaatatgctgtgtccg

SEQ ID NO: 215407 - DNA, 25 bp, SARS Virus
ggtagctcaaatttgctgtgtccga

SEQ ID NO: 215408 - DNA, 25 bp, SARS Virus
gtagctcaaatatgctgtgtccgaa

SEQ ID NO: 215409 - DNA, 25 bp, SARS Virus
tagctcaaatattctgtgtccgaac

SEQ ID NO: 215410 - DNA, 25 bp, SARS Virus
agctcaaatatgttgtgtccgaact

SEQ ID NO: 215411 - DNA, 25 bp, SARS Virus
gctcaaatatgctgtgtccgaacta

SEQ ID NO: 215412 - DNA, 25 bp, SARS Virus
ctcaaatatgctttgtccgaactac

SEQ ID NO: 215413 - DNA, 25 bp, SARS Virus
tcaaatatgctgtgtccgaactacc

SEQ ID NO: 215414 - DNA, 25 bp, SARS Virus
caaatatgctgtttccgaactacca

SEQ ID NO: 215415 - DNA, 25 bp, SARS Virus
aaatatgctgtgtccgaactaccaa

SEQ ID NO: 215416 - DNA, 25 bp, SARS Virus
aatatgctgtgttcgaactaccaac

SEQ ID NO: 215417 - DNA, 25 bp, SARS Virus
atatgctgtgtctgaactaccaaca

SEQ ID NO: 215418 - DNA, 25 bp, SARS Virus
tatgctgtgtcctaactaccaacat

SEQ ID NO: 215419 - DNA, 25 bp, SARS Virus
atgctgtgtccgtactaccaacatc

SEQ ID NO: 215420 - DNA, 25 bp, SARS Virus
tgctgtgtccgatctaccaacatca

SEQ ID NO: 215421 - DNA, 25 bp, SARS Virus
gctgtgtccgaattaccaacatcac

SEQ ID NO: 215422 - DNA, 25 bp, SARS Virus
ctgtgtccgaactaccaacatcaca

SEQ ID NO: 215423 - DNA, 25 bp, SARS Virus
tgtgtccgaacttccaacatcacat

SEQ ID NO: 215424 - DNA, 25 bp, SARS Virus
gtgtccgaactatcaacatcacatt

SEQ ID NO: 215425 - DNA, 25 bp, SARS Virus
tgtccgaactactaacatcacattc

SEQ ID NO: 215426 - DNA, 25 bp, SARS Virus
gtccgaactacctacatcacattct

SEQ ID NO: 215427 - DNA, 25 bp, SARS Virus
tccgaactaccatcatcacattcta

SEQ ID NO: 215428 - DNA, 25 bp, SARS Virus
ccgaactaccaatatcacattctac

SEQ ID NO: 215429 - DNA, 25 bp, SARS Virus
cgaactaccaacttcacattctaca

SEQ ID NO: 215430 - DNA, 25 bp, SARS Virus
gaactaccaacatcacattctacaa

SEQ ID NO: 215431 - DNA, 25 bp, SARS Virus
aactaccaacattacattctacaaa

SEQ ID NO: 215432 - DNA, 25 bp, SARS Virus
actaccaacatctcattctacaaag

SEQ ID NO: 215433 - DNA, 25 bp, SARS Virus
ctaccaacatcatattctacaaagg

SEQ ID NO: 215434 - DNA, 25 bp, SARS Virus
taccaacatcactttctacaaagga

SEQ ID NO: 215435 - DNA, 25 bp, SARS Virus
accaacatcacattctacaaaggaa

SEQ ID NO: 215436 - DNA, 25 bp, SARS Virus
ccaacatcacattctacaaaggaac

SEQ ID NO: 215437 - DNA, 25 bp, SARS Virus
caacatcacattttacaaaggaaca

SEQ ID NO: 215438 - DNA, 25 bp, SARS Virus
aacatcacattctacaaaggaacat

SEQ ID NO: 215439 - DNA, 25 bp, SARS Virus
acatcacattcttcaaaggaacatc

SEQ ID NO: 215440 - DNA, 25 bp, SARS Virus
catcacattctataaaggaacatct

SEQ ID NO: 215441 - DNA, 25 bp, SARS Virus
atcacattctactaaggaacatctt

SEQ ID NO: 215442 - DNA, 25 bp, SARS Virus
tcacattctacataggaacatcttt

SEQ ID NO: 215443 - DNA, 25 bp, SARS Virus
cacattctacaatggaacatctttt

SEQ ID NO: 215444 - DNA, 25 bp, SARS Virus
acattctacaaatgaacatcttttg

SEQ ID NO: 215445 - DNA, 25 bp, SARS Virus
cattctacaaagtaacatcttttgt

SEQ ID NO: 215446 - DNA, 25 bp, SARS Virus
attctacaaaggtacatcttttgta

SEQ ID NO: 215447 - DNA, 25 bp, SARS Virus
ttctacaaaggatcatcttttgtag

SEQ ID NO: 215448 - DNA, 25 bp, SARS Virus
tctacaaaggaatatcttttgtagt

SEQ ID NO: 215449 - DNA, 25 bp, SARS Virus
ctacaaaggaacttcttttgtagtc

SEQ ID NO: 215450 - DNA, 25 bp, SARS Virus
tacaaaggaacatcttttgtagtca

SEQ ID NO: 215451 - DNA, 25 bp, SARS Virus
acaaaggaacattttttgtagtcag

SEQ ID NO: 215452 - DNA, 25 bp, SARS Virus
caaaggaacatcttttgtagtcagt

SEQ ID NO: 215453 - DNA, 25 bp, SARS Virus
aaaggaacatcttttgtagtcagtg

SEQ ID NO: 215454 - DNA, 25 bp, SARS Virus
aaggaacatcttttgtagtcagtga

SEQ ID NO: 215455 - DNA, 25 bp, SARS Virus
aggaacatcttttgtagtcagtgac

SEQ ID NO: 215456 - DNA, 25 bp, SARS Virus
ggaacatcttttttagtcagtgacc

SEQ ID NO: 215457 - DNA, 25 bp, SARS Virus
gaacatcttttgtagtcagtgacca

SEQ ID NO: 215458 - DNA, 25 bp, SARS Virus
aacatcttttgttgtcagtgaccag

SEQ ID NO: 215459 - DNA, 25 bp, SARS Virus
acatcttttgtattcagtgaccagg

SEQ ID NO: 215460 - DNA, 25 bp, SARS Virus
catcttttgtagtcagtgaccagga

SEQ ID NO: 215461 - DNA, 25 bp, SARS Virus
atcttttgtagttagtgaccaggaa

SEQ ID NO: 215462 - DNA, 25 bp, SARS Virus
tcttttgtagtctgtgaccaggaaa

SEQ ID NO: 215463 - DNA, 25 bp, SARS Virus
cttttgtagtcattgaccaggaaac

SEQ ID NO: 215464 - DNA, 25 bp, SARS Virus
ttttgtagtcagtgaccaggaaaca

SEQ ID NO: 215465 - DNA, 25 bp, SARS Virus
tttgtagtcagttaccaggaaacat

SEQ ID NO: 215466 - DNA, 25 bp, SARS Virus
ttgtagtcagtgtccaggaaacatg

SEQ ID NO: 215467 - DNA, 25 bp, SARS Virus
tgtagtcagtgatcaggaaacatga

SEQ ID NO: 215468 - DNA, 25 bp, SARS Virus
gtagtcagtgactaggaaacatgag

SEQ ID NO: 215469 - DNA, 25 bp, SARS Virus
tagtcagtgacctggaaacatgaga

SEQ ID NO: 215470 - DNA, 25 bp, SARS Virus
agtcagtgaccatgaaacatgagac

SEQ ID NO: 215471 - DNA, 25 bp, SARS Virus
gtcagtgaccagtaaacatgagact

SEQ ID NO: 215472 - DNA, 25 bp, SARS Virus
tcagtgaccaggtaacatgagactg

SEQ ID NO: 215473 - DNA, 25 bp, SARS Virus
cagtgaccaggatacatgagactgt

SEQ ID NO: 215474 - DNA, 25 bp, SARS Virus
agtgaccaggaatcatgagactgta

SEQ ID NO: 215475 - DNA, 25 bp, SARS Virus
gtgaccaggaaatatgagactgtag

SEQ ID NO: 215476 - DNA, 25 bp, SARS Virus
tgaccaggaaacttgagactgtaga

SEQ ID NO: 215477 - DNA, 25 bp, SARS Virus
gaccaggaaacatgagactgtagaa

SEQ ID NO: 215478 - DNA, 25 bp, SARS Virus
accaggaaacattagactgtagaaa

SEQ ID NO: 215479 - DNA, 25 bp, SARS Virus
ccaggaaacatgtgactgtagaaac

SEQ ID NO: 215480 - DNA, 25 bp, SARS Virus
caggaaacatgatactgtagaaaca

SEQ ID NO: 215481 - DNA, 25 bp, SARS Virus
aggaaacatgagtctgtagaaacat

SEQ ID NO: 215482 - DNA, 25 bp, SARS Virus
ggaaacatgagattgtagaaacatt

SEQ ID NO: 215483 - DNA, 25 bp, SARS Virus
gaaacatgagactgtagaaacattc

SEQ ID NO: 215484 - DNA, 25 bp, SARS Virus
aaacatgagactttagaaacattcc

SEQ ID NO: 215485 - DNA, 25 bp, SARS Virus
aacatgagactgtagaaacattcca

SEQ ID NO: 215486 - DNA, 25 bp, SARS Virus
acatgagactgttgaaacattccac

SEQ ID NO: 215487 - DNA, 25 bp, SARS Virus
catgagactgtataaacattccact

SEQ ID NO: 215488 - DNA, 25 bp, SARS Virus
atgagactgtagtaacattccactc

SEQ ID NO: 215489 - DNA, 25 bp, SARS Virus
tgagactgtagatacattccactcg

SEQ ID NO: 215490 - DNA, 25 bp, SARS Virus
gagactgtagaatcattccactcga

SEQ ID NO: 215491 - DNA, 25 bp, SARS Virus
agactgtagaaatattccactcgag

SEQ ID NO: 215492 - DNA, 25 bp, SARS Virus
gactgtagaaactttccactcgagg

SEQ ID NO: 215493 - DNA, 25 bp, SARS Virus
actgtagaaacattccactcgaggc

SEQ ID NO: 215494 - DNA, 25 bp, SARS Virus
ctgtagaaacattccactcgaggca

SEQ ID NO: 215495 - DNA, 25 bp, SARS Virus
tgtagaaacatttcactcgaggcag

SEQ ID NO: 215496 - DNA, 25 bp, SARS Virus
gtagaaacattctactcgaggcagt

SEQ ID NO: 215497 - DNA, 25 bp, SARS Virus
tagaaacattcctctcgaggcagtt

SEQ ID NO: 215498 - DNA, 25 bp, SARS Virus
agaaacattccattcgaggcagtta

SEQ ID NO: 215499 - DNA, 25 bp, SARS Virus
gaaacattccactcgaggcagttat

SEQ ID NO: 215500 - DNA, 25 bp, SARS Virus
aaacattccacttgaggcagttatg

SEQ ID NO: 215501 - DNA, 25 bp, SARS Virus
aacattccactctaggcagttatgc

SEQ ID NO: 215502 - DNA, 25 bp, SARS Virus
acattccactcgtggcagttatgct

SEQ ID NO: 215503 - DNA, 25 bp, SARS Virus
cattccactcgatgcagttatgcta

SEQ ID NO: 215504 - DNA, 25 bp, SARS Virus
attccactcgagtcagttatgctat

SEQ ID NO: 215505 - DNA, 25 bp, SARS Virus
ttccactcgaggtagttatgctatc

SEQ ID NO: 215506 - DNA, 25 bp, SARS Virus
tccactcgaggctgttatgctatct

SEQ ID NO: 215507 - DNA, 25 bp, SARS Virus
ccactcgaggcatttatgctatctc

SEQ ID NO: 215508 - DNA, 25 bp, SARS Virus
cactcgaggcagttatgctatctcc

SEQ ID NO: 215509 - DNA, 25 bp, SARS Virus
actcgaggcagttatgctatctccc

SEQ ID NO: 215510 - DNA, 25 bp, SARS Virus
ctcgaggcagttttgctatctccca

SEQ ID NO: 215511 - DNA, 25 bp, SARS Virus
tcgaggcagttatgctatctcccag

SEQ ID NO: 215512 - DNA, 25 bp, SARS Virus
cgaggcagttattctatctcccaga

SEQ ID NO: 215513 - DNA, 25 bp, SARS Virus
gaggcagttatgttatctcccagag

SEQ ID NO: 215514 - DNA, 25 bp, SARS Virus
aggcagttatgctatctcccagagg

SEQ ID NO: 215515 - DNA, 25 bp, SARS Virus
ggcagttatgctttctcccagagga

SEQ ID NO: 215516 - DNA, 25 bp, SARS Virus
gcagttatgctatctcccagaggaa

SEQ ID NO: 215517 - DNA, 25 bp, SARS Virus
cagttatgctatttcccagaggaat

SEQ ID NO: 215518 - DNA, 25 bp, SARS Virus
agttatgctatctcccagaggaatc

SEQ ID NO: 215519 - DNA, 25 bp, SARS Virus
gttatgctatcttccagaggaatcg

SEQ ID NO: 215520 - DNA, 25 bp, SARS Virus
ttatgctatctctcagaggaatcgt

SEQ ID NO: 215521 - DNA, 25 bp, SARS Virus
tatgctatctcctagaggaatcgtc

SEQ ID NO: 215522 - DNA, 25 bp, SARS Virus
atgctatctccctgaggaatcgtca

SEQ ID NO: 215523 - DNA, 25 bp, SARS Virus
tgctatctcccataggaatcgtcaa

SEQ ID NO: 215524 - DNA, 25 bp, SARS Virus
gctatctcccagtggaatcgtcaat

SEQ ID NO: 215525 - DNA, 25 bp, SARS Virus
ctatctcccagatgaatcgtcaata

SEQ ID NO: 215526 - DNA, 25 bp, SARS Virus
tatctcccagagtaatcgtcaatat

SEQ ID NO: 215527 - DNA, 25 bp, SARS Virus
atctcccagaggtatcgtcaatata

SEQ ID NO: 215528 - DNA, 25 bp, SARS Virus
tctcccagaggattcgtcaatatac

SEQ ID NO: 215529 - DNA, 25 bp, SARS Virus
ctcccagaggaatcgtcaatatact

SEQ ID NO: 215530 - DNA, 25 bp, SARS Virus
tcccagaggaattgtcaatatactc

SEQ ID NO: 215531 - DNA, 25 bp, SARS Virus
cccagaggaatcttcaatatactca

SEQ ID NO: 215532 - DNA, 25 bp, SARS Virus
ccagaggaatcgtcaatatactcac

SEQ ID NO: 215533 - DNA, 25 bp, SARS Virus
cagaggaatcgttaatatactcaca

SEQ ID NO: 215534 - DNA, 25 bp, SARS Virus
agaggaatcgtctatatactcacat

SEQ ID NO: 215535 - DNA, 25 bp, SARS Virus
gaggaatcgtcattatactcacatt

SEQ ID NO: 215536 - DNA, 25 bp, SARS Virus
aggaatcgtcaatatactcacatta

SEQ ID NO: 215537 - DNA, 25 bp, SARS Virus
ggaatcgtcaatttactcacattac

SEQ ID NO: 215538 - DNA, 25 bp, SARS Virus
gaatcgtcaatatactcacattact

SEQ ID NO: 215539 - DNA, 25 bp, SARS Virus
aatcgtcaatattctcacattactg

SEQ ID NO: 215540 - DNA, 25 bp, SARS Virus
atcgtcaatatattcacattactgg

SEQ ID NO: 215541 - DNA, 25 bp, SARS Virus
tcgtcaatatactcacattactggt

SEQ ID NO: 215542 - DNA, 25 bp, SARS Virus
cgtcaatatacttacattactggtg

SEQ ID NO: 215543 - DNA, 25 bp, SARS Virus
gtcaatatactctcattactggtgt

SEQ ID NO: 215544 - DNA, 25 bp, SARS Virus
tcaatatactcatattactggtgtg

SEQ ID NO: 215545 - DNA, 25 bp, SARS Virus
caatatactcactttactggtgtga

SEQ ID NO: 215546 - DNA, 25 bp, SARS Virus
aatatactcacattactggtgtgac

SEQ ID NO: 215547 - DNA, 25 bp, SARS Virus
atatactcacattactggtgtgact

SEQ ID NO: 215548 - DNA, 25 bp, SARS Virus
tatactcacatttctggtgtgacta

SEQ ID NO: 215549 - DNA, 25 bp, SARS Virus
atactcacattattggtgtgactat

SEQ ID NO: 215550 - DNA, 25 bp, SARS Virus
tactcacattactggtgtgactatc

SEQ ID NO: 215551 - DNA, 25 bp, SARS Virus
actcacattacttgtgtgactatca

SEQ ID NO: 215552 - DNA, 25 bp, SARS Virus
ctcacattactgttgtgactatcaa

SEQ ID NO: 215553 - DNA, 25 bp, SARS Virus
tcacattactggtgtgactatcaat

SEQ ID NO: 215554 - DNA, 25 bp, SARS Virus
cacattactggtttgactatcaatg

SEQ ID NO: 215555 - DNA, 25 bp, SARS Virus
acattactggtgtgactatcaatgg

SEQ ID NO: 215556 - DNA, 25 bp, SARS Virus
cattactggtgttactatcaatggt

SEQ ID NO: 215557 - DNA, 25 bp, SARS Virus
attactggtgtgtctatcaatggtc

SEQ ID NO: 215558 - DNA, 25 bp, SARS Virus
ttactggtgtgattatcaatggtca

SEQ ID NO: 215559 - DNA, 25 bp, SARS Virus
tactggtgtgactatcaatggtcac

SEQ ID NO: 215560 - DNA, 25 bp, SARS Virus
actggtgtgactttcaatggtcaca

SEQ ID NO: 215561 - DNA, 25 bp, SARS Virus
ctggtgtgactatcaatggtcacat

SEQ ID NO: 215562 - DNA, 25 bp, SARS Virus
tggtgtgactattaatggtcacatg

SEQ ID NO: 215563 - DNA, 25 bp, SARS Virus
ggtgtgactatctatggtcacatga

SEQ ID NO: 215564 - DNA, 25 bp, SARS Virus
gtgtgactatcattggtcacatgag

SEQ ID NO: 215565 - DNA, 25 bp, SARS Virus
tgtgactatcaatggtcacatgagt

SEQ ID NO: 215566 - DNA, 25 bp, SARS Virus
gtgactatcaattgtcacatgagta

SEQ ID NO: 215567 - DNA, 25 bp, SARS Virus
tgactatcaatgttcacatgagtaa

SEQ ID NO: 215568 - DNA, 25 bp, SARS Virus
gactatcaatggtcacatgagtaag

SEQ ID NO: 215569 - DNA, 25 bp, SARS Virus
actatcaatggttacatgagtaagc

SEQ ID NO: 215570 - DNA, 25 bp, SARS Virus
ctatcaatggtctcatgagtaagcg

SEQ ID NO: 215571 - DNA, 25 bp, SARS Virus
tatcaatggtcatatgagtaagcgt

SEQ ID NO: 215572 - DNA, 25 bp, SARS Virus
atcaatggtcacttgagtaagcgtg

SEQ ID NO: 215573 - DNA, 25 bp, SARS Virus
tcaatggtcacatgagtaagcgtgt

SEQ ID NO: 215574 - DNA, 25 bp, SARS Virus
caatggtcacattagtaagcgtgta

SEQ ID NO: 215575 - DNA, 25 bp, SARS Virus
aatggtcacatgtgtaagcgtgtat

SEQ ID NO: 215576 - DNA, 25 bp, SARS Virus
atggtcacatgattaagcgtgtatt

SEQ ID NO: 215577 - DNA, 25 bp, SARS Virus
tggtcacatgagtaagcgtgtattc

SEQ ID NO: 215578 - DNA, 25 bp, SARS Virus
ggtcacatgagttagcgtgtattct

SEQ ID NO: 215579 - DNA, 25 bp, SARS Virus
gtcacatgagtatgcgtgtattctt

SEQ ID NO: 215580 - DNA, 25 bp, SARS Virus
tcacatgagtaatcgtgtattctta

SEQ ID NO: 215581 - DNA, 25 bp, SARS Virus
cacatgagtaagtgtgtattcttac

SEQ ID NO: 215582 - DNA, 25 bp, SARS Virus
acatgagtaagcttgtattcttaca

SEQ ID NO: 215583 - DNA, 25 bp, SARS Virus
catgagtaagcgtgtattcttacat

SEQ ID NO: 215584 - DNA, 25 bp, SARS Virus
atgagtaagcgtttattcttacatg

SEQ ID NO: 215585 - DNA, 25 bp, SARS Virus
tgagtaagcgtgtattcttacatgg

SEQ ID NO: 215586 - DNA, 25 bp, SARS Virus
gagtaagcgtgttttcttacatgga

SEQ ID NO: 215587 - DNA, 25 bp, SARS Virus
agtaagcgtgtattcttacatggaa

SEQ ID NO: 215588 - DNA, 25 bp, SARS Virus
gtaagcgtgtattcttacatggaac

SEQ ID NO: 215589 - DNA, 25 bp, SARS Virus
taagcgtgtatttttacatggaacg

SEQ ID NO: 215590 - DNA, 25 bp, SARS Virus
aagcgtgtattcttacatggaacga

SEQ ID NO: 215591 - DNA, 25 bp, SARS Virus
agcgtgtattcttacatggaacgac

SEQ ID NO: 215592 - DNA, 25 bp, SARS Virus
gcgtgtattctttcatggaacgaca

SEQ ID NO: 215593 - DNA, 25 bp, SARS Virus
cgtgtattcttatatggaacgacat

SEQ ID NO: 215594 - DNA, 25 bp, SARS Virus
gtgtattcttacttggaacgacatt

SEQ ID NO: 215595 - DNA, 25 bp, SARS Virus
tgtattcttacatggaacgacatta

SEQ ID NO: 215596 - DNA, 25 bp, SARS Virus
gtattcttacattgaacgacattaa

SEQ ID NO: 215597 - DNA, 25 bp, SARS Virus
tattcttacatgtaacgacattaaa

SEQ ID NO: 215598 - DNA, 25 bp, SARS Virus
attcttacatggtacgacattaaat

SEQ ID NO: 215599 - DNA, 25 bp, SARS Virus
ttcttacatggatcgacattaaata

SEQ ID NO: 215600 - DNA, 25 bp, SARS Virus
tcttacatggaatgacattaaatat

SEQ ID NO: 215601 - DNA, 25 bp, SARS Virus
cttacatggaactacattaaatatg

SEQ ID NO: 215602 - DNA, 25 bp, SARS Virus
ttacatggaacgtcattaaatatga

SEQ ID NO: 215603 - DNA, 25 bp, SARS Virus
tacatggaacgatattaaatatgag

SEQ ID NO: 215604 - DNA, 25 bp, SARS Virus
acatggaacgactttaaatatgagt

SEQ ID NO: 215605 - DNA, 25 bp, SARS Virus
catggaacgacattaaatatgagtc

SEQ ID NO: 215606 - DNA, 25 bp, SARS Virus
atggaacgacattaaatatgagtcg

SEQ ID NO: 215607 - DNA, 25 bp, SARS Virus
tggaacgacatttaatatgagtcgt

SEQ ID NO: 215608 - DNA, 25 bp, SARS Virus
ggaacgacattatatatgagtcgtc

SEQ ID NO: 215609 - DNA, 25 bp, SARS Virus
gaacgacattaattatgagtcgtcc

SEQ ID NO: 215610 - DNA, 25 bp, SARS Virus
aacgacattaaatatgagtcgtcca

SEQ ID NO: 215611 - DNA, 25 bp, SARS Virus
acgacattaaatttgagtcgtccac

SEQ ID NO: 215612 - DNA, 25 bp, SARS Virus
cgacattaaatatgagtcgtccacc

SEQ ID NO: 215613 - DNA, 25 bp, SARS Virus
gacattaaatattagtcgtccacca

SEQ ID NO: 215614 - DNA, 25 bp, SARS Virus
acattaaatatgtgtcgtccaccac

SEQ ID NO: 215615 - DNA, 25 bp, SARS Virus
cattaaatatgattcgtccaccacg

SEQ ID NO: 215616 - DNA, 25 bp, SARS Virus
attaaatatgagtcgtccaccacgt

SEQ ID NO: 215617 - DNA, 25 bp, SARS Virus
ttaaatatgagttgtccaccacgtc

SEQ ID NO: 215618 - DNA, 25 bp, SARS Virus
taaatatgagtcttccaccacgtct

SEQ ID NO: 215619 - DNA, 25 bp, SARS Virus
aaatatgagtcgtccaccacgtctg

SEQ ID NO: 215620 - DNA, 25 bp, SARS Virus
aatatgagtcgttcaccacgtctgt

SEQ ID NO: 215621 - DNA, 25 bp, SARS Virus
atatgagtcgtctaccacgtctgta

SEQ ID NO: 215622 - DNA, 25 bp, SARS Virus
tatgagtcgtcctccacgtctgtag

SEQ ID NO: 215623 - DNA, 25 bp, SARS Virus
atgagtcgtccatcacgtctgtagt

SEQ ID NO: 215624 - DNA, 25 bp, SARS Virus
tgagtcgtccactacgtctgtagta

SEQ ID NO: 215625 - DNA, 25 bp, SARS Virus
gagtcgtccacctcgtctgtagtat

SEQ ID NO: 215626 - DNA, 25 bp, SARS Virus
agtcgtccaccatgtctgtagtatt

SEQ ID NO: 215627 - DNA, 25 bp, SARS Virus
gtcgtccaccacttctgtagtattg

SEQ ID NO: 215628 - DNA, 25 bp, SARS Virus
tcgtccaccacgtctgtagtattgt

SEQ ID NO: 215629 - DNA, 25 bp, SARS Virus
cgtccaccacgtttgtagtattgtt

SEQ ID NO: 215630 - DNA, 25 bp, SARS Virus
gtccaccacgtctgtagtattgttt

SEQ ID NO: 215631 - DNA, 25 bp, SARS Virus
tccaccacgtctttagtattgtttt

SEQ ID NO: 215632 - DNA, 25 bp, SARS Virus
ccaccacgtctgtagtattgttttc

SEQ ID NO: 215633 - DNA, 25 bp, SARS Virus
caccacgtctgttgtattgttttct

SEQ ID NO: 215634 - DNA, 25 bp, SARS Virus
accacgtctgtattattgttttctt

SEQ ID NO: 215635 - DNA, 25 bp, SARS Virus
ccacgtctgtagtattgttttcttc

SEQ ID NO: 215636 - DNA, 25 bp, SARS Virus
cacgtctgtagttttgttttcttct

SEQ ID NO: 215637 - DNA, 25 bp, SARS Virus
acgtctgtagtattgttttcttctg

SEQ ID NO: 215638 - DNA, 25 bp, SARS Virus
cgtctgtagtattgttttcttctga

SEQ ID NO: 215639 - DNA, 25 bp, SARS Virus
gtctgtagtatttttttcttctgag

SEQ ID NO: 215640 - DNA, 25 bp, SARS Virus
tctgtagtattgttttcttctgaga

SEQ ID NO: 215641 - DNA, 25 bp, SARS Virus
ctgtagtattgttttcttctgagaa

SEQ ID NO: 215642 - DNA, 25 bp, SARS Virus
tgtagtattgttttcttctgagaac

SEQ ID NO: 215643 - DNA, 25 bp, SARS Virus
gtagtattgttttcttctgagaaca

SEQ ID NO: 215644 - DNA, 25 bp, SARS Virus
tagtattgtttttttctgagaacaa

SEQ ID NO: 215645 - DNA, 25 bp, SARS Virus
agtattgttttcttctgagaacaac

SEQ ID NO: 215646 - DNA, 25 bp, SARS Virus
gtattgttttcttctgagaacaaca

SEQ ID NO: 215647 - DNA, 25 bp, SARS Virus
tattgttttcttttgagaacaacat

SEQ ID NO: 215648 - DNA, 25 bp, SARS Virus
attgttttcttctgagaacaacatg

SEQ ID NO: 215649 - DNA, 25 bp, SARS Virus
ttgttttcttcttagaacaacatga

SEQ ID NO: 215650 - DNA, 25 bp, SARS Virus
tgttttcttctgtgaacaacatgat

SEQ ID NO: 215651 - DNA, 25 bp, SARS Virus
gttttcttctgataacaacatgatc

SEQ ID NO: 215652 - DNA, 25 bp, SARS Virus
ttttcttctgagtacaacatgatct

SEQ ID NO: 215653 - DNA, 25 bp, SARS Virus
tttcttctgagatcaacatgatcta

SEQ ID NO: 215654 - DNA, 25 bp, SARS Virus
ttcttctgagaataacatgatctat

SEQ ID NO: 215655 - DNA, 25 bp, SARS Virus
tcttctgagaactacatgatctata

SEQ ID NO: 215656 - DNA, 25 bp, SARS Virus
cttctgagaacatcatgatctataa

SEQ ID NO: 215657 - DNA, 25 bp, SARS Virus
ttctgagaacaatatgatctataac

SEQ ID NO: 215658 - DNA, 25 bp, SARS Virus
tctgagaacaacttgatctataaca

SEQ ID NO: 215659 - DNA, 25 bp, SARS Virus
ctgagaacaacatgatctataacac

SEQ ID NO: 215660 - DNA, 25 bp, SARS Virus
tgagaacaacattatctataacaca

SEQ ID NO: 215661 - DNA, 25 bp, SARS Virus
gagaacaacatgttctataacacat

SEQ ID NO: 215662 - DNA, 25 bp, SARS Virus
agaacaacatgatctataacacatc

SEQ ID NO: 215663 - DNA, 25 bp, SARS Virus
gaacaacatgatttataacacatcg

SEQ ID NO: 215664 - DNA, 25 bp, SARS Virus
aacaacatgatctataacacatcgt

SEQ ID NO: 215665 - DNA, 25 bp, SARS Virus
acaacatgatctttaacacatcgta

SEQ ID NO: 215666 - DNA, 25 bp, SARS Virus
caacatgatctataacacatcgtag

SEQ ID NO: 215667 - DNA, 25 bp, SARS Virus
aacatgatctattacacatcgtagt

SEQ ID NO: 215668 - DNA, 25 bp, SARS Virus
acatgatctatatcacatcgtagtg

SEQ ID NO: 215669 - DNA, 25 bp, SARS Virus
catgatctataatacatcgtagtgc

SEQ ID NO: 215670 - DNA, 25 bp, SARS Virus
atgatctataactcatcgtagtgct

SEQ ID NO: 215671 - DNA, 25 bp, SARS Virus
tgatctataacatatcgtagtgctg

SEQ ID NO: 215672 - DNA, 25 bp, SARS Virus
gatctataacacttcgtagtgctgg

SEQ ID NO: 215673 - DNA, 25 bp, SARS Virus
atctataacacatcgtagtgctggt

SEQ ID NO: 215674 - DNA, 25 bp, SARS Virus
tctataacacattgtagtgctggtg

SEQ ID NO: 215675 - DNA, 25 bp, SARS Virus
ctataacacatcttagtgctggtgt

SEQ ID NO: 215676 - DNA, 25 bp, SARS Virus
tataacacatcgtagtgctggtgtg

SEQ ID NO: 215677 - DNA, 25 bp, SARS Virus
ataacacatcgttgtgctggtgtgt

SEQ ID NO: 215678 - DNA, 25 bp, SARS Virus
taacacatcgtattgctggtgtgtg

SEQ ID NO: 215679 - DNA, 25 bp, SARS Virus
aacacatcgtagtgctggtgtgtgt

SEQ ID NO: 215680 - DNA, 25 bp, SARS Virus
acacatcgtagttctggtgtgtgtg

SEQ ID NO: 215681 - DNA, 25 bp, SARS Virus
cacatcgtagtgttggtgtgtgtgt

SEQ ID NO: 215682 - DNA, 25 bp, SARS Virus
acatcgtagtgctggtgtgtgtgta

SEQ ID NO: 215683 - DNA, 25 bp, SARS Virus
catcgtagtgcttgtgtgtgtgtac

SEQ ID NO: 215684 - DNA, 25 bp, SARS Virus
atcgtagtgctgttgtgtgtgtacc

SEQ ID NO: 215685 - DNA, 25 bp, SARS Virus
tcgtagtgctggtgtgtgtgtacct

SEQ ID NO: 215686 - DNA, 25 bp, SARS Virus
cgtagtgctggtttgtgtgtacctt

SEQ ID NO: 215687 - DNA, 25 bp, SARS Virus
gtagtgctggtgtgtgtgtacctta

SEQ ID NO: 215688 - DNA, 25 bp, SARS Virus
tagtgctggtgtttgtgtaccttac

SEQ ID NO: 215689 - DNA, 25 bp, SARS Virus
agtgctggtgtgtgtgtaccttacc

SEQ ID NO: 215690 - DNA, 25 bp, SARS Virus
gtgctggtgtgtttgtaccttacct

SEQ ID NO: 215691 - DNA, 25 bp, SARS Virus
tgctggtgtgtgtgtaccttacctt

SEQ ID NO: 215692 - DNA, 25 bp, SARS Virus
gctggtgtgtgtttaccttaccttt

SEQ ID NO: 215693 - DNA, 25 bp, SARS Virus
ctggtgtgtgtgtaccttacctttg

SEQ ID NO: 215694 - DNA, 25 bp, SARS Virus
tggtgtgtgtgttccttacctttgt

SEQ ID NO: 215695 - DNA, 25 bp, SARS Virus
ggtgtgtgtgtatcttacctttgtg

SEQ ID NO: 215696 - DNA, 25 bp, SARS Virus
gtgtgtgtgtactttacctttgtgg

SEQ ID NO: 215697 - DNA, 25 bp, SARS Virus
tgtgtgtgtaccttacctttgtgga

SEQ ID NO: 215698 - DNA, 25 bp, SARS Virus
gtgtgtgtaccttacctttgtggac

SEQ ID NO: 215699 - DNA, 25 bp, SARS Virus
tgtgtgtacctttcctttgtggaca

SEQ ID NO: 215700 - DNA, 25 bp, SARS Virus
gtgtgtaccttatctttgtggacag

SEQ ID NO: 215701 - DNA, 25 bp, SARS Virus
tgtgtaccttacttttgtggacaga

SEQ ID NO: 215702 - DNA, 25 bp, SARS Virus
gtgtaccttacctttgtggacagaa

SEQ ID NO: 215703 - DNA, 25 bp, SARS Virus
tgtaccttacctttgtggacagaat

SEQ ID NO: 215704 - DNA, 25 bp, SARS Virus
gtaccttacctttgtggacagaatt

SEQ ID NO: 215705 - DNA, 25 bp, SARS Virus
taccttacctttttggacagaattc

SEQ ID NO: 215706 - DNA, 25 bp, SARS Virus
accttacctttgtggacagaattct

SEQ ID NO: 215707 - DNA, 25 bp, SARS Virus
ccttacctttgttgacagaattcta

SEQ ID NO: 215708 - DNA, 25 bp, SARS Virus
cttacctttgtgtacagaattctaa

SEQ ID NO: 215709 - DNA, 25 bp, SARS Virus
ttacctttgtggtcagaattctaat

SEQ ID NO: 215710 - DNA, 25 bp, SARS Virus
tacctttgtggatagaattctaata

SEQ ID NO: 215711 - DNA, 25 bp, SARS Virus
acctttgtggactgaattctaatag

SEQ ID NO: 215712 - DNA, 25 bp, SARS Virus
cctttgtggacataattctaatagt

SEQ ID NO: 215713 - DNA, 25 bp, SARS Virus
ctttgtggacagtattctaatagta

SEQ ID NO: 215714 - DNA, 25 bp, SARS Virus
tttgtggacagatttctaatagtat

SEQ ID NO: 215715 - DNA, 25 bp, SARS Virus
ttgtggacagaattctaatagtatt

SEQ ID NO: 215716 - DNA, 25 bp, SARS Virus
tgtggacagaattctaatagtattc

SEQ ID NO: 215717 - DNA, 25 bp, SARS Virus
gtggacagaattttaatagtattct

SEQ ID NO: 215718 - DNA, 25 bp, SARS Virus
tggacagaattctaatagtattcta

SEQ ID NO: 215719 - DNA, 25 bp, SARS Virus
ggacagaattcttatagtattctat

SEQ ID NO: 215720 - DNA, 25 bp, SARS Virus
gacagaattctattagtattctatc

SEQ ID NO: 215721 - DNA, 25 bp, SARS Virus
acagaattctaatagtattctatct

SEQ ID NO: 215722 - DNA, 25 bp, SARS Virus
cagaattctaattgtattctatctc

SEQ ID NO: 215723 - DNA, 25 bp, SARS Virus
agaattctaatattattctatctca

SEQ ID NO: 215724 - DNA, 25 bp, SARS Virus
gaattctaatagtattctatctcat

SEQ ID NO: 215725 - DNA, 25 bp, SARS Virus
aattctaatagttttctatctcatg

SEQ ID NO: 215726 - DNA, 25 bp, SARS Virus
attctaatagtattctatctcatgg

SEQ ID NO: 215727 - DNA, 25 bp, SARS Virus
ttctaatagtattctatctcatggg

SEQ ID NO: 215728 - DNA, 25 bp, SARS Virus
tctaatagtattttatctcatgggt

SEQ ID NO: 215729 - DNA, 25 bp, SARS Virus
ctaatagtattcaatctcatgggta

SEQ ID NO: 215730 - DNA, 25 bp, SARS Virus
taatagtattctatctcatgggtat

SEQ ID NO: 215731 - DNA, 25 bp, SARS Virus
aatagtattctaactcatgggtata

SEQ ID NO: 215732 - DNA, 25 bp, SARS Virus
atagtattctatatcatgggtatat

SEQ ID NO: 215733 - DNA, 25 bp, SARS Virus
tagtattctatcacatgggtatatg

SEQ ID NO: 215734 - DNA, 25 bp, SARS Virus
agtattctatctaatgggtatatgt

SEQ ID NO: 215735 - DNA, 25 bp, SARS Virus
gtattctatctcatgggtatatgta

SEQ ID NO: 215736 - DNA, 25 bp, SARS Virus
tattctatctcaagggtatatgtag

SEQ ID NO: 215737 - DNA, 25 bp, SARS Virus
attctatctcataggtatatgtagt

SEQ ID NO: 215738 - DNA, 25 bp, SARS Virus
ttctatctcatgagtatatgtagtg

SEQ ID NO: 215739 - DNA, 25 bp, SARS Virus
tctatctcatggatatatgtagtgt

SEQ ID NO: 215740 - DNA, 25 bp, SARS Virus
ctatctcatgggaatatgtagtgtc

SEQ ID NO: 215741 - DNA, 25 bp, SARS Virus
tatctcatgggtatatgtagtgtcg

SEQ ID NO: 215742 - DNA, 25 bp, SARS Virus
atctcatgggtaaatgtagtgtcga

SEQ ID NO: 215743 - DNA, 25 bp, SARS Virus
tctcatgggtatatgtagtgtcgaa

SEQ ID NO: 215744 - DNA, 25 bp, SARS Virus
ctcatgggtataagtagtgtcgaag

SEQ ID NO: 215745 - DNA, 25 bp, SARS Virus
tcatgggtatatatagtgtcgaaga

SEQ ID NO: 215746 - DNA, 25 bp, SARS Virus
catgggtatatgaagtgtcgaagat

SEQ ID NO: 215747 - DNA, 25 bp, SARS Virus
atgggtatatgtagtgtcgaagatg

SEQ ID NO: 215748 - DNA, 25 bp, SARS Virus
tgggtatatgtaatgtcgaagatgt

SEQ ID NO: 215749 - DNA, 25 bp, SARS Virus
gggtatatgtagagtcgaagatgtg

SEQ ID NO: 215750 - DNA, 25 bp, SARS Virus
ggtatatgtagtatcgaagatgtgg

SEQ ID NO: 215751 - DNA, 25 bp, SARS Virus
gtatatgtagtgacgaagatgtggg

SEQ ID NO: 215752 - DNA, 25 bp, SARS Virus
tatatgtagtgtagaagatgtgggc

SEQ ID NO: 215753 - DNA, 25 bp, SARS Virus
atatgtagtgtcaaagatgtgggca

SEQ ID NO: 215754 - DNA, 25 bp, SARS Virus
tatgtagtgtcgaagatgtgggcaa

SEQ ID NO: 215755 - DNA, 25 bp, SARS Virus
atgtagtgtcgaagatgtgggcaat

SEQ ID NO: 215756 - DNA, 25 bp, SARS Virus
tgtagtgtcgaaaatgtgggcaatt

SEQ ID NO: 215757 - DNA, 25 bp, SARS Virus
gtagtgtcgaagatgtgggcaattc

SEQ ID NO: 215758 - DNA, 25 bp, SARS Virus
tagtgtcgaagaagtgggcaattcc

SEQ ID NO: 215759 - DNA, 25 bp, SARS Virus
agtgtcgaagatatgggcaattcca

SEQ ID NO: 215760 - DNA, 25 bp, SARS Virus
gtgtcgaagatgagggcaattccat

SEQ ID NO: 215761 - DNA, 25 bp, SARS Virus
tgtcgaagatgtaggcaattccatc

SEQ ID NO: 215762 - DNA, 25 bp, SARS Virus
gtcgaagatgtgagcaattccatca

SEQ ID NO: 215763 - DNA, 25 bp, SARS Virus
tcgaagatgtggacaattccatcat

SEQ ID NO: 215764 - DNA, 25 bp, SARS Virus
cgaagatgtgggaaattccatcatc

SEQ ID NO: 215765 - DNA, 25 bp, SARS Virus
gaagatgtgggcaattccatcatca

SEQ ID NO: 215766 - DNA, 25 bp, SARS Virus
aagatgtgggcaattccatcatcaa

SEQ ID NO: 215767 - DNA, 25 bp, SARS Virus
agatgtgggcaaatccatcatcaaa

SEQ ID NO: 215768 - DNA, 25 bp, SARS Virus
gatgtgggcaataccatcatcaaaa

SEQ ID NO: 215769 - DNA, 25 bp, SARS Virus
atgtgggcaattacatcatcaaaag

SEQ ID NO: 215770 - DNA, 25 bp, SARS Virus
tgtgggcaattcaatcatcaaaaga

SEQ ID NO: 215771 - DNA, 25 bp, SARS Virus
gtgggcaattccatcatcaaaagac

SEQ ID NO: 215772 - DNA, 25 bp, SARS Virus
tgggcaattccaacatcaaaagact

SEQ ID NO: 215773 - DNA, 25 bp, SARS Virus
gggcaattccataatcaaaagactg

SEQ ID NO: 215774 - DNA, 25 bp, SARS Virus
ggcaattccatcatcaaaagactgg

SEQ ID NO: 215775 - DNA, 25 bp, SARS Virus
gcaattccatcaacaaaagactggt

SEQ ID NO: 215776 - DNA, 25 bp, SARS Virus
caattccatcataaaaagactggtg

SEQ ID NO: 215777 - DNA, 25 bp, SARS Virus
aattccatcatcaaaagactggtgt

SEQ ID NO: 215778 - DNA, 25 bp, SARS Virus
attccatcatcaaaagactggtgtt

SEQ ID NO: 215779 - DNA, 25 bp, SARS Virus
ttccatcatcaaaagactggtgtta

SEQ ID NO: 215780 - DNA, 25 bp, SARS Virus
tccatcatcaaaagactggtgttac

SEQ ID NO: 215781 - DNA, 25 bp, SARS Virus
ccatcatcaaaaaactggtgttaca

SEQ ID NO: 215782 - DNA, 25 bp, SARS Virus
catcatcaaaagactggtgttacaa

SEQ ID NO: 215783 - DNA, 25 bp, SARS Virus
atcatcaaaagaatggtgttacaaa

SEQ ID NO: 215784 - DNA, 25 bp, SARS Virus
tcatcaaaagacaggtgttacaaat

SEQ ID NO: 215785 - DNA, 25 bp, SARS Virus
catcaaaagactagtgttacaaatg

SEQ ID NO: 215786 - DNA, 25 bp, SARS Virus
atcaaaagactgatgttacaaatgt

SEQ ID NO: 215787 - DNA, 25 bp, SARS Virus
tcaaaagactggagttacaaatgtg

SEQ ID NO: 215788 - DNA, 25 bp, SARS Virus
caaaagactggtattacaaatgtgt

SEQ ID NO: 215789 - DNA, 25 bp, SARS Virus
aaaagactggtgatacaaatgtgtg

SEQ ID NO: 215790 - DNA, 25 bp, SARS Virus
aaagactggtgtaacaaatgtgtgg

SEQ ID NO: 215791 - DNA, 25 bp, SARS Virus
aagactggtgttacaaatgtgtggt

SEQ ID NO: 215792 - DNA, 25 bp, SARS Virus
agactggtgttaaaaatgtgtggtg

SEQ ID NO: 215793 - DNA, 25 bp, SARS Virus
gactggtgttacaaatgtgtggtgt

SEQ ID NO: 215794 - DNA, 25 bp, SARS Virus
actggtgttacaaatgtgtggtgta

SEQ ID NO: 215795 - DNA, 25 bp, SARS Virus
ctggtgttacaaatgtgtggtgtaa

SEQ ID NO: 215796 - DNA, 25 bp, SARS Virus
tggtgttacaaaagtgtggtgtaat

SEQ ID NO: 215797 - DNA, 25 bp, SARS Virus
ggtgttacaaatatgtggtgtaatt

SEQ ID NO: 215798 - DNA, 25 bp, SARS Virus
gtgttacaaatgagtggtgtaattc

SEQ ID NO: 215799 - DNA, 25 bp, SARS Virus
tgttacaaatgtatggtgtaattct

SEQ ID NO: 215800 - DNA, 25 bp, SARS Virus
gttacaaatgtgaggtgtaattctt

SEQ ID NO: 215801 - DNA, 25 bp, SARS Virus
ttacaaatgtgtagtgtaattcttg

SEQ ID NO: 215802 - DNA, 25 bp, SARS Virus
tacaaatgtgtgatgtaattcttga

SEQ ID NO: 215803 - DNA, 25 bp, SARS Virus
acaaatgtgtggagtaattcttgag

SEQ ID NO: 215804 - DNA, 25 bp, SARS Virus
caaatgtgtggtataattcttgagc

SEQ ID NO: 215805 - DNA, 25 bp, SARS Virus
aaatgtgtggtgaaattcttgagcg

SEQ ID NO: 215806 - DNA, 25 bp, SARS Virus
aatgtgtggtgtaattcttgagcga

SEQ ID NO: 215807 - DNA, 25 bp, SARS Virus
atgtgtggtgtaattcttgagcgaa

SEQ ID NO: 215808 - DNA, 25 bp, SARS Virus
tgtgtggtgtaaatcttgagcgaaa

SEQ ID NO: 215809 - DNA, 25 bp, SARS Virus
gtgtggtgtaatacttgagcgaaac

SEQ ID NO: 215810 - DNA, 25 bp, SARS Virus
tgtggtgtaattattgagcgaaacg

SEQ ID NO: 215811 - DNA, 25 bp, SARS Virus
gtggtgtaattcatgagcgaaacgt

SEQ ID NO: 215812 - DNA, 25 bp, SARS Virus
tggtgtaattctagagcgaaacgtc

SEQ ID NO: 215813 - DNA, 25 bp, SARS Virus
ggtgtaattcttaagcgaaacgtct

SEQ ID NO: 215814 - DNA, 25 bp, SARS Virus
gtgtaattcttgagcgaaacgtcta

SEQ ID NO: 215815 - DNA, 25 bp, SARS Virus
tgtaattcttgaacgaaacgtctaa

SEQ ID NO: 215816 - DNA, 25 bp, SARS Virus
gtaattcttgagagaaacgtctaag

SEQ ID NO: 215817 - DNA, 25 bp, SARS Virus
taattcttgagcaaaacgtctaagg

SEQ ID NO: 215818 - DNA, 25 bp, SARS Virus
aattcttgagcgaaacgtctaaggt

SEQ ID NO: 215819 - DNA, 25 bp, SARS Virus
attcttgagcgaaacgtctaaggtt

SEQ ID NO: 215820 - DNA, 25 bp, SARS Virus
ttcttgagcgaaacgtctaaggttt

SEQ ID NO: 215821 - DNA, 25 bp, SARS Virus
tcttgagcgaaaagtctaaggttta

SEQ ID NO: 215822 - DNA, 25 bp, SARS Virus
cttgagcgaaacatctaaggtttaa

SEQ ID NO: 215823 - DNA, 25 bp, SARS Virus
ttgagcgaaacgactaaggtttaat

SEQ ID NO: 215824 - DNA, 25 bp, SARS Virus
tgagcgaaacgtataaggtttaatc

SEQ ID NO: 215825 - DNA, 25 bp, SARS Virus
gagcgaaacgtcaaaggtttaatcg

SEQ ID NO: 215826 - DNA, 25 bp, SARS Virus
agcgaaacgtctaaggtttaatcgt

SEQ ID NO: 215827 - DNA, 25 bp, SARS Virus
gcgaaacgtctaaggtttaatcgta

SEQ ID NO: 215828 - DNA, 25 bp, SARS Virus
cgaaacgtctaaagtttaatcgtac

SEQ ID NO: 215829 - DNA, 25 bp, SARS Virus
gaaacgtctaagatttaatcgtacg

SEQ ID NO: 215830 - DNA, 25 bp, SARS Virus
aaacgtctaaggattaatcgtacga

SEQ ID NO: 215831 - DNA, 25 bp, SARS Virus
aacgtctaaggtataatcgtacgac

SEQ ID NO: 215832 - DNA, 25 bp, SARS Virus
acgtctaaggttaaatcgtacgaca

SEQ ID NO: 215833 - DNA, 25 bp, SARS Virus
cgtctaaggtttaatcgtacgacat

SEQ ID NO: 215834 - DNA, 25 bp, SARS Virus
gtctaaggtttaatcgtacgacatc

SEQ ID NO: 215835 - DNA, 25 bp, SARS Virus
tctaaggtttaaacgtacgacatct

SEQ ID NO: 215836 - DNA, 25 bp, SARS Virus
ctaaggtttaatagtacgacatctt

SEQ ID NO: 215837 - DNA, 25 bp, SARS Virus
taaggtttaatcatacgacatcttc

SEQ ID NO: 215838 - DNA, 25 bp, SARS Virus
aaggtttaatcgaacgacatcttct

SEQ ID NO: 215839 - DNA, 25 bp, SARS Virus
aggtttaatcgtacgacatcttcta

SEQ ID NO: 215840 - DNA, 25 bp, SARS Virus
ggtttaatcgtaagacatcttctac

SEQ ID NO: 215841 - DNA, 25 bp, SARS Virus
gtttaatcgtacaacatcttctacc

SEQ ID NO: 215842 - DNA, 25 bp, SARS Virus
tttaatcgtacgacatcttctaccc

SEQ ID NO: 215843 - DNA, 25 bp, SARS Virus
ttaatcgtacgaaatcttctaccca

SEQ ID NO: 215844 - DNA, 25 bp, SARS Virus
taatcgtacgacatcttctacccag

SEQ ID NO: 215845 - DNA, 25 bp, SARS Virus
aatcgtacgacaacttctacccagt

SEQ ID NO: 215846 - DNA, 25 bp, SARS Virus
atcgtacgacatattctacccagta

SEQ ID NO: 215847 - DNA, 25 bp, SARS Virus
tcgtacgacatcatctacccagtat

SEQ ID NO: 215848 - DNA, 25 bp, SARS Virus
cgtacgacatctactacccagtatc

SEQ ID NO: 215849 - DNA, 25 bp, SARS Virus
gtacgacatcttatacccagtatca

SEQ ID NO: 215850 - DNA, 25 bp, SARS Virus
tacgacatcttcaacccagtatcaa

SEQ ID NO: 215851 - DNA, 25 bp, SARS Virus
acgacatcttctacccagtatcaaa

SEQ ID NO: 215852 - DNA, 25 bp, SARS Virus
cgacatcttctaaccagtatcaaag

SEQ ID NO: 215853 - DNA, 25 bp, SARS Virus
gacatcttctacacagtatcaaaga

SEQ ID NO: 215854 - DNA, 25 bp, SARS Virus
acatcttctaccaagtatcaaagag

SEQ ID NO: 215855 - DNA, 25 bp, SARS Virus
catcttctacccagtatcaaagaga

SEQ ID NO: 215856 - DNA, 25 bp, SARS Virus
atcttctacccaatatcaaagagac

SEQ ID NO: 215857 - DNA, 25 bp, SARS Virus
tcttctacccagaatcaaagagact

SEQ ID NO: 215858 - DNA, 25 bp, SARS Virus
cttctacccagtatcaaagagactg

SEQ ID NO: 215859 - DNA, 25 bp, SARS Virus
ttctacccagtaacaaagagactgt

SEQ ID NO: 215860 - DNA, 25 bp, SARS Virus
tctacccagtataaaagagactgta

SEQ ID NO: 215861 - DNA, 25 bp, SARS Virus
ctacccagtatcaaagagactgtag

SEQ ID NO: 215862 - DNA, 25 bp, SARS Virus
tacccagtatcaaagagactgtagt

SEQ ID NO: 215863 - DNA, 25 bp, SARS Virus
acccagtatcaaagagactgtagtg

SEQ ID NO: 215864 - DNA, 25 bp, SARS Virus
cccagtatcaaaaagactgtagtgg

SEQ ID NO: 215865 - DNA, 25 bp, SARS Virus
ccagtatcaaagagactgtagtggt

SEQ ID NO: 215866 - DNA, 25 bp, SARS Virus
cagtatcaaagaaactgtagtggtt

SEQ ID NO: 215867 - DNA, 25 bp, SARS Virus
agtatcaaagagactgtagtggttc

SEQ ID NO: 215868 - DNA, 25 bp, SARS Virus
gtatcaaagagaatgtagtggttcg

SEQ ID NO: 215869 - DNA, 25 bp, SARS Virus
tatcaaagagacagtagtggttcga

SEQ ID NO: 215870 - DNA, 25 bp, SARS Virus
atcaaagagactatagtggttcgag

SEQ ID NO: 215871 - DNA, 25 bp, SARS Virus
tcaaagagactgaagtggttcgagc

SEQ ID NO: 215872 - DNA, 25 bp, SARS Virus
caaagagactgtagtggttcgagcg

SEQ ID NO: 215873 - DNA, 25 bp, SARS Virus
aaagagactgtaatggttcgagcgg

SEQ ID NO: 215874 - DNA, 25 bp, SARS Virus
aagagactgtagaggttcgagcggt

SEQ ID NO: 215875 - DNA, 25 bp, SARS Virus
agagactgtagtagttcgagcggtt

SEQ ID NO: 215876 - DNA, 25 bp, SARS Virus
gagactgtagtgattcgagcggttg

SEQ ID NO: 215877 - DNA, 25 bp, SARS Virus
agactgtagtggatcgagcggttgt

SEQ ID NO: 215878 - DNA, 25 bp, SARS Virus
gactgtagtggtacgagcggttgtc

SEQ ID NO: 215879 - DNA, 25 bp, SARS Virus
actgtagtggttagagcggttgtca

SEQ ID NO: 215880 - DNA, 25 bp, SARS Virus
ctgtagtggttcaagcggttgtcaa

SEQ ID NO: 215881 - DNA, 25 bp, SARS Virus
tgtagtggttcgagcggttgtcaaa

SEQ ID NO: 215882 - DNA, 25 bp, SARS Virus
gtagtggttcgaacggttgtcaaaa

SEQ ID NO: 215883 - DNA, 25 bp, SARS Virus
tagtggttcgagaggttgtcaaaat

SEQ ID NO: 215884 - DNA, 25 bp, SARS Virus
agtggttcgagcagttgtcaaaata

SEQ ID NO: 215885 - DNA, 25 bp, SARS Virus
gtggttcgagcgattgtcaaaataa

SEQ ID NO: 215886 - DNA, 25 bp, SARS Virus
tggttcgagcggatgtcaaaataat

SEQ ID NO: 215887 - DNA, 25 bp, SARS Virus
ggttcgagcggtagtcaaaataatg

SEQ ID NO: 215888 - DNA, 25 bp, SARS Virus
gttcgagcggttatcaaaataatga

SEQ ID NO: 215889 - DNA, 25 bp, SARS Virus
ttcgagcggttgacaaaataatgac

SEQ ID NO: 215890 - DNA, 25 bp, SARS Virus
tcgagcggttgtaaaaataatgaca

SEQ ID NO: 215891 - DNA, 25 bp, SARS Virus
cgagcggttgtcaaaataatgacat

SEQ ID NO: 215892 - DNA, 25 bp, SARS Virus
gagcggttgtcaaaataatgacatt

SEQ ID NO: 215893 - DNA, 25 bp, SARS Virus
agcggttgtcaaaataatgacattc

SEQ ID NO: 215894 - DNA, 25 bp, SARS Virus
gcggttgtcaaaataatgacattcg

SEQ ID NO: 215895 - DNA, 25 bp, SARS Virus
cggttgtcaaaaaaatgacattcgc

SEQ ID NO: 215896 - DNA, 25 bp, SARS Virus
ggttgtcaaaataatgacattcgct

SEQ ID NO: 215897 - DNA, 25 bp, SARS Virus
gttgtcaaaataatgacattcgctc

SEQ ID NO: 215898 - DNA, 25 bp, SARS Virus
ttgtcaaaataaagacattcgctca

SEQ ID NO: 215899 - DNA, 25 bp, SARS Virus
tgtcaaaataataacattcgctcat

SEQ ID NO: 215900 - DNA, 25 bp, SARS Virus
gtcaaaataatgacattcgctcata

SEQ ID NO: 215901 - DNA, 25 bp, SARS Virus
tcaaaataatgaaattcgctcatac

SEQ ID NO: 215902 - DNA, 25 bp, SARS Virus
caaaataatgacattcgctcatact

SEQ ID NO: 215903 - DNA, 25 bp, SARS Virus
aaaataatgacaatcgctcatactc

SEQ ID NO: 215904 - DNA, 25 bp, SARS Virus
aaataatgacatacgctcatactca

SEQ ID NO: 215905 - DNA, 25 bp, SARS Virus
aataatgacattagctcatactcac

SEQ ID NO: 215906 - DNA, 25 bp, SARS Virus
ataatgacattcactcatactcacg

SEQ ID NO: 215907 - DNA, 25 bp, SARS Virus
taatgacattcgatcatactcacgt

SEQ ID NO: 215908 - DNA, 25 bp, SARS Virus
aatgacattcgcacatactcacgtg

SEQ ID NO: 215909 - DNA, 25 bp, SARS Virus
atgacattcgctaatactcacgtgt

SEQ ID NO: 215910 - DNA, 25 bp, SARS Virus
tgacattcgctcatactcacgtgtt

SEQ ID NO: 215911 - DNA, 25 bp, SARS Virus
gacattcgctcaaactcacgtgttt

SEQ ID NO: 215912 - DNA, 25 bp, SARS Virus
acattcgctcatactcacgtgtttt

SEQ ID NO: 215913 - DNA, 25 bp, SARS Virus
cattcgctcataatcacgtgttttc

SEQ ID NO: 215914 - DNA, 25 bp, SARS Virus
attcgctcatacacacgtgttttca

SEQ ID NO: 215915 - DNA, 25 bp, SARS Virus
ttcgctcatactaacgtgttttcaa

SEQ ID NO: 215916 - DNA, 25 bp, SARS Virus
tcgctcatactcacgtgttttcaat

SEQ ID NO: 215917 - DNA, 25 bp, SARS Virus
cgctcatactcaagtgttttcaatc

SEQ ID NO: 215918 - DNA, 25 bp, SARS Virus
gctcatactcacatgttttcaatcg

SEQ ID NO: 215919 - DNA, 25 bp, SARS Virus
ctcatactcacgagttttcaatcgt

SEQ ID NO: 215920 - DNA, 25 bp, SARS Virus
tcatactcacgtattttcaatcgtc

SEQ ID NO: 215921 - DNA, 25 bp, SARS Virus
catactcacgtgatttcaatcgtcg

SEQ ID NO: 215922 - DNA, 25 bp, SARS Virus
atactcacgtgtattcaatcgtcgt

SEQ ID NO: 215923 - DNA, 25 bp, SARS Virus
tactcacgtgttatcaatcgtcgta

SEQ ID NO: 215924 - DNA, 25 bp, SARS Virus
actcacgtgtttacaatcgtcgtag

SEQ ID NO: 215925 - DNA, 25 bp, SARS Virus
ctcacgtgttttaaatcgtcgtagt

SEQ ID NO: 215926 - DNA, 25 bp, SARS Virus
tcacgtgttttcaatcgtcgtagtg

SEQ ID NO: 215927 - DNA, 25 bp, SARS Virus
cacgtgttttcaatcgtcgtagtgg

SEQ ID NO: 215928 - DNA, 25 bp, SARS Virus
acgtgttttcaaacgtcgtagtggt

SEQ ID NO: 215929 - DNA, 25 bp, SARS Virus
cgtgttttcaatagtcgtagtggtc

SEQ ID NO: 215930 - DNA, 25 bp, SARS Virus
gtgttttcaatcatcgtagtggtcg

SEQ ID NO: 215931 - DNA, 25 bp, SARS Virus
tgttttcaatcgacgtagtggtcgt

SEQ ID NO: 215932 - DNA, 25 bp, SARS Virus
gttttcaatcgtagtagtggtcgtg

SEQ ID NO: 215933 - DNA, 25 bp, SARS Virus
ttttcaatcgtcatagtggtcgtgc

SEQ ID NO: 215934 - DNA, 25 bp, SARS Virus
tttcaatcgtcgaagtggtcgtgcc

SEQ ID NO: 215935 - DNA, 25 bp, SARS Virus
ttcaatcgtcgtagtggtcgtgccc

SEQ ID NO: 215936 - DNA, 25 bp, SARS Virus
tcaatcgtcgtaatggtcgtgcccg

SEQ ID NO: 215937 - DNA, 25 bp, SARS Virus
caatcgtcgtagaggtcgtgcccga

SEQ ID NO: 215938 - DNA, 25 bp, SARS Virus
aatcgtcgtagtagtcgtgcccgag

SEQ ID NO: 215939 - DNA, 25 bp, SARS Virus
atcgtcgtagtgatcgtgcccgaga

SEQ ID NO: 215940 - DNA, 25 bp, SARS Virus
tcgtcgtagtggacgtgcccgagat

SEQ ID NO: 215941 - DNA, 25 bp, SARS Virus
cgtcgtagtggtagtgcccgagata

SEQ ID NO: 215942 - DNA, 25 bp, SARS Virus
gtcgtagtggtcatgcccgagatat

SEQ ID NO: 215943 - DNA, 25 bp, SARS Virus
tcgtagtggtcgagcccgagatatt

SEQ ID NO: 215944 - DNA, 25 bp, SARS Virus
cgtagtggtcgtacccgagatatta

SEQ ID NO: 215945 - DNA, 25 bp, SARS Virus
gtagtggtcgtgaccgagatattat

SEQ ID NO: 215946 - DNA, 25 bp, SARS Virus
tagtggtcgtgcacgagatattatt

SEQ ID NO: 215947 - DNA, 25 bp, SARS Virus
agtggtcgtgccagagatattattc

SEQ ID NO: 215948 - DNA, 25 bp, SARS Virus
gtggtcgtgcccaagatattattcg

SEQ ID NO: 215949 - DNA, 25 bp, SARS Virus
tggtcgtgcccgagatattattcgg

SEQ ID NO: 215950 - DNA, 25 bp, SARS Virus
ggtcgtgcccgaaatattattcgga

SEQ ID NO: 215951 - DNA, 25 bp, SARS Virus
gtcgtgcccgagatattattcggag

SEQ ID NO: 215952 - DNA, 25 bp, SARS Virus
tcgtgcccgagaaattattcggaga

SEQ ID NO: 215953 - DNA, 25 bp, SARS Virus
cgtgcccgagatattattcggagaa

SEQ ID NO: 215954 - DNA, 25 bp, SARS Virus
gtgcccgagataatattcggagaac

SEQ ID NO: 215955 - DNA, 25 bp, SARS Virus
tgcccgagatataattcggagaact

SEQ ID NO: 215956 - DNA, 25 bp, SARS Virus
gcccgagatattattcggagaactt

SEQ ID NO: 215957 - DNA, 25 bp, SARS Virus
cccgagatattaatcggagaacttc

SEQ ID NO: 215958 - DNA, 25 bp, SARS Virus
ccgagatattatacggagaacttca

SEQ ID NO: 215959 - DNA, 25 bp, SARS Virus
cgagatattattaggagaacttcac

SEQ ID NO: 215960 - DNA, 25 bp, SARS Virus
gagatattattcagagaacttcacg

SEQ ID NO: 215961 - DNA, 25 bp, SARS Virus
agatattattcgaagaacttcacga

SEQ ID NO: 215962 - DNA, 25 bp, SARS Virus
gatattattcggagaacttcacgac

SEQ ID NO: 215963 - DNA, 25 bp, SARS Virus
atattattcggaaaacttcacgacc

SEQ ID NO: 215964 - DNA, 25 bp, SARS Virus
tattattcggagaacttcacgacca

SEQ ID NO: 215965 - DNA, 25 bp, SARS Virus
attattcggagaacttcacgaccac

SEQ ID NO: 215966 - DNA, 25 bp, SARS Virus
ttattcggagaaattcacgaccacg

SEQ ID NO: 215967 - DNA, 25 bp, SARS Virus
tattcggagaacatcacgaccacgt

SEQ ID NO: 215968 - DNA, 25 bp, SARS Virus
attcggagaactacacgaccacgta

SEQ ID NO: 215969 - DNA, 25 bp, SARS Virus
ttcggagaacttaacgaccacgtaa

SEQ ID NO: 215970 - DNA, 25 bp, SARS Virus
tcggagaacttcacgaccacgtaac

SEQ ID NO: 215971 - DNA, 25 bp, SARS Virus
cggagaacttcaagaccacgtaact

SEQ ID NO: 215972 - DNA, 25 bp, SARS Virus
ggagaacttcacaaccacgtaactt

SEQ ID NO: 215973 - DNA, 25 bp, SARS Virus
gagaacttcacgaccacgtaactta

SEQ ID NO: 215974 - DNA, 25 bp, SARS Virus
agaacttcacgaacacgtaacttaa

SEQ ID NO: 215975 - DNA, 25 bp, SARS Virus
gaacttcacgacaacgtaacttaaa

SEQ ID NO: 215976 - DNA, 25 bp, SARS Virus
aacttcacgaccacgtaacttaaac

SEQ ID NO: 215977 - DNA, 25 bp, SARS Virus
acttcacgaccaagtaacttaaact

SEQ ID NO: 215978 - DNA, 25 bp, SARS Virus
cttcacgaccacataacttaaactg

SEQ ID NO: 215979 - DNA, 25 bp, SARS Virus
ttcacgaccacgaaacttaaactga

SEQ ID NO: 215980 - DNA, 25 bp, SARS Virus
tcacgaccacgtaacttaaactgaa

SEQ ID NO: 215981 - DNA, 25 bp, SARS Virus
cacgaccacgtaacttaaactgaag

SEQ ID NO: 215982 - DNA, 25 bp, SARS Virus
acgaccacgtaaattaaactgaagt

SEQ ID NO: 215983 - DNA, 25 bp, SARS Virus
cgaccacgtaacataaactgaagtt

SEQ ID NO: 215984 - DNA, 25 bp, SARS Virus
gaccacgtaactaaaactgaagttc

SEQ ID NO: 215985 - DNA, 25 bp, SARS Virus
accacgtaacttaaactgaagttcg

SEQ ID NO: 215986 - DNA, 25 bp, SARS Virus
ccacgtaacttaaactgaagttcga

SEQ ID NO: 215987 - DNA, 25 bp, SARS Virus
cacgtaacttaaactgaagttcgac

SEQ ID NO: 215988 - DNA, 25 bp, SARS Virus
acgtaacttaaaatgaagttcgaca

SEQ ID NO: 215989 - DNA, 25 bp, SARS Virus
cgtaacttaaacagaagttcgacaa

SEQ ID NO: 215990 - DNA, 25 bp, SARS Virus
gtaacttaaactaaagttcgacaac

SEQ ID NO: 215991 - DNA, 25 bp, SARS Virus
taacttaaactgaagttcgacaact

SEQ ID NO: 215992 - DNA, 25 bp, SARS Virus
aacttaaactgaagttcgacaactt

SEQ ID NO: 215993 - DNA, 25 bp, SARS Virus
acttaaactgaaattcgacaacttc

SEQ ID NO: 215994 - DNA, 25 bp, SARS Virus
cttaaactgaagatcgacaacttca

SEQ ID NO: 215995 - DNA, 25 bp, SARS Virus
ttaaactgaagtacgacaacttcac

SEQ ID NO: 215996 - DNA, 25 bp, SARS Virus
taaactgaagttagacaacttcacg

SEQ ID NO: 215997 - DNA, 25 bp, SARS Virus
aaactgaagttcaacaacttcacga

SEQ ID NO: 215998 - DNA, 25 bp, SARS Virus
aactgaagttcgacaacttcacgat

SEQ ID NO: 215999 - DNA, 25 bp, SARS Virus
actgaagttcgaaaacttcacgatt

SEQ ID NO: 216000 - DNA, 25 bp, SARS Virus
ctgaagttcgacaacttcacgatta

SEQ ID NO: 216001 - DNA, 25 bp, SARS Virus
tgaagttcgacaacttcacgattat

SEQ ID NO: 216002 - DNA, 25 bp, SARS Virus
gaagttcgacaaattcacgattatt

SEQ ID NO: 216003 - DNA, 25 bp, SARS Virus
aagttcgacaacatcacgattattt

SEQ ID NO: 216004 - DNA, 25 bp, SARS Virus
agttcgacaactacacgattatttt

SEQ ID NO: 216005 - DNA, 25 bp, SARS Virus
gttcgacaacttaacgattattttg

SEQ ID NO: 216006 - DNA, 25 bp, SARS Virus
ttcgacaacttcacgattattttgt

SEQ ID NO: 216007 - DNA, 25 bp, SARS Virus
tcgacaacttcaagattattttgtg

SEQ ID NO: 216008 - DNA, 25 bp, SARS Virus
cgacaacttcacaattattttgtga

SEQ ID NO: 216009 - DNA, 25 bp, SARS Virus
gacaacttcacgattattttgtgat

SEQ ID NO: 216010 - DNA, 25 bp, SARS Virus
acaacttcacgaatattttgtgatc

SEQ ID NO: 216011 - DNA, 25 bp, SARS Virus
caacttcacgataattttgtgatct

SEQ ID NO: 216012 - DNA, 25 bp, SARS Virus
aacttcacgattattttgtgatctg

SEQ ID NO: 216013 - DNA, 25 bp, SARS Virus
acttcacgattaatttgtgatctgt

SEQ ID NO: 216014 - DNA, 25 bp, SARS Virus
cttcacgattatattgtgatctgtt

SEQ ID NO: 216015 - DNA, 25 bp, SARS Virus
ttcacgattattatgtgatctgttt

SEQ ID NO: 216016 - DNA, 25 bp, SARS Virus
tcacgattatttagtgatctgttta

SEQ ID NO: 216017 - DNA, 25 bp, SARS Virus
cacgattattttatgatctgtttat

SEQ ID NO: 216018 - DNA, 25 bp, SARS Virus
acgattattttgagatctgtttatt

SEQ ID NO: 216019 - DNA, 25 bp, SARS Virus
cgattattttgtaatctgtttattg

SEQ ID NO: 216020 - DNA, 25 bp, SARS Virus
gattattttgtgatctgtttattgt

SEQ ID NO: 216021 - DNA, 25 bp, SARS Virus
attattttgtgaactgtttattgtt

SEQ ID NO: 216022 - DNA, 25 bp, SARS Virus
ttattttgtgatatgtttattgtta

SEQ ID NO: 216023 - DNA, 25 bp, SARS Virus
tattttgtgatcagtttattgttaa

SEQ ID NO: 216024 - DNA, 25 bp, SARS Virus
attttgtgatctatttattgttaac

SEQ ID NO: 216025 - DNA, 25 bp, SARS Virus
ttttgtgatctgattattgttaaca

SEQ ID NO: 216026 - DNA, 25 bp, SARS Virus
tttgtgatctgtatattgttaacaa

SEQ ID NO: 216027 - DNA, 25 bp, SARS Virus
ttgtgatctgttaattgttaacaat

SEQ ID NO: 216028 - DNA, 25 bp, SARS Virus
tgtgatctgtttattgttaacaata

SEQ ID NO: 216029 - DNA, 25 bp, SARS Virus
gtgatctgtttaatgttaacaatag

SEQ ID NO: 216030 - DNA, 25 bp, SARS Virus
tgatctgtttatagttaacaatagt

SEQ ID NO: 216031 - DNA, 25 bp, SARS Virus
gatctgtttattattaacaatagtc

SEQ ID NO: 216032 - DNA, 25 bp, SARS Virus
atctgtttattgataacaatagtcg

SEQ ID NO: 216033 - DNA, 25 bp, SARS Virus
tctgtttattgtaaacaatagtcgg

SEQ ID NO: 216034 - DNA, 25 bp, SARS Virus
ctgtttattgttaacaatagtcggg

SEQ ID NO: 216035 - DNA, 25 bp, SARS Virus
tgtttattgttaacaatagtcgggt

SEQ ID NO: 216036 - DNA, 25 bp, SARS Virus
gtttattgttaaaaatagtcgggta

SEQ ID NO: 216037 - DNA, 25 bp, SARS Virus
tttattgttaacaatagtcgggtaa

SEQ ID NO: 216038 - DNA, 25 bp, SARS Virus
ttattgttaacaatagtcgggtaaa

SEQ ID NO: 216039 - DNA, 25 bp, SARS Virus
tattgttaacaaaagtcgggtaaat

SEQ ID NO: 216040 - DNA, 25 bp, SARS Virus
attgttaacaatagtcgggtaaatt

SEQ ID NO: 216041 - DNA, 25 bp, SARS Virus
ttgttaacaataatcgggtaaatta

SEQ ID NO: 216042 - DNA, 25 bp, SARS Virus
tgttaacaatagacgggtaaattaa

SEQ ID NO: 216043 - DNA, 25 bp, SARS Virus
gttaacaatagtagggtaaattaac

SEQ ID NO: 216044 - DNA, 25 bp, SARS Virus
ttaacaatagtcaggtaaattaact

SEQ ID NO: 216045 - DNA, 25 bp, SARS Virus
taacaatagtcgagtaaattaactt

SEQ ID NO: 216046 - DNA, 25 bp, SARS Virus
aacaatagtcggataaattaacttc

SEQ ID NO: 216047 - DNA, 25 bp, SARS Virus
acaatagtcgggaaaattaacttca

SEQ ID NO: 216048 - DNA, 25 bp, SARS Virus
caatagtcgggtaaattaacttcaa

SEQ ID NO: 216049 - DNA, 25 bp, SARS Virus
aatagtcgggtaaattaacttcaat

SEQ ID NO: 216050 - DNA, 25 bp, SARS Virus
atagtcgggtaaattaacttcaatt

SEQ ID NO: 216051 - DNA, 25 bp, SARS Virus
tagtcgggtaaaataacttcaattt

SEQ ID NO: 216052 - DNA, 25 bp, SARS Virus
agtcgggtaaataaacttcaatttg

SEQ ID NO: 216053 - DNA, 25 bp, SARS Virus
gtcgggtaaattaacttcaatttgg

SEQ ID NO: 216054 - DNA, 25 bp, SARS Virus
tcgggtaaattaacttcaatttggt

SEQ ID NO: 216055 - DNA, 25 bp, SARS Virus
cgggtaaattaaattcaatttggtg

SEQ ID NO: 216056 - DNA, 25 bp, SARS Virus
gggtaaattaacatcaatttggtgg

SEQ ID NO: 216057 - DNA, 25 bp, SARS Virus
ggtaaattaactacaatttggtggt

SEQ ID NO: 216058 - DNA, 25 bp, SARS Virus
gtaaattaacttaaatttggtggtt

SEQ ID NO: 216059 - DNA, 25 bp, SARS Virus
taaattaacttcaatttggtggttg

SEQ ID NO: 216060 - DNA, 25 bp, SARS Virus
aaattaacttcaatttggtggttga

SEQ ID NO: 216061 - DNA, 25 bp, SARS Virus
aattaacttcaaattggtggttgaa

SEQ ID NO: 216062 - DNA, 25 bp, SARS Virus
attaacttcaatatggtggttgaac

SEQ ID NO: 216063 - DNA, 25 bp, SARS Virus
ttaacttcaattaggtggttgaact

SEQ ID NO: 216064 - DNA, 25 bp, SARS Virus
taacttcaatttagtggttgaactc

SEQ ID NO: 216065 - DNA, 25 bp, SARS Virus
aacttcaatttgatggttgaactcc

SEQ ID NO: 216066 - DNA, 25 bp, SARS Virus
acttcaatttggaggttgaactcct

SEQ ID NO: 216067 - DNA, 25 bp, SARS Virus
cttcaatttggtagttgaactcctt

SEQ ID NO: 216068 - DNA, 25 bp, SARS Virus
ttcaatttggtgattgaactccttt

SEQ ID NO: 216069 - DNA, 25 bp, SARS Virus
tcaatttggtggatgaactccttta

SEQ ID NO: 216070 - DNA, 25 bp, SARS Virus
caatttggtggtagaactcctttaa

SEQ ID NO: 216071 - DNA, 25 bp, SARS Virus
aatttggtggttaaactcctttaaa

SEQ ID NO: 216072 - DNA, 25 bp, SARS Virus
atttggtggttgaactcctttaaag

SEQ ID NO: 216073 - DNA, 25 bp, SARS Virus
tttggtggttgaactcctttaaagg

SEQ ID NO: 216074 - DNA, 25 bp, SARS Virus
ttggtggttgaaatcctttaaaggt

SEQ ID NO: 216075 - DNA, 25 bp, SARS Virus
tggtggttgaacacctttaaaggta

SEQ ID NO: 216076 - DNA, 25 bp, SARS Virus
ggtggttgaactactttaaaggtaa

SEQ ID NO: 216077 - DNA, 25 bp, SARS Virus
gtggttgaactcatttaaaggtaaa

SEQ ID NO: 216078 - DNA, 25 bp, SARS Virus
tggttgaactccattaaaggtaaag

SEQ ID NO: 216079 - DNA, 25 bp, SARS Virus
ggttgaactcctataaaggtaaaga

SEQ ID NO: 216080 - DNA, 25 bp, SARS Virus
gttgaactccttaaaaggtaaagaa

SEQ ID NO: 216081 - DNA, 25 bp, SARS Virus
ttgaactcctttaaaggtaaagaaa

SEQ ID NO: 216082 - DNA, 25 bp, SARS Virus
tgaactcctttaaaggtaaagaaac

SEQ ID NO: 216083 - DNA, 25 bp, SARS Virus
gaactcctttaaaggtaaagaaaca

SEQ ID NO: 216084 - DNA, 25 bp, SARS Virus
aactcctttaaaagtaaagaaacac

SEQ ID NO: 216085 - DNA, 25 bp, SARS Virus
actcctttaaagataaagaaacaca

SEQ ID NO: 216086 - DNA, 25 bp, SARS Virus
ctcctttaaaggaaaagaaacacac

SEQ ID NO: 216087 - DNA, 25 bp, SARS Virus
tcctttaaaggtaaagaaacacacc

SEQ ID NO: 216088 - DNA, 25 bp, SARS Virus
cctttaaaggtaaagaaacacacca

SEQ ID NO: 216089 - DNA, 25 bp, SARS Virus
ctttaaaggtaaagaaacacaccaa

SEQ ID NO: 216090 - DNA, 25 bp, SARS Virus
tttaaaggtaaaaaaacacaccaaa

SEQ ID NO: 216091 - DNA, 25 bp, SARS Virus
ttaaaggtaaagaaacacaccaaat

SEQ ID NO: 216092 - DNA, 25 bp, SARS Virus
taaaggtaaagaaacacaccaaatt

SEQ ID NO: 216093 - DNA, 25 bp, SARS Virus
aaaggtaaagaaacacaccaaattt

SEQ ID NO: 216094 - DNA, 25 bp, SARS Virus
aaggtaaagaaaaacaccaaatttc

SEQ ID NO: 216095 - DNA, 25 bp, SARS Virus
aggtaaagaaacacaccaaatttcg

SEQ ID NO: 216096 - DNA, 25 bp, SARS Virus
ggtaaagaaacaaaccaaatttcgt

SEQ ID NO: 216097 - DNA, 25 bp, SARS Virus
gtaaagaaacacaccaaatttcgtc

SEQ ID NO: 216098 - DNA, 25 bp, SARS Virus
taaagaaacacaacaaatttcgtct

SEQ ID NO: 216099 - DNA, 25 bp, SARS Virus
aaagaaacacacaaaatttcgtctg

SEQ ID NO: 216100 - DNA, 25 bp, SARS Virus
aagaaacacaccaaatttcgtctgt

SEQ ID NO: 216101 - DNA, 25 bp, SARS Virus
agaaacacaccaaatttcgtctgta

SEQ ID NO: 216102 - DNA, 25 bp, SARS Virus
gaaacacaccaaatttcgtctgtac

SEQ ID NO: 216103 - DNA, 25 bp, SARS Virus
aaacacaccaaaattcgtctgtaca

SEQ ID NO: 216104 - DNA, 25 bp, SARS Virus
aacacaccaaatatcgtctgtacat

SEQ ID NO: 216105 - DNA, 25 bp, SARS Virus
acacaccaaattacgtctgtacatg

SEQ ID NO: 216106 - DNA, 25 bp, SARS Virus
cacaccaaatttagtctgtacatgg

SEQ ID NO: 216107 - DNA, 25 bp, SARS Virus
acaccaaatttcatctgtacatgga

SEQ ID NO: 216108 - DNA, 25 bp, SARS Virus
caccaaatttcgactgtacatggat

SEQ ID NO: 216109 - DNA, 25 bp, SARS Virus
accaaatttcgtatgtacatggatg

SEQ ID NO: 216110 - DNA, 25 bp, SARS Virus
ccaaatttcgtcagtacatggatgg

SEQ ID NO: 216111 - DNA, 25 bp, SARS Virus
caaatttcgtctatacatggatggt

SEQ ID NO: 216112 - DNA, 25 bp, SARS Virus
aaatttcgtctgaacatggatggtt

SEQ ID NO: 216113 - DNA, 25 bp, SARS Virus
aatttcgtctgtacatggatggttc

SEQ ID NO: 216114 - DNA, 25 bp, SARS Virus
atttcgtctgtaaatggatggttct

SEQ ID NO: 216115 - DNA, 25 bp, SARS Virus
tttcgtctgtacatggatggttctt

SEQ ID NO: 216116 - DNA, 25 bp, SARS Virus
ttcgtctgtacaaggatggttcttt

SEQ ID NO: 216117 - DNA, 25 bp, SARS Virus
tcgtctgtacatagatggttctttt

SEQ ID NO: 216118 - DNA, 25 bp, SARS Virus
cgtctgtacatgaatggttcttttg

SEQ ID NO: 216119 - DNA, 25 bp, SARS Virus
gtctgtacatggatggttcttttga

SEQ ID NO: 216120 - DNA, 25 bp, SARS Virus
tctgtacatggaaggttcttttgag

SEQ ID NO: 216121 - DNA, 25 bp, SARS Virus
ctgtacatggatagttcttttgaga

SEQ ID NO: 216122 - DNA, 25 bp, SARS Virus
tgtacatggatgattcttttgagag

SEQ ID NO: 216123 - DNA, 25 bp, SARS Virus
gtacatggatggatcttttgagagt

SEQ ID NO: 216124 - DNA, 25 bp, SARS Virus
tacatggatggtacttttgagagta

SEQ ID NO: 216125 - DNA, 25 bp, SARS Virus
acatggatggttattttgagagtag

SEQ ID NO: 216126 - DNA, 25 bp, SARS Virus
catggatggttcatttgagagtagt

SEQ ID NO: 216127 - DNA, 25 bp, SARS Virus
atggatggttctattgagagtagtt

SEQ ID NO: 216128 - DNA, 25 bp, SARS Virus
tggatggttcttatgagagtagttc

SEQ ID NO: 216129 - DNA, 25 bp, SARS Virus
ggatggttctttagagagtagttct

SEQ ID NO: 216130 - DNA, 25 bp, SARS Virus
gatggttcttttaagagtagttctc

SEQ ID NO: 216131 - DNA, 25 bp, SARS Virus
atggttcttttgagagtagttctca

SEQ ID NO: 216132 - DNA, 25 bp, SARS Virus
tggttcttttgaaagtagttctcat

SEQ ID NO: 216133 - DNA, 25 bp, SARS Virus
ggttcttttgagagtagttctcata

SEQ ID NO: 216134 - DNA, 25 bp, SARS Virus
gttcttttgagaatagttctcatac

SEQ ID NO: 216135 - DNA, 25 bp, SARS Virus
ttcttttgagagaagttctcatacc

SEQ ID NO: 216136 - DNA, 25 bp, SARS Virus
tcttttgagagtagttctcatacca

SEQ ID NO: 216137 - DNA, 25 bp, SARS Virus
cttttgagagtaattctcataccat

SEQ ID NO: 216138 - DNA, 25 bp, SARS Virus
ttttgagagtagatctcataccatc

SEQ ID NO: 216139 - DNA, 25 bp, SARS Virus
tttgagagtagtactcataccatca

SEQ ID NO: 216140 - DNA, 25 bp, SARS Virus
ttgagagtagttatcataccatcat

SEQ ID NO: 216141 - DNA, 25 bp, SARS Virus
tgagagtagttcacataccatcatg

SEQ ID NO: 216142 - DNA, 25 bp, SARS Virus
gagagtagttctaataccatcatga

SEQ ID NO: 216143 - DNA, 25 bp, SARS Virus
agagtagttctcataccatcatgag

SEQ ID NO: 216144 - DNA, 25 bp, SARS Virus
gagtagttctcaaaccatcatgagc

SEQ ID NO: 216145 - DNA, 25 bp, SARS Virus
agtagttctcataccatcatgagct

SEQ ID NO: 216146 - DNA, 25 bp, SARS Virus
gtagttctcataacatcatgagctt

SEQ ID NO: 216147 - DNA, 25 bp, SARS Virus
tagttctcatacaatcatgagcttt

SEQ ID NO: 216148 - DNA, 25 bp, SARS Virus
agttctcataccatcatgagctttc

SEQ ID NO: 216149 - DNA, 25 bp, SARS Virus
gttctcataccaacatgagctttcg

SEQ ID NO: 216150 - DNA, 25 bp, SARS Virus
ttctcataccataatgagctttcga

SEQ ID NO: 216151 - DNA, 25 bp, SARS Virus
tctcataccatcatgagctttcgaa

SEQ ID NO: 216152 - DNA, 25 bp, SARS Virus
ctcataccatcaagagctttcgaag

SEQ ID NO: 216153 - DNA, 25 bp, SARS Virus
tcataccatcataagctttcgaagt

SEQ ID NO: 216154 - DNA, 25 bp, SARS Virus
cataccatcatgagctttcgaagtg

SEQ ID NO: 216155 - DNA, 25 bp, SARS Virus
ataccatcatgaactttcgaagtga

SEQ ID NO: 216156 - DNA, 25 bp, SARS Virus
taccatcatgagatttcgaagtgat

SEQ ID NO: 216157 - DNA, 25 bp, SARS Virus
accatcatgagcattcgaagtgatg

SEQ ID NO: 216158 - DNA, 25 bp, SARS Virus
ccatcatgagctatcgaagtgatgc

SEQ ID NO: 216159 - DNA, 25 bp, SARS Virus
catcatgagcttacgaagtgatgca

SEQ ID NO: 216160 - DNA, 25 bp, SARS Virus
atcatgagctttagaagtgatgcat

SEQ ID NO: 216161 - DNA, 25 bp, SARS Virus
tcatgagctttcaaagtgatgcatc

SEQ ID NO: 216162 - DNA, 25 bp, SARS Virus
catgagctttcgaagtgatgcatca

SEQ ID NO: 216163 - DNA, 25 bp, SARS Virus
atgagctttcgaagtgatgcatcac

SEQ ID NO: 216164 - DNA, 25 bp, SARS Virus
tgagctttcgaaatgatgcatcaca

SEQ ID NO: 216165 - DNA, 25 bp, SARS Virus
gagctttcgaagagatgcatcacac

SEQ ID NO: 216166 - DNA, 25 bp, SARS Virus
agctttcgaagtaatgcatcacaca

SEQ ID NO: 216167 - DNA, 25 bp, SARS Virus
gctttcgaagtgatgcatcacacag

SEQ ID NO: 216168 - DNA, 25 bp, SARS Virus
ctttcgaagtgaagcatcacacagt

SEQ ID NO: 216169 - DNA, 25 bp, SARS Virus
tttcgaagtgatacatcacacagta

SEQ ID NO: 216170 - DNA, 25 bp, SARS Virus
ttcgaagtgatgaatcacacagtag

SEQ ID NO: 216171 - DNA, 25 bp, SARS Virus
tcgaagtgatgcatcacacagtagt

SEQ ID NO: 216172 - DNA, 25 bp, SARS Virus
cgaagtgatgcaacacacagtagtg

SEQ ID NO: 216173 - DNA, 25 bp, SARS Virus
gaagtgatgcataacacagtagtga

SEQ ID NO: 216174 - DNA, 25 bp, SARS Virus
aagtgatgcatcacacagtagtgat

SEQ ID NO: 216175 - DNA, 25 bp, SARS Virus
agtgatgcatcaaacagtagtgatc

SEQ ID NO: 216176 - DNA, 25 bp, SARS Virus
gtgatgcatcacacagtagtgatcc

SEQ ID NO: 216177 - DNA, 25 bp, SARS Virus
tgatgcatcacaaagtagtgatcca

SEQ ID NO: 216178 - DNA, 25 bp, SARS Virus
gatgcatcacacagtagtgatccat

SEQ ID NO: 216179 - DNA, 25 bp, SARS Virus
atgcatcacacaatagtgatccatc

SEQ ID NO: 216180 - DNA, 25 bp, SARS Virus
tgcatcacacagaagtgatccatca

SEQ ID NO: 216181 - DNA, 25 bp, SARS Virus
gcatcacacagtagtgatccatcat

SEQ ID NO: 216182 - DNA, 25 bp, SARS Virus
catcacacagtaatgatccatcatg

SEQ ID NO: 216183 - DNA, 25 bp, SARS Virus
atcacacagtagagatccatcatgt

SEQ ID NO: 216184 - DNA, 25 bp, SARS Virus
tcacacagtagtaatccatcatgtt

SEQ ID NO: 216185 - DNA, 25 bp, SARS Virus
cacacagtagtgatccatcatgttt

SEQ ID NO: 216186 - DNA, 25 bp, SARS Virus
acacagtagtgaaccatcatgtttc

SEQ ID NO: 216187 - DNA, 25 bp, SARS Virus
cacagtagtgatacatcatgtttct

SEQ ID NO: 216188 - DNA, 25 bp, SARS Virus
acagtagtgatcaatcatgtttctt

SEQ ID NO: 216189 - DNA, 25 bp, SARS Virus
cagtagtgatccatcatgtttcttt

SEQ ID NO: 216190 - DNA, 25 bp, SARS Virus
agtagtgatccaacatgtttctttc

SEQ ID NO: 216191 - DNA, 25 bp, SARS Virus
gtagtgatccataatgtttctttca

SEQ ID NO: 216192 - DNA, 25 bp, SARS Virus
tagtgatccatcatgtttctttcag

SEQ ID NO: 216193 - DNA, 25 bp, SARS Virus
agtgatccatcaagtttctttcaga

SEQ ID NO: 216194 - DNA, 25 bp, SARS Virus
gtgatccatcatatttctttcagaa

SEQ ID NO: 216195 - DNA, 25 bp, SARS Virus
tgatccatcatgattctttcagaat

SEQ ID NO: 216196 - DNA, 25 bp, SARS Virus
gatccatcatgtatctttcagaatg

SEQ ID NO: 216197 - DNA, 25 bp, SARS Virus
atccatcatgttactttcagaatgg

SEQ ID NO: 216198 - DNA, 25 bp, SARS Virus
tccatcatgtttatttcagaatggg

SEQ ID NO: 216199 - DNA, 25 bp, SARS Virus
ccatcatgtttcattcagaatggga

SEQ ID NO: 216200 - DNA, 25 bp, SARS Virus
catcatgtttctatcagaatgggag

SEQ ID NO: 216201 - DNA, 25 bp, SARS Virus
atcatgtttcttacagaatgggagt

SEQ ID NO: 216202 - DNA, 25 bp, SARS Virus
tcatgtttctttaagaatgggagta

SEQ ID NO: 216203 - DNA, 25 bp, SARS Virus
catgtttctttcagaatgggagtac

SEQ ID NO: 216204 - DNA, 25 bp, SARS Virus
atgtttctttcaaaatgggagtact

SEQ ID NO: 216205 - DNA, 25 bp, SARS Virus
tgtttctttcagaatgggagtacta

SEQ ID NO: 216206 - DNA, 25 bp, SARS Virus
gtttctttcagaatgggagtactaa

SEQ ID NO: 216207 - DNA, 25 bp, SARS Virus
tttctttcagaaagggagtactaaa

SEQ ID NO: 216208 - DNA, 25 bp, SARS Virus
ttctttcagaataggagtactaaat

SEQ ID NO: 216209 - DNA, 25 bp, SARS Virus
tctttcagaatgagagtactaaatg

SEQ ID NO: 216210 - DNA, 25 bp, SARS Virus
ctttcagaatggaagtactaaatgt

SEQ ID NO: 216211 - DNA, 25 bp, SARS Virus
tttcagaatgggagtactaaatgta

SEQ ID NO: 216212 - DNA, 25 bp, SARS Virus
ttcagaatgggaatactaaatgtac

SEQ ID NO: 216213 - DNA, 25 bp, SARS Virus
tcagaatgggagaactaaatgtact

SEQ ID NO: 216214 - DNA, 25 bp, SARS Virus
cagaatgggagtactaaatgtactc

SEQ ID NO: 216215 - DNA, 25 bp, SARS Virus
agaatgggagtaataaatgtactcc

SEQ ID NO: 216216 - DNA, 25 bp, SARS Virus
gaatgggagtacaaaatgtactcca

SEQ ID NO: 216217 - DNA, 25 bp, SARS Virus
ctaatagtattccatctcatgggta

SEQ ID NO: 216218 - DNA, 25 bp, SARS Virus
taatagtattctctctcatgggtat

SEQ ID NO: 216219 - DNA, 25 bp, SARS Virus
aatagtattctacctcatgggtata

SEQ ID NO: 216220 - DNA, 25 bp, SARS Virus
atagtattctatctcatgggtatat

SEQ ID NO: 216221 - DNA, 25 bp, SARS Virus
tagtattctatcccatgggtatatg

SEQ ID NO: 216222 - DNA, 25 bp, SARS Virus
agtattctatctcatgggtatatgt

SEQ ID NO: 216223 - DNA, 25 bp, SARS Virus
gtattctatctcctgggtatatgta

SEQ ID NO: 216224 - DNA, 25 bp, SARS Virus
tattctatctcacgggtatatgtag

SEQ ID NO: 216225 - DNA, 25 bp, SARS Virus
attctatctcatcggtatatgtagt

SEQ ID NO: 216226 - DNA, 25 bp, SARS Virus
ttctatctcatgcgtatatgtagtg

SEQ ID NO: 216227 - DNA, 25 bp, SARS Virus
tctatctcatggctatatgtagtgt

SEQ ID NO: 216228 - DNA, 25 bp, SARS Virus
ctatctcatgggcatatgtagtgtc

SEQ ID NO: 216229 - DNA, 25 bp, SARS Virus
tatctcatgggtctatgtagtgtcg

SEQ ID NO: 216230 - DNA, 25 bp, SARS Virus
atctcatgggtacatgtagtgtcga

SEQ ID NO: 216231 - DNA, 25 bp, SARS Virus
tctcatgggtatctgtagtgtcgaa

SEQ ID NO: 216232 - DNA, 25 bp, SARS Virus
ctcatgggtatacgtagtgtcgaag

SEQ ID NO: 216233 - DNA, 25 bp, SARS Virus
tcatgggtatatctagtgtcgaaga

SEQ ID NO: 216234 - DNA, 25 bp, SARS Virus
catgggtatatgcagtgtcgaagat

SEQ ID NO: 216235 - DNA, 25 bp, SARS Virus
atgggtatatgtcgtgtcgaagatg

SEQ ID NO: 216236 - DNA, 25 bp, SARS Virus
tgggtatatgtactgtcgaagatgt

SEQ ID NO: 216237 - DNA, 25 bp, SARS Virus
gggtatatgtagcgtcgaagatgtg

SEQ ID NO: 216238 - DNA, 25 bp, SARS Virus
ggtatatgtagtctcgaagatgtgg

SEQ ID NO: 216239 - DNA, 25 bp, SARS Virus
gtatatgtagtgccgaagatgtggg

SEQ ID NO: 216240 - DNA, 25 bp, SARS Virus
tatatgtagtgtcgaagatgtgggc

SEQ ID NO: 216241 - DNA, 25 bp, SARS Virus
atatgtagtgtccaagatgtgggca

SEQ ID NO: 216242 - DNA, 25 bp, SARS Virus
tatgtagtgtcgcagatgtgggcaa

SEQ ID NO: 216243 - DNA, 25 bp, SARS Virus
atgtagtgtcgacgatgtgggcaat

SEQ ID NO: 216244 - DNA, 25 bp, SARS Virus
tgtagtgtcgaacatgtgggcaatt

SEQ ID NO: 216245 - DNA, 25 bp, SARS Virus
gtagtgtcgaagctgtgggcaattc

SEQ ID NO: 216246 - DNA, 25 bp, SARS Virus
tagtgtcgaagacgtgggcaattcc

SEQ ID NO: 216247 - DNA, 25 bp, SARS Virus
agtgtcgaagatctgggcaattcca

SEQ ID NO: 216248 - DNA, 25 bp, SARS Virus
gtgtcgaagatgcgggcaattccat

SEQ ID NO: 216249 - DNA, 25 bp, SARS Virus
tgtcgaagatgtcggcaattccatc

SEQ ID NO: 216250 - DNA, 25 bp, SARS Virus
gtcgaagatgtgcgcaattccatca

SEQ ID NO: 216251 - DNA, 25 bp, SARS Virus
tcgaagatgtggccaattccatcat

SEQ ID NO: 216252 - DNA, 25 bp, SARS Virus
cgaagatgtgggcaattccatcatc

SEQ ID NO: 216253 - DNA, 25 bp, SARS Virus
gaagatgtgggccattccatcatca

SEQ ID NO: 216254 - DNA, 25 bp, SARS Virus
aagatgtgggcacttccatcatcaa

SEQ ID NO: 216255 - DNA, 25 bp, SARS Virus
agatgtgggcaactccatcatcaaa

SEQ ID NO: 216256 - DNA, 25 bp, SARS Virus
gatgtgggcaatcccatcatcaaaa

SEQ ID NO: 216257 - DNA, 25 bp, SARS Virus
atgtgggcaattccatcatcaaaag

SEQ ID NO: 216258 - DNA, 25 bp, SARS Virus
tgtgggcaattccatcatcaaaaga

SEQ ID NO: 216259 - DNA, 25 bp, SARS Virus
gtgggcaattccctcatcaaaagac

SEQ ID NO: 216260 - DNA, 25 bp, SARS Virus
tgggcaattccaccatcaaaagact

SEQ ID NO: 216261 - DNA, 25 bp, SARS Virus
gggcaattccatcatcaaaagactg

SEQ ID NO: 216262 - DNA, 25 bp, SARS Virus
ggcaattccatcctcaaaagactgg

SEQ ID NO: 216263 - DNA, 25 bp, SARS Virus
gcaattccatcaccaaaagactggt

SEQ ID NO: 216264 - DNA, 25 bp, SARS Virus
caattccatcatcaaaagactggtg

SEQ ID NO: 216265 - DNA, 25 bp, SARS Virus
aattccatcatccaaagactggtgt

SEQ ID NO: 216266 - DNA, 25 bp, SARS Virus
attccatcatcacaagactggtgtt

SEQ ID NO: 216267 - DNA, 25 bp, SARS Virus
ttccatcatcaacagactggtgtta

SEQ ID NO: 216268 - DNA, 25 bp, SARS Virus
tccatcatcaaacgactggtgttac

SEQ ID NO: 216269 - DNA, 25 bp, SARS Virus
ccatcatcaaaacactggtgttaca

SEQ ID NO: 216270 - DNA, 25 bp, SARS Virus
catcatcaaaagcctggtgttacaa

SEQ ID NO: 216271 - DNA, 25 bp, SARS Virus
atcatcaaaagactggtgttacaaa

SEQ ID NO: 216272 - DNA, 25 bp, SARS Virus
tcatcaaaagaccggtgttacaaat

SEQ ID NO: 216273 - DNA, 25 bp, SARS Virus
catcaaaagactcgtgttacaaatg

SEQ ID NO: 216274 - DNA, 25 bp, SARS Virus
atcaaaagactgctgttacaaatgt

SEQ ID NO: 216275 - DNA, 25 bp, SARS Virus
tcaaaagactggcgttacaaatgtg

SEQ ID NO: 216276 - DNA, 25 bp, SARS Virus
caaaagactggtcttacaaatgtgt

SEQ ID NO: 216277 - DNA, 25 bp, SARS Virus
aaaagactggtgctacaaatgtgtg

SEQ ID NO: 216278 - DNA, 25 bp, SARS Virus
aaagactggtgtcacaaatgtgtgg

SEQ ID NO: 216279 - DNA, 25 bp, SARS Virus
aagactggtgttccaaatgtgtggt

SEQ ID NO: 216280 - DNA, 25 bp, SARS Virus
agactggtgttacaaatgtgtggtg

SEQ ID NO: 216281 - DNA, 25 bp, SARS Virus
gactggtgttaccaatgtgtggtgt

SEQ ID NO: 216282 - DNA, 25 bp, SARS Virus
actggtgttacacatgtgtggtgta

SEQ ID NO: 216283 - DNA, 25 bp, SARS Virus
ctggtgttacaactgtgtggtgtaa

SEQ ID NO: 216284 - DNA, 25 bp, SARS Virus
tggtgttacaaacgtgtggtgtaat

SEQ ID NO: 216285 - DNA, 25 bp, SARS Virus
ggtgttacaaatctgtggtgtaatt

SEQ ID NO: 216286 - DNA, 25 bp, SARS Virus
gtgttacaaatgcgtggtgtaattc

SEQ ID NO: 216287 - DNA, 25 bp, SARS Virus
tgttacaaatgtctggtgtaattct

SEQ ID NO: 216288 - DNA, 25 bp, SARS Virus
gttacaaatgtgcggtgtaattctt

SEQ ID NO: 216289 - DNA, 25 bp, SARS Virus
ttacaaatgtgtcgtgtaattcttg

SEQ ID NO: 216290 - DNA, 25 bp, SARS Virus
tacaaatgtgtgctgtaattcttga

SEQ ID NO: 216291 - DNA, 25 bp, SARS Virus
acaaatgtgtggcgtaattcttgag

SEQ ID NO: 216292 - DNA, 25 bp, SARS Virus
caaatgtgtggtctaattcttgagc

SEQ ID NO: 216293 - DNA, 25 bp, SARS Virus
aaatgtgtggtgcaattcttgagcg

SEQ ID NO: 216294 - DNA, 25 bp, SARS Virus
aatgtgtggtgtcattcttgagcga

SEQ ID NO: 216295 - DNA, 25 bp, SARS Virus
atgtgtggtgtacttcttgagcgaa

SEQ ID NO: 216296 - DNA, 25 bp, SARS Virus
tgtgtggtgtaactcttgagcgaaa

SEQ ID NO: 216297 - DNA, 25 bp, SARS Virus
gtgtggtgtaatccttgagcgaaac

SEQ ID NO: 216298 - DNA, 25 bp, SARS Virus
tgtggtgtaattcttgagcgaaacg

SEQ ID NO: 216299 - DNA, 25 bp, SARS Virus
gtggtgtaattcctgagcgaaacgt

SEQ ID NO: 216300 - DNA, 25 bp, SARS Virus
tggtgtaattctcgagcgaaacgtc

SEQ ID NO: 216301 - DNA, 25 bp, SARS Virus
ggtgtaattcttcagcgaaacgtct

SEQ ID NO: 216302 - DNA, 25 bp, SARS Virus
gtgtaattcttgcgcgaaacgtcta

SEQ ID NO: 216303 - DNA, 25 bp, SARS Virus
tgtaattcttgaccgaaacgtctaa

SEQ ID NO: 216304 - DNA, 25 bp, SARS Virus
gtaattcttgagcgaaacgtctaag

SEQ ID NO: 216305 - DNA, 25 bp, SARS Virus
taattcttgagccaaacgtctaagg

SEQ ID NO: 216306 - DNA, 25 bp, SARS Virus
aattcttgagcgcaacgtctaaggt

SEQ ID NO: 216307 - DNA, 25 bp, SARS Virus
attcttgagcgacacgtctaaggtt

SEQ ID NO: 216308 - DNA, 25 bp, SARS Virus
ttcttgagcgaaccgtctaaggttt

SEQ ID NO: 216309 - DNA, 25 bp, SARS Virus
tcttgagcgaaacgtctaaggttta

SEQ ID NO: 216310 - DNA, 25 bp, SARS Virus
cttgagcgaaacctctaaggtttaa

SEQ ID NO: 216311 - DNA, 25 bp, SARS Virus
ttgagcgaaacgcctaaggtttaat

SEQ ID NO: 216312 - DNA, 25 bp, SARS Virus
tgagcgaaacgtctaaggtttaatc

SEQ ID NO: 216313 - DNA, 25 bp, SARS Virus
gagcgaaacgtccaaggtttaatcg

SEQ ID NO: 216314 - DNA, 25 bp, SARS Virus
agcgaaacgtctcaggtttaatcgt

SEQ ID NO: 216315 - DNA, 25 bp, SARS Virus
gcgaaacgtctacggtttaatcgta

SEQ ID NO: 216316 - DNA, 25 bp, SARS Virus
cgaaacgtctaacgtttaatcgtac

SEQ ID NO: 216317 - DNA, 25 bp, SARS Virus
gaaacgtctaagctttaatcgtacg

SEQ ID NO: 216318 - DNA, 25 bp, SARS Virus
aaacgtctaaggcttaatcgtacga

SEQ ID NO: 216319 - DNA, 25 bp, SARS Virus
aacgtctaaggtctaatcgtacgac

SEQ ID NO: 216320 - DNA, 25 bp, SARS Virus
acgtctaaggttcaatcgtacgaca

SEQ ID NO: 216321 - DNA, 25 bp, SARS Virus
cgtctaaggtttcatcgtacgacat

SEQ ID NO: 216322 - DNA, 25 bp, SARS Virus
gtctaaggtttactcgtacgacatc

SEQ ID NO: 216323 - DNA, 25 bp, SARS Virus
tctaaggtttaaccgtacgacatct

SEQ ID NO: 216324 - DNA, 25 bp, SARS Virus
ctaaggtttaatcgtacgacatctt

SEQ ID NO: 216325 - DNA, 25 bp, SARS Virus
taaggtttaatcctacgacatcttc

SEQ ID NO: 216326 - DNA, 25 bp, SARS Virus
aaggtttaatcgcacgacatcttct

SEQ ID NO: 216327 - DNA, 25 bp, SARS Virus
aggtttaatcgtccgacatcttcta

SEQ ID NO: 216328 - DNA, 25 bp, SARS Virus
ggtttaatcgtacgacatcttctac

SEQ ID NO: 216329 - DNA, 25 bp, SARS Virus
gtttaatcgtaccacatcttctacc

SEQ ID NO: 216330 - DNA, 25 bp, SARS Virus
tttaatcgtacgccatcttctaccc

SEQ ID NO: 216331 - DNA, 25 bp, SARS Virus
ttaatcgtacgacatcttctaccca

SEQ ID NO: 216332 - DNA, 25 bp, SARS Virus
taatcgtacgacctcttctacccag

SEQ ID NO: 216333 - DNA, 25 bp, SARS Virus
aatcgtacgacaccttctacccagt

SEQ ID NO: 216334 - DNA, 25 bp, SARS Virus
atcgtacgacatcttctacccagta

SEQ ID NO: 216335 - DNA, 25 bp, SARS Virus
tcgtacgacatcctctacccagtat

SEQ ID NO: 216336 - DNA, 25 bp, SARS Virus
cgtacgacatctcctacccagtatc

SEQ ID NO: 216337 - DNA, 25 bp, SARS Virus
gtacgacatcttctacccagtatca

SEQ ID NO: 216338 - DNA, 25 bp, SARS Virus
tacgacatcttccacccagtatcaa

SEQ ID NO: 216339 - DNA, 25 bp, SARS Virus
acgacatcttctccccagtatcaaa

SEQ ID NO: 216340 - DNA, 25 bp, SARS Virus
cgacatcttctacccagtatcaaag

SEQ ID NO: 216341 - DNA, 25 bp, SARS Virus
gacatcttctacccagtatcaaaga

SEQ ID NO: 216342 - DNA, 25 bp, SARS Virus
acatcttctacccagtatcaaagag

SEQ ID NO: 216343 - DNA, 25 bp, SARS Virus
catcttctaccccgtatcaaagaga

SEQ ID NO: 216344 - DNA, 25 bp, SARS Virus
atcttctacccactatcaaagagac

SEQ ID NO: 216345 - DNA, 25 bp, SARS Virus
tcttctacccagcatcaaagagact

SEQ ID NO: 216346 - DNA, 25 bp, SARS Virus
cttctacccagtctcaaagagactg

SEQ ID NO: 216347 - DNA, 25 bp, SARS Virus
ttctacccagtaccaaagagactgt

SEQ ID NO: 216348 - DNA, 25 bp, SARS Virus
tctacccagtatcaaagagactgta

SEQ ID NO: 216349 - DNA, 25 bp, SARS Virus
ctacccagtatccaagagactgtag

SEQ ID NO: 216350 - DNA, 25 bp, SARS Virus
tacccagtatcacagagactgtagt

SEQ ID NO: 216351 - DNA, 25 bp, SARS Virus
acccagtatcaacgagactgtagtg

SEQ ID NO: 216352 - DNA, 25 bp, SARS Virus
cccagtatcaaacagactgtagtgg

SEQ ID NO: 216353 - DNA, 25 bp, SARS Virus
ccagtatcaaagcgactgtagtggt

SEQ ID NO: 216354 - DNA, 25 bp, SARS Virus
cagtatcaaagacactgtagtggtt

SEQ ID NO: 216355 - DNA, 25 bp, SARS Virus
agtatcaaagagcctgtagtggttc

SEQ ID NO: 216356 - DNA, 25 bp, SARS Virus
gtatcaaagagactgtagtggttcg

SEQ ID NO: 216357 - DNA, 25 bp, SARS Virus
tatcaaagagaccgtagtggttcga

SEQ ID NO: 216358 - DNA, 25 bp, SARS Virus
atcaaagagactctagtggttcgag

SEQ ID NO: 216359 - DNA, 25 bp, SARS Virus
tcaaagagactgcagtggttcgagc

SEQ ID NO: 216360 - DNA, 25 bp, SARS Virus
caaagagactgtcgtggttcgagcg

SEQ ID NO: 216361 - DNA, 25 bp, SARS Virus
aaagagactgtactggttcgagcgg

SEQ ID NO: 216362 - DNA, 25 bp, SARS Virus
aagagactgtagcggttcgagcggt

SEQ ID NO: 216363 - DNA, 25 bp, SARS Virus
agagactgtagtcgttcgagcggtt

SEQ ID NO: 216364 - DNA, 25 bp, SARS Virus
gagactgtagtgcttcgagcggttg

SEQ ID NO: 216365 - DNA, 25 bp, SARS Virus
agactgtagtggctcgagcggttgt

SEQ ID NO: 216366 - DNA, 25 bp, SARS Virus
gactgtagtggtccgagcggttgtc

SEQ ID NO: 216367 - DNA, 25 bp, SARS Virus
actgtagtggttcgagcggttgtca

SEQ ID NO: 216368 - DNA, 25 bp, SARS Virus
ctgtagtggttccagcggttgtcaa

SEQ ID NO: 216369 - DNA, 25 bp, SARS Virus
tgtagtggttcgcgcggttgtcaaa

SEQ ID NO: 216370 - DNA, 25 bp, SARS Virus
gtagtggttcgaccggttgtcaaaa

SEQ ID NO: 216371 - DNA, 25 bp, SARS Virus
tagtggttcgagcggttgtcaaaat

SEQ ID NO: 216372 - DNA, 25 bp, SARS Virus
agtggttcgagccgttgtcaaaata

SEQ ID NO: 216373 - DNA, 25 bp, SARS Virus
gtggttcgagcgcttgtcaaaataa

SEQ ID NO: 216374 - DNA, 25 bp, SARS Virus
tggttcgagcggctgtcaaaataat

SEQ ID NO: 216375 - DNA, 25 bp, SARS Virus
ggttcgagcggtcgtcaaaataatg

SEQ ID NO: 216376 - DNA, 25 bp, SARS Virus
gttcgagcggttctcaaaataatga

SEQ ID NO: 216377 - DNA, 25 bp, SARS Virus
ttcgagcggttgccaaaataatgac

SEQ ID NO: 216378 - DNA, 25 bp, SARS Virus
tcgagcggttgtcaaaataatgaca

SEQ ID NO: 216379 - DNA, 25 bp, SARS Virus
cgagcggttgtccaaataatgacat

SEQ ID NO: 216380 - DNA, 25 bp, SARS Virus
gagcggttgtcacaataatgacatt

SEQ ID NO: 216381 - DNA, 25 bp, SARS Virus
agcggttgtcaacataatgacattc

SEQ ID NO: 216382 - DNA, 25 bp, SARS Virus
gcggttgtcaaactaatgacattcg

SEQ ID NO: 216383 - DNA, 25 bp, SARS Virus
cggttgtcaaaacaatgacattcgc

SEQ ID NO: 216384 - DNA, 25 bp, SARS Virus
ggttgtcaaaatcatgacattcgct

SEQ ID NO: 216385 - DNA, 25 bp, SARS Virus
gttgtcaaaatactgacattcgctc

SEQ ID NO: 216386 - DNA, 25 bp, SARS Virus
ttgtcaaaataacgacattcgctca

SEQ ID NO: 216387 - DNA, 25 bp, SARS Virus
tgtcaaaataatcacattcgctcat

SEQ ID NO: 216388 - DNA, 25 bp, SARS Virus
gtcaaaataatgccattcgctcata

SEQ ID NO: 216389 - DNA, 25 bp, SARS Virus
tcaaaataatgacattcgctcatac

SEQ ID NO: 216390 - DNA, 25 bp, SARS Virus
caaaataatgaccttcgctcatact

SEQ ID NO: 216391 - DNA, 25 bp, SARS Virus
aaaataatgacactcgctcatactc

SEQ ID NO: 216392 - DNA, 25 bp, SARS Virus
aaataatgacatccgctcatactca

SEQ ID NO: 216393 - DNA, 25 bp, SARS Virus
aataatgacattcgctcatactcac

SEQ ID NO: 216394 - DNA, 25 bp, SARS Virus
ataatgacattccctcatactcacg

SEQ ID NO: 216395 - DNA, 25 bp, SARS Virus
taatgacattcgctcatactcacgt

SEQ ID NO: 216396 - DNA, 25 bp, SARS Virus
aatgacattcgcccatactcacgtg

SEQ ID NO: 216397 - DNA, 25 bp, SARS Virus
atgacattcgctcatactcacgtgt

SEQ ID NO: 216398 - DNA, 25 bp, SARS Virus
tgacattcgctcctactcacgtgtt

SEQ ID NO: 216399 - DNA, 25 bp, SARS Virus
gacattcgctcacactcacgtgttt

SEQ ID NO: 216400 - DNA, 25 bp, SARS Virus
acattcgctcatcctcacgtgtttt

SEQ ID NO: 216401 - DNA, 25 bp, SARS Virus
cattcgctcatactcacgtgttttc

SEQ ID NO: 216402 - DNA, 25 bp, SARS Virus
attcgctcatacccacgtgttttca

SEQ ID NO: 216403 - DNA, 25 bp, SARS Virus
ttcgctcatactcacgtgttttcaa

SEQ ID NO: 216404 - DNA, 25 bp, SARS Virus
tcgctcatactcccgtgttttcaat

SEQ ID NO: 216405 - DNA, 25 bp, SARS Virus
cgctcatactcacgtgttttcaatc

SEQ ID NO: 216406 - DNA, 25 bp, SARS Virus
gctcatactcacctgttttcaatcg

SEQ ID NO: 216407 - DNA, 25 bp, SARS Virus
ctcatactcacgcgttttcaatcgt

SEQ ID NO: 216408 - DNA, 25 bp, SARS Virus
tcatactcacgtcttttcaatcgtc

SEQ ID NO: 216409 - DNA, 25 bp, SARS Virus
catactcacgtgctttcaatcgtcg

SEQ ID NO: 216410 - DNA, 25 bp, SARS Virus
atactcacgtgtcttcaatcgtcgt

SEQ ID NO: 216411 - DNA, 25 bp, SARS Virus
tactcacgtgttctcaatcgtcgta

SEQ ID NO: 216412 - DNA, 25 bp, SARS Virus
actcacgtgtttccaatcgtcgtag

SEQ ID NO: 216413 - DNA, 25 bp, SARS Virus
ctcacgtgttttcaatcgtcgtagt

SEQ ID NO: 216414 - DNA, 25 bp, SARS Virus
tcacgtgttttccatcgtcgtagtg

SEQ ID NO: 216415 - DNA, 25 bp, SARS Virus
cacgtgttttcactcgtcgtagtgg

SEQ ID NO: 216416 - DNA, 25 bp, SARS Virus
acgtgttttcaaccgtcgtagtggt

SEQ ID NO: 216417 - DNA, 25 bp, SARS Virus
cgtgttttcaatcgtcgtagtggtc

SEQ ID NO: 216418 - DNA, 25 bp, SARS Virus
gtgttttcaatcctcgtagtggtcg

SEQ ID NO: 216419 - DNA, 25 bp, SARS Virus
tgttttcaatcgccgtagtggtcgt

SEQ ID NO: 216420 - DNA, 25 bp, SARS Virus
gttttcaatcgtcgtagtggtcgtg

SEQ ID NO: 216421 - DNA, 25 bp, SARS Virus
ttttcaatcgtcctagtggtcgtgc

SEQ ID NO: 216422 - DNA, 25 bp, SARS Virus
tttcaatcgtcgcagtggtcgtgcc

SEQ ID NO: 216423 - DNA, 25 bp, SARS Virus
ttcaatcgtcgtcgtggtcgtgccc

SEQ ID NO: 216424 - DNA, 25 bp, SARS Virus
tcaatcgtcgtactggtcgtgcccg

SEQ ID NO: 216425 - DNA, 25 bp, SARS Virus
caatcgtcgtagcggtcgtgcccga

SEQ ID NO: 216426 - DNA, 25 bp, SARS Virus
aatcgtcgtagtcgtcgtgcccgag

SEQ ID NO: 216427 - DNA, 25 bp, SARS Virus
atcgtcgtagtgctcgtgcccgaga

SEQ ID NO: 216428 - DNA, 25 bp, SARS Virus
tcgtcgtagtggccgtgcccgagat

SEQ ID NO: 216429 - DNA, 25 bp, SARS Virus
cgtcgtagtggtcgtgcccgagata

SEQ ID NO: 216430 - DNA, 25 bp, SARS Virus
gtcgtagtggtcctgcccgagatat

SEQ ID NO: 216431 - DNA, 25 bp, SARS Virus
tcgtagtggtcgcgcccgagatatt

SEQ ID NO: 216432 - DNA, 25 bp, SARS Virus
cgtagtggtcgtccccgagatatta

SEQ ID NO: 216433 - DNA, 25 bp, SARS Virus
gtagtggtcgtgcccgagatattat

SEQ ID NO: 216434 - DNA, 25 bp, SARS Virus
tagtggtcgtgcccgagatattatt

SEQ ID NO: 216435 - DNA, 25 bp, SARS Virus
agtggtcgtgcccgagatattattc

SEQ ID NO: 216436 - DNA, 25 bp, SARS Virus
gtggtcgtgccccagatattattcg

SEQ ID NO: 216437 - DNA, 25 bp, SARS Virus
tggtcgtgcccgcgatattattcgg

SEQ ID NO: 216438 - DNA, 25 bp, SARS Virus
ggtcgtgcccgacatattattcgga

SEQ ID NO: 216439 - DNA, 25 bp, SARS Virus
gtcgtgcccgagctattattcggag

SEQ ID NO: 216440 - DNA, 25 bp, SARS Virus
tcgtgcccgagacattattcggaga

SEQ ID NO: 216441 - DNA, 25 bp, SARS Virus
cgtgcccgagatcttattcggagaa

SEQ ID NO: 216442 - DNA, 25 bp, SARS Virus
gtgcccgagatactattcggagaac

SEQ ID NO: 216443 - DNA, 25 bp, SARS Virus
tgcccgagatatcattcggagaact

SEQ ID NO: 216444 - DNA, 25 bp, SARS Virus
gcccgagatattcttcggagaactt

SEQ ID NO: 216445 - DNA, 25 bp, SARS Virus
cccgagatattactcggagaacttc

SEQ ID NO: 216446 - DNA, 25 bp, SARS Virus
ccgagatattatccggagaacttca

SEQ ID NO: 216447 - DNA, 25 bp, SARS Virus
cgagatattattcggagaacttcac

SEQ ID NO: 216448 - DNA, 25 bp, SARS Virus
gagatattattccgagaacttcacg

SEQ ID NO: 216449 - DNA, 25 bp, SARS Virus
agatattattcgcagaacttcacga

SEQ ID NO: 216450 - DNA, 25 bp, SARS Virus
gatattattcggcgaacttcacgac

SEQ ID NO: 216451 - DNA, 25 bp, SARS Virus
atattattcggacaacttcacgacc

SEQ ID NO: 216452 - DNA, 25 bp, SARS Virus
tattattcggagcacttcacgacca

SEQ ID NO: 216453 - DNA, 25 bp, SARS Virus
attattcggagaccttcacgaccac

SEQ ID NO: 216454 - DNA, 25 bp, SARS Virus
ttattcggagaacttcacgaccacg

SEQ ID NO: 216455 - DNA, 25 bp, SARS Virus
tattcggagaacctcacgaccacgt

SEQ ID NO: 216456 - DNA, 25 bp, SARS Virus
attcggagaactccacgaccacgta

SEQ ID NO: 216457 - DNA, 25 bp, SARS Virus
ttcggagaacttcacgaccacgtaa

SEQ ID NO: 216458 - DNA, 25 bp, SARS Virus
tcggagaacttcccgaccacgtaac

SEQ ID NO: 216459 - DNA, 25 bp, SARS Virus
cggagaacttcacgaccacgtaact

SEQ ID NO: 216460 - DNA, 25 bp, SARS Virus
ggagaacttcaccaccacgtaactt

SEQ ID NO: 216461 - DNA, 25 bp, SARS Virus
gagaacttcacgcccacgtaactta

SEQ ID NO: 216462 - DNA, 25 bp, SARS Virus
agaacttcacgaccacgtaacttaa

SEQ ID NO: 216463 - DNA, 25 bp, SARS Virus
gaacttcacgaccacgtaacttaaa

SEQ ID NO: 216464 - DNA, 25 bp, SARS Virus
aacttcacgaccccgtaacttaaac

SEQ ID NO: 216465 - DNA, 25 bp, SARS Virus
acttcacgaccacgtaacttaaact

SEQ ID NO: 216466 - DNA, 25 bp, SARS Virus
cttcacgaccacctaacttaaactg

SEQ ID NO: 216467 - DNA, 25 bp, SARS Virus
ttcacgaccacgcaacttaaactga

SEQ ID NO: 216468 - DNA, 25 bp, SARS Virus
tcacgaccacgtcacttaaactgaa

SEQ ID NO: 216469 - DNA, 25 bp, SARS Virus
cacgaccacgtaccttaaactgaag

SEQ ID NO: 216470 - DNA, 25 bp, SARS Virus
acgaccacgtaacttaaactgaagt

SEQ ID NO: 216471 - DNA, 25 bp, SARS Virus
cgaccacgtaacctaaactgaagtt

SEQ ID NO: 216472 - DNA, 25 bp, SARS Virus
gaccacgtaactcaaactgaagttc

SEQ ID NO: 216473 - DNA, 25 bp, SARS Virus
accacgtaacttcaactgaagttcg

SEQ ID NO: 216474 - DNA, 25 bp, SARS Virus
ccacgtaacttacactgaagttcga

SEQ ID NO: 216475 - DNA, 25 bp, SARS Virus
cacgtaacttaacctgaagttcgac

SEQ ID NO: 216476 - DNA, 25 bp, SARS Virus
acgtaacttaaactgaagttcgaca

SEQ ID NO: 216477 - DNA, 25 bp, SARS Virus
cgtaacttaaaccgaagttcgacaa

SEQ ID NO: 216478 - DNA, 25 bp, SARS Virus
gtaacttaaactcaagttcgacaac

SEQ ID NO: 216479 - DNA, 25 bp, SARS Virus
taacttaaactgcagttcgacaact

SEQ ID NO: 216480 - DNA, 25 bp, SARS Virus
aacttaaactgacgttcgacaactt

SEQ ID NO: 216481 - DNA, 25 bp, SARS Virus
acttaaactgaacttcgacaacttc

SEQ ID NO: 216482 - DNA, 25 bp, SARS Virus
cttaaactgaagctcgacaacttca

SEQ ID NO: 216483 - DNA, 25 bp, SARS Virus
ttaaactgaagtccgacaacttcac

SEQ ID NO: 216484 - DNA, 25 bp, SARS Virus
taaactgaagttcgacaacttcacg

SEQ ID NO: 216485 - DNA, 25 bp, SARS Virus
aaactgaagttccacaacttcacga

SEQ ID NO: 216486 - DNA, 25 bp, SARS Virus
aactgaagttcgccaacttcacgat

SEQ ID NO: 216487 - DNA, 25 bp, SARS Virus
actgaagttcgacaacttcacgatt

SEQ ID NO: 216488 - DNA, 25 bp, SARS Virus
ctgaagttcgaccacttcacgatta

SEQ ID NO: 216489 - DNA, 25 bp, SARS Virus
tgaagttcgacaccttcacgattat

SEQ ID NO: 216490 - DNA, 25 bp, SARS Virus
gaagttcgacaacttcacgattatt

SEQ ID NO: 216491 - DNA, 25 bp, SARS Virus
aagttcgacaacctcacgattattt

SEQ ID NO: 216492 - DNA, 25 bp, SARS Virus
agttcgacaactccacgattatttt

SEQ ID NO: 216493 - DNA, 25 bp, SARS Virus
gttcgacaacttcacgattattttg

SEQ ID NO: 216494 - DNA, 25 bp, SARS Virus
ttcgacaacttcccgattattttgt

SEQ ID NO: 216495 - DNA, 25 bp, SARS Virus
tcgacaacttcacgattattttgtg

SEQ ID NO: 216496 - DNA, 25 bp, SARS Virus
cgacaacttcaccattattttgtga

SEQ ID NO: 216497 - DNA, 25 bp, SARS Virus
gacaacttcacgcttattttgtgat

SEQ ID NO: 216498 - DNA, 25 bp, SARS Virus
acaacttcacgactattttgtgatc

SEQ ID NO: 216499 - DNA, 25 bp, SARS Virus
caacttcacgatcattttgtgatct

SEQ ID NO: 216500 - DNA, 25 bp, SARS Virus
aacttcacgattcttttgtgatctg

SEQ ID NO: 216501 - DNA, 25 bp, SARS Virus
acttcacgattactttgtgatctgt

SEQ ID NO: 216502 - DNA, 25 bp, SARS Virus
cttcacgattatcttgtgatctgtt

SEQ ID NO: 216503 - DNA, 25 bp, SARS Virus
ttcacgattattctgtgatctgttt

SEQ ID NO: 216504 - DNA, 25 bp, SARS Virus
tcacgattatttcgtgatctgttta

SEQ ID NO: 216505 - DNA, 25 bp, SARS Virus
cacgattattttctgatctgtttat

SEQ ID NO: 216506 - DNA, 25 bp, SARS Virus
acgattattttgcgatctgtttatt

SEQ ID NO: 216507 - DNA, 25 bp, SARS Virus
cgattattttgtcatctgtttattg

SEQ ID NO: 216508 - DNA, 25 bp, SARS Virus
gattattttgtgctctgtttattgt

SEQ ID NO: 216509 - DNA, 25 bp, SARS Virus
attattttgtgacctgtttattgtt

SEQ ID NO: 216510 - DNA, 25 bp, SARS Virus
ttattttgtgatctgtttattgtta

SEQ ID NO: 216511 - DNA, 25 bp, SARS Virus
tattttgtgatccgtttattgttaa

SEQ ID NO: 216512 - DNA, 25 bp, SARS Virus
attttgtgatctctttattgttaac

SEQ ID NO: 216513 - DNA, 25 bp, SARS Virus
ttttgtgatctgcttattgttaaca

SEQ ID NO: 216514 - DNA, 25 bp, SARS Virus
tttgtgatctgtctattgttaacaa

SEQ ID NO: 216515 - DNA, 25 bp, SARS Virus
ttgtgatctgttcattgttaacaat

SEQ ID NO: 216516 - DNA, 25 bp, SARS Virus
tgtgatctgtttcttgttaacaata

SEQ ID NO: 216517 - DNA, 25 bp, SARS Virus
gtgatctgtttactgttaacaatag

SEQ ID NO: 216518 - DNA, 25 bp, SARS Virus
tgatctgtttatcgttaacaatagt

SEQ ID NO: 216519 - DNA, 25 bp, SARS Virus
gatctgtttattcttaacaatagtc

SEQ ID NO: 216520 - DNA, 25 bp, SARS Virus
atctgtttattgctaacaatagtcg

SEQ ID NO: 216521 - DNA, 25 bp, SARS Virus
tctgtttattgtcaacaatagtcgg

SEQ ID NO: 216522 - DNA, 25 bp, SARS Virus
ctgtttattgttcacaatagtcggg

SEQ ID NO: 216523 - DNA, 25 bp, SARS Virus
tgtttattgttaccaatagtcgggt

SEQ ID NO: 216524 - DNA, 25 bp, SARS Virus
gtttattgttaacaatagtcgggta

SEQ ID NO: 216525 - DNA, 25 bp, SARS Virus
tttattgttaaccatagtcgggtaa

SEQ ID NO: 216526 - DNA, 25 bp, SARS Virus
ttattgttaacactagtcgggtaaa

SEQ ID NO: 216527 - DNA, 25 bp, SARS Virus
tattgttaacaacagtcgggtaaat

SEQ ID NO: 216528 - DNA, 25 bp, SARS Virus
attgttaacaatcgtcgggtaaatt

SEQ ID NO: 216529 - DNA, 25 bp, SARS Virus
ttgttaacaatactcgggtaaatta

SEQ ID NO: 216530 - DNA, 25 bp, SARS Virus
tgttaacaatagccgggtaaattaa

SEQ ID NO: 216531 - DNA, 25 bp, SARS Virus
gttaacaatagtcgggtaaattaac

SEQ ID NO: 216532 - DNA, 25 bp, SARS Virus
ttaacaatagtccggtaaattaact

SEQ ID NO: 216533 - DNA, 25 bp, SARS Virus
taacaatagtcgcgtaaattaactt

SEQ ID NO: 216534 - DNA, 25 bp, SARS Virus
aacaatagtcggctaaattaacttc

SEQ ID NO: 216535 - DNA, 25 bp, SARS Virus
acaatagtcgggcaaattaacttca

SEQ ID NO: 216536 - DNA, 25 bp, SARS Virus
caatagtcgggtcaattaacttcaa

SEQ ID NO: 216537 - DNA, 25 bp, SARS Virus
aatagtcgggtacattaacttcaat

SEQ ID NO: 216538 - DNA, 25 bp, SARS Virus
atagtcgggtaacttaacttcaatt

SEQ ID NO: 216539 - DNA, 25 bp, SARS Virus
tagtcgggtaaactaacttcaattt

SEQ ID NO: 216540 - DNA, 25 bp, SARS Virus
agtcgggtaaatcaacttcaatttg

SEQ ID NO: 216541 - DNA, 25 bp, SARS Virus
gtcgggtaaattcacttcaatttgg

SEQ ID NO: 216542 - DNA, 25 bp, SARS Virus
tcgggtaaattaccttcaatttggt

SEQ ID NO: 216543 - DNA, 25 bp, SARS Virus
cgggtaaattaacttcaatttggtg

SEQ ID NO: 216544 - DNA, 25 bp, SARS Virus
gggtaaattaacctcaatttggtgg

SEQ ID NO: 216545 - DNA, 25 bp, SARS Virus
ggtaaattaactccaatttggtggt

SEQ ID NO: 216546 - DNA, 25 bp, SARS Virus
gtaaattaacttcaatttggtggtt

SEQ ID NO: 216547 - DNA, 25 bp, SARS Virus
taaattaacttccatttggtggttg

SEQ ID NO: 216548 - DNA, 25 bp, SARS Virus
aaattaacttcactttggtggttga

SEQ ID NO: 216549 - DNA, 25 bp, SARS Virus
aattaacttcaacttggtggttgaa

SEQ ID NO: 216550 - DNA, 25 bp, SARS Virus
attaacttcaatctggtggttgaac

SEQ ID NO: 216551 - DNA, 25 bp, SARS Virus
ttaacttcaattcggtggttgaact

SEQ ID NO: 216552 - DNA, 25 bp, SARS Virus
taacttcaatttcgtggttgaactc

SEQ ID NO: 216553 - DNA, 25 bp, SARS Virus
aacttcaatttgctggttgaactcc

SEQ ID NO: 216554 - DNA, 25 bp, SARS Virus
acttcaatttggcggttgaactcct

SEQ ID NO: 216555 - DNA, 25 bp, SARS Virus
cttcaatttggtcgttgaactcctt

SEQ ID NO: 216556 - DNA, 25 bp, SARS Virus
ttcaatttggtgcttgaactccttt

SEQ ID NO: 216557 - DNA, 25 bp, SARS Virus
tcaatttggtggctgaactccttta

SEQ ID NO: 216558 - DNA, 25 bp, SARS Virus
caatttggtggtcgaactcctttaa

SEQ ID NO: 216559 - DNA, 25 bp, SARS Virus
aatttggtggttcaactcctttaaa

SEQ ID NO: 216560 - DNA, 25 bp, SARS Virus
atttggtggttgcactcctttaaag

SEQ ID NO: 216561 - DNA, 25 bp, SARS Virus
tttggtggttgacctcctttaaagg

SEQ ID NO: 216562 - DNA, 25 bp, SARS Virus
ttggtggttgaactcctttaaaggt

SEQ ID NO: 216563 - DNA, 25 bp, SARS Virus
tggtggttgaacccctttaaaggta

SEQ ID NO: 216564 - DNA, 25 bp, SARS Virus
ggtggttgaactcctttaaaggtaa

SEQ ID NO: 216565 - DNA, 25 bp, SARS Virus
gtggttgaactcctttaaaggtaaa

SEQ ID NO: 216566 - DNA, 25 bp, SARS Virus
tggttgaactcccttaaaggtaaag

SEQ ID NO: 216567 - DNA, 25 bp, SARS Virus
ggttgaactcctctaaaggtaaaga

SEQ ID NO: 216568 - DNA, 25 bp, SARS Virus
gttgaactccttcaaaggtaaagaa

SEQ ID NO: 216569 - DNA, 25 bp, SARS Virus
ttgaactcctttcaaggtaaagaaa

SEQ ID NO: 216570 - DNA, 25 bp, SARS Virus
tgaactcctttacaggtaaagaaac

SEQ ID NO: 216571 - DNA, 25 bp, SARS Virus
gaactcctttaacggtaaagaaaca

SEQ ID NO: 216572 - DNA, 25 bp, SARS Virus
aactcctttaaacgtaaagaaacac

SEQ ID NO: 216573 - DNA, 25 bp, SARS Virus
actcctttaaagctaaagaaacaca

SEQ ID NO: 216574 - DNA, 25 bp, SARS Virus
ctcctttaaaggcaaagaaacacac

SEQ ID NO: 216575 - DNA, 25 bp, SARS Virus
tcctttaaaggtcaagaaacacacc

SEQ ID NO: 216576 - DNA, 25 bp, SARS Virus
cctttaaaggtacagaaacacacca

SEQ ID NO: 216577 - DNA, 25 bp, SARS Virus
ctttaaaggtaacgaaacacaccaa

SEQ ID NO: 216578 - DNA, 25 bp, SARS Virus
tttaaaggtaaacaaacacaccaaa

SEQ ID NO: 216579 - DNA, 25 bp, SARS Virus
ttaaaggtaaagcaacacaccaaat

SEQ ID NO: 216580 - DNA, 25 bp, SARS Virus
taaaggtaaagacacacaccaaatt

SEQ ID NO: 216581 - DNA, 25 bp, SARS Virus
aaaggtaaagaaccacaccaaattt

SEQ ID NO: 216582 - DNA, 25 bp, SARS Virus
aaggtaaagaaacacaccaaatttc

SEQ ID NO: 216583 - DNA, 25 bp, SARS Virus
aggtaaagaaacccaccaaatttcg

SEQ ID NO: 216584 - DNA, 25 bp, SARS Virus
ggtaaagaaacacaccaaatttcgt

SEQ ID NO: 216585 - DNA, 25 bp, SARS Virus
gtaaagaaacaccccaaatttcgtc

SEQ ID NO: 216586 - DNA, 25 bp, SARS Virus
taaagaaacacaccaaatttcgtct

SEQ ID NO: 216587 - DNA, 25 bp, SARS Virus
aaagaaacacaccaaatttcgtctg

SEQ ID NO: 216588 - DNA, 25 bp, SARS Virus
aagaaacacacccaatttcgtctgt

SEQ ID NO: 216589 - DNA, 25 bp, SARS Virus
agaaacacaccacatttcgtctgta

SEQ ID NO: 216590 - DNA, 25 bp, SARS Virus
gaaacacaccaactttcgtctgtac

SEQ ID NO: 216591 - DNA, 25 bp, SARS Virus
aaacacaccaaacttcgtctgtaca

SEQ ID NO: 216592 - DNA, 25 bp, SARS Virus
aacacaccaaatctcgtctgtacat

SEQ ID NO: 216593 - DNA, 25 bp, SARS Virus
acacaccaaattccgtctgtacatg

SEQ ID NO: 216594 - DNA, 25 bp, SARS Virus
cacaccaaatttcgtctgtacatgg

SEQ ID NO: 216595 - DNA, 25 bp, SARS Virus
acaccaaatttcctctgtacatgga

SEQ ID NO: 216596 - DNA, 25 bp, SARS Virus
caccaaatttcgcctgtacatggat

SEQ ID NO: 216597 - DNA, 25 bp, SARS Virus
accaaatttcgtctgtacatggatg

SEQ ID NO: 216598 - DNA, 25 bp, SARS Virus
ccaaatttcgtccgtacatggatgg

SEQ ID NO: 216599 - DNA, 25 bp, SARS Virus
caaatttcgtctctacatggatggt

SEQ ID NO: 216600 - DNA, 25 bp, SARS Virus
aaatttcgtctgcacatggatggtt

SEQ ID NO: 216601 - DNA, 25 bp, SARS Virus
aatttcgtctgtccatggatggttc

SEQ ID NO: 216602 - DNA, 25 bp, SARS Virus
atttcgtctgtacatggatggttct

SEQ ID NO: 216603 - DNA, 25 bp, SARS Virus
tttcgtctgtacctggatggttctt

SEQ ID NO: 216604 - DNA, 25 bp, SARS Virus
ttcgtctgtacacggatggttcttt

SEQ ID NO: 216605 - DNA, 25 bp, SARS Virus
tcgtctgtacatcgatggttctttt

SEQ ID NO: 216606 - DNA, 25 bp, SARS Virus
cgtctgtacatgcatggttcttttg

SEQ ID NO: 216607 - DNA, 25 bp, SARS Virus
gtctgtacatggctggttcttttga

SEQ ID NO: 216608 - DNA, 25 bp, SARS Virus
tctgtacatggacggttcttttgag

SEQ ID NO: 216609 - DNA, 25 bp, SARS Virus
ctgtacatggatcgttcttttgaga

SEQ ID NO: 216610 - DNA, 25 bp, SARS Virus
tgtacatggatgcttcttttgagag

SEQ ID NO: 216611 - DNA, 25 bp, SARS Virus
gtacatggatggctcttttgagagt

SEQ ID NO: 216612 - DNA, 25 bp, SARS Virus
tacatggatggtccttttgagagta

SEQ ID NO: 216613 - DNA, 25 bp, SARS Virus
acatggatggttcttttgagagtag

SEQ ID NO: 216614 - DNA, 25 bp, SARS Virus
catggatggttcctttgagagtagt

SEQ ID NO: 216615 - DNA, 25 bp, SARS Virus
atggatggttctcttgagagtagtt

SEQ ID NO: 216616 - DNA, 25 bp, SARS Virus
tggatggttcttctgagagtagttc

SEQ ID NO: 216617 - DNA, 25 bp, SARS Virus
ggatggttctttcgagagtagttct

SEQ ID NO: 216618 - DNA, 25 bp, SARS Virus
gatggttcttttcagagtagttctc

SEQ ID NO: 216619 - DNA, 25 bp, SARS Virus
atggttcttttgcgagtagttctca

SEQ ID NO: 216620 - DNA, 25 bp, SARS Virus
tggttcttttgacagtagttctcat

SEQ ID NO: 216621 - DNA, 25 bp, SARS Virus
ggttcttttgagcgtagttctcata

SEQ ID NO: 216622 - DNA, 25 bp, SARS Virus
gttcttttgagactagttctcatac

SEQ ID NO: 216623 - DNA, 25 bp, SARS Virus
ttcttttgagagcagttctcatacc

SEQ ID NO: 216624 - DNA, 25 bp, SARS Virus
tcttttgagagtcgttctcatacca

SEQ ID NO: 216625 - DNA, 25 bp, SARS Virus
cttttgagagtacttctcataccat

SEQ ID NO: 216626 - DNA, 25 bp, SARS Virus
ttttgagagtagctctcataccatc

SEQ ID NO: 216627 - DNA, 25 bp, SARS Virus
tttgagagtagtcctcataccatca

SEQ ID NO: 216628 - DNA, 25 bp, SARS Virus
ttgagagtagttctcataccatcat

SEQ ID NO: 216629 - DNA, 25 bp, SARS Virus
tgagagtagttcccataccatcatg

SEQ ID NO: 216630 - DNA, 25 bp, SARS Virus
gagagtagttctcataccatcatga

SEQ ID NO: 216631 - DNA, 25 bp, SARS Virus
agagtagttctcctaccatcatgag

SEQ ID NO: 216632 - DNA, 25 bp, SARS Virus
gagtagttctcacaccatcatgagc

SEQ ID NO: 216633 - DNA, 25 bp, SARS Virus
agtagttctcatcccatcatgagct

SEQ ID NO: 216634 - DNA, 25 bp, SARS Virus
gtagttctcataccatcatgagctt

SEQ ID NO: 216635 - DNA, 25 bp, SARS Virus
tagttctcataccatcatgagcttt

SEQ ID NO: 216636 - DNA, 25 bp, SARS Virus
agttctcataccctcatgagctttc

SEQ ID NO: 216637 - DNA, 25 bp, SARS Virus
gttctcataccaccatgagctttcg

SEQ ID NO: 216638 - DNA, 25 bp, SARS Virus
ttctcataccatcatgagctttcga

SEQ ID NO: 216639 - DNA, 25 bp, SARS Virus
tctcataccatcctgagctttcgaa

SEQ ID NO: 216640 - DNA, 25 bp, SARS Virus
ctcataccatcacgagctttcgaag

SEQ ID NO: 216641 - DNA, 25 bp, SARS Virus
tcataccatcatcagctttcgaagt

SEQ ID NO: 216642 - DNA, 25 bp, SARS Virus
cataccatcatgcgctttcgaagtg

SEQ ID NO: 216643 - DNA, 25 bp, SARS Virus
ataccatcatgacctttcgaagtga

SEQ ID NO: 216644 - DNA, 25 bp, SARS Virus
taccatcatgagctttcgaagtgat

SEQ ID NO: 216645 - DNA, 25 bp, SARS Virus
accatcatgagccttcgaagtgatg

SEQ ID NO: 216646 - DNA, 25 bp, SARS Virus
ccatcatgagctctcgaagtgatgc

SEQ ID NO: 216647 - DNA, 25 bp, SARS Virus
catcatgagcttccgaagtgatgca

SEQ ID NO: 216648 - DNA, 25 bp, SARS Virus
atcatgagctttcgaagtgatgcat

SEQ ID NO: 216649 - DNA, 25 bp, SARS Virus
tcatgagctttccaagtgatgcatc

SEQ ID NO: 216650 - DNA, 25 bp, SARS Virus
catgagctttcgcagtgatgcatca

SEQ ID NO: 216651 - DNA, 25 bp, SARS Virus
atgagctttcgacgtgatgcatcac

SEQ ID NO: 216652 - DNA, 25 bp, SARS Virus
tgagctttcgaactgatgcatcaca

SEQ ID NO: 216653 - DNA, 25 bp, SARS Virus
gagctttcgaagcgatgcatcacac

SEQ ID NO: 216654 - DNA, 25 bp, SARS Virus
agctttcgaagtcatgcatcacaca

SEQ ID NO: 216655 - DNA, 25 bp, SARS Virus
gctttcgaagtgctgcatcacacag

SEQ ID NO: 216656 - DNA, 25 bp, SARS Virus
ctttcgaagtgacgcatcacacagt

SEQ ID NO: 216657 - DNA, 25 bp, SARS Virus
tttcgaagtgatccatcacacagta

SEQ ID NO: 216658 - DNA, 25 bp, SARS Virus
ttcgaagtgatgcatcacacagtag

SEQ ID NO: 216659 - DNA, 25 bp, SARS Virus
tcgaagtgatgcctcacacagtagt

SEQ ID NO: 216660 - DNA, 25 bp, SARS Virus
cgaagtgatgcaccacacagtagtg

SEQ ID NO: 216661 - DNA, 25 bp, SARS Virus
gaagtgatgcatcacacagtagtga

SEQ ID NO: 216662 - DNA, 25 bp, SARS Virus
aagtgatgcatcccacagtagtgat

SEQ ID NO: 216663 - DNA, 25 bp, SARS Virus
agtgatgcatcacacagtagtgatc

SEQ ID NO: 216664 - DNA, 25 bp, SARS Virus
gtgatgcatcacccagtagtgatcc

SEQ ID NO: 216665 - DNA, 25 bp, SARS Virus
tgatgcatcacacagtagtgatcca

SEQ ID NO: 216666 - DNA, 25 bp, SARS Virus
gatgcatcacaccgtagtgatccat

SEQ ID NO: 216667 - DNA, 25 bp, SARS Virus
atgcatcacacactagtgatccatc

SEQ ID NO: 216668 - DNA, 25 bp, SARS Virus
tgcatcacacagcagtgatccatca

SEQ ID NO: 216669 - DNA, 25 bp, SARS Virus
gcatcacacagtcgtgatccatcat

SEQ ID NO: 216670 - DNA, 25 bp, SARS Virus
catcacacagtactgatccatcatg

SEQ ID NO: 216671 - DNA, 25 bp, SARS Virus
atcacacagtagcgatccatcatgt

SEQ ID NO: 216672 - DNA, 25 bp, SARS Virus
tcacacagtagtcatccatcatgtt

SEQ ID NO: 216673 - DNA, 25 bp, SARS Virus
cacacagtagtgctccatcatgttt

SEQ ID NO: 216674 - DNA, 25 bp, SARS Virus
acacagtagtgacccatcatgtttc

SEQ ID NO: 216675 - DNA, 25 bp, SARS Virus
cacagtagtgatccatcatgtttct

SEQ ID NO: 216676 - DNA, 25 bp, SARS Virus
acagtagtgatccatcatgtttctt

SEQ ID NO: 216677 - DNA, 25 bp, SARS Virus
cagtagtgatccctcatgtttcttt

SEQ ID NO: 216678 - DNA, 25 bp, SARS Virus
agtagtgatccaccatgtttctttc

SEQ ID NO: 216679 - DNA, 25 bp, SARS Virus
gtagtgatccatcatgtttctttca

SEQ ID NO: 216680 - DNA, 25 bp, SARS Virus
tagtgatccatcctgtttctttcag

SEQ ID NO: 216681 - DNA, 25 bp, SARS Virus
agtgatccatcacgtttctttcaga

SEQ ID NO: 216682 - DNA, 25 bp, SARS Virus
gtgatccatcatctttctttcagaa

SEQ ID NO: 216683 - DNA, 25 bp, SARS Virus
tgatccatcatgcttctttcagaat

SEQ ID NO: 216684 - DNA, 25 bp, SARS Virus
gatccatcatgtctctttcagaatg

SEQ ID NO: 216685 - DNA, 25 bp, SARS Virus
atccatcatgttcctttcagaatgg

SEQ ID NO: 216686 - DNA, 25 bp, SARS Virus
tccatcatgtttctttcagaatggg

SEQ ID NO: 216687 - DNA, 25 bp, SARS Virus
ccatcatgtttccttcagaatggga

SEQ ID NO: 216688 - DNA, 25 bp, SARS Virus
catcatgtttctctcagaatgggag

SEQ ID NO: 216689 - DNA, 25 bp, SARS Virus
atcatgtttcttccagaatgggagt

SEQ ID NO: 216690 - DNA, 25 bp, SARS Virus
tcatgtttctttcagaatgggagta

SEQ ID NO: 216691 - DNA, 25 bp, SARS Virus
catgtttctttccgaatgggagtac

SEQ ID NO: 216692 - DNA, 25 bp, SARS Virus
atgtttctttcacaatgggagtact

SEQ ID NO: 216693 - DNA, 25 bp, SARS Virus
tgtttctttcagcatgggagtacta

SEQ ID NO: 216694 - DNA, 25 bp, SARS Virus
gtttctttcagactgggagtactaa

SEQ ID NO: 216695 - DNA, 25 bp, SARS Virus
tttctttcagaacgggagtactaaa

SEQ ID NO: 216696 - DNA, 25 bp, SARS Virus
ttctttcagaatcggagtactaaat

SEQ ID NO: 216697 - DNA, 25 bp, SARS Virus
tctttcagaatgcgagtactaaatg

SEQ ID NO: 216698 - DNA, 25 bp, SARS Virus
ctttcagaatggcagtactaaatgt

SEQ ID NO: 216699 - DNA, 25 bp, SARS Virus
tttcagaatgggcgtactaaatgta

SEQ ID NO: 216700 - DNA, 25 bp, SARS Virus
ttcagaatgggactactaaatgtac

SEQ ID NO: 216701 - DNA, 25 bp, SARS Virus
tcagaatgggagcactaaatgtact

SEQ ID NO: 216702 - DNA, 25 bp, SARS Virus
cagaatgggagtcctaaatgtactc

SEQ ID NO: 216703 - DNA, 25 bp, SARS Virus
agaatgggagtactaaatgtactcc

SEQ ID NO: 216704 - DNA, 25 bp, SARS Virus
gaatgggagtaccaaatgtactcca

SEQ ID NO: 216705 - DNA, 25 bp, SARS Virus
ctaatagtattcgatctcatgggta

SEQ ID NO: 216706 - DNA, 25 bp, SARS Virus
taatagtattctgtctcatgggtat

SEQ ID NO: 216707 - DNA, 25 bp, SARS Virus
aatagtattctagctcatgggtata

SEQ ID NO: 216708 - DNA, 25 bp, SARS Virus
atagtattctatgtcatgggtatat

SEQ ID NO: 216709 - DNA, 25 bp, SARS Virus
tagtattctatcgcatgggtatatg

SEQ ID NO: 216710 - DNA, 25 bp, SARS Virus
agtattctatctgatgggtatatgt

SEQ ID NO: 216711 - DNA, 25 bp, SARS Virus
gtattctatctcgtgggtatatgta

SEQ ID NO: 216712 - DNA, 25 bp, SARS Virus
tattctatctcaggggtatatgtag

SEQ ID NO: 216713 - DNA, 25 bp, SARS Virus
attctatctcatgggtatatgtagt

SEQ ID NO: 216714 - DNA, 25 bp, SARS Virus
ttctatctcatgggtatatgtagtg

SEQ ID NO: 216715 - DNA, 25 bp, SARS Virus
tctatctcatgggtatatgtagtgt

SEQ ID NO: 216716 - DNA, 25 bp, SARS Virus
ctatctcatggggatatgtagtgtc

SEQ ID NO: 216717 - DNA, 25 bp, SARS Virus
tatctcatgggtgtatgtagtgtcg

SEQ ID NO: 216718 - DNA, 25 bp, SARS Virus
atctcatgggtagatgtagtgtcga

SEQ ID NO: 216719 - DNA, 25 bp, SARS Virus
tctcatgggtatgtgtagtgtcgaa

SEQ ID NO: 216720 - DNA, 25 bp, SARS Virus
ctcatgggtataggtagtgtcgaag

SEQ ID NO: 216721 - DNA, 25 bp, SARS Virus
tcatgggtatatgtagtgtcgaaga

SEQ ID NO: 216722 - DNA, 25 bp, SARS Virus
catgggtatatggagtgtcgaagat

SEQ ID NO: 216723 - DNA, 25 bp, SARS Virus
atgggtatatgtggtgtcgaagatg

SEQ ID NO: 216724 - DNA, 25 bp, SARS Virus
tgggtatatgtagtgtcgaagatgt

SEQ ID NO: 216725 - DNA, 25 bp, SARS Virus
gggtatatgtagggtcgaagatgtg

SEQ ID NO: 216726 - DNA, 25 bp, SARS Virus
ggtatatgtagtgtcgaagatgtgg

SEQ ID NO: 216727 - DNA, 25 bp, SARS Virus
gtatatgtagtggcgaagatgtggg

SEQ ID NO: 216728 - DNA, 25 bp, SARS Virus
tatatgtagtgtggaagatgtgggc

SEQ ID NO: 216729 - DNA, 25 bp, SARS Virus
atatgtagtgtcgaagatgtgggca

SEQ ID NO: 216730 - DNA, 25 bp, SARS Virus
tatgtagtgtcggagatgtgggcaa

SEQ ID NO: 216731 - DNA, 25 bp, SARS Virus
atgtagtgtcgaggatgtgggcaat

SEQ ID NO: 216732 - DNA, 25 bp, SARS Virus
tgtagtgtcgaagatgtgggcaatt

SEQ ID NO: 216733 - DNA, 25 bp, SARS Virus
gtagtgtcgaaggtgtgggcaattc

SEQ ID NO: 216734 - DNA, 25 bp, SARS Virus
tagtgtcgaagaggtgggcaattcc

SEQ ID NO: 216735 - DNA, 25 bp, SARS Virus
agtgtcgaagatgtgggcaattcca

SEQ ID NO: 216736 - DNA, 25 bp, SARS Virus
gtgtcgaagatgggggcaattccat

SEQ ID NO: 216737 - DNA, 25 bp, SARS Virus
tgtcgaagatgtgggcaattccatc

SEQ ID NO: 216738 - DNA, 25 bp, SARS Virus
gtcgaagatgtgggcaattccatca

SEQ ID NO: 216739 - DNA, 25 bp, SARS Virus
tcgaagatgtgggcaattccatcat

SEQ ID NO: 216740 - DNA, 25 bp, SARS Virus
cgaagatgtggggaattccatcatc

SEQ ID NO: 216741 - DNA, 25 bp, SARS Virus
gaagatgtgggcgattccatcatca

SEQ ID NO: 216742 - DNA, 25 bp, SARS Virus
aagatgtgggcagttccatcatcaa

SEQ ID NO: 216743 - DNA, 25 bp, SARS Virus
agatgtgggcaagtccatcatcaaa

SEQ ID NO: 216744 - DNA, 25 bp, SARS Virus
gatgtgggcaatgccatcatcaaaa

SEQ ID NO: 216745 - DNA, 25 bp, SARS Virus
atgtgggcaattgcatcatcaaaag

SEQ ID NO: 216746 - DNA, 25 bp, SARS Virus
tgtgggcaattcgatcatcaaaaga

SEQ ID NO: 216747 - DNA, 25 bp, SARS Virus
gtgggcaattccgtcatcaaaagac

SEQ ID NO: 216748 - DNA, 25 bp, SARS Virus
tgggcaattccagcatcaaaagact

SEQ ID NO: 216749 - DNA, 25 bp, SARS Virus
gggcaattccatgatcaaaagactg

SEQ ID NO: 216750 - DNA, 25 bp, SARS Virus
ggcaattccatcgtcaaaagactgg

SEQ ID NO: 216751 - DNA, 25 bp, SARS Virus
gcaattccatcagcaaaagactggt

SEQ ID NO: 216752 - DNA, 25 bp, SARS Virus
caattccatcatgaaaagactggtg

SEQ ID NO: 216753 - DNA, 25 bp, SARS Virus
aattccatcatcgaaagactggtgt

SEQ ID NO: 216754 - DNA, 25 bp, SARS Virus
attccatcatcagaagactggtgtt

SEQ ID NO: 216755 - DNA, 25 bp, SARS Virus
ttccatcatcaagagactggtgtta

SEQ ID NO: 216756 - DNA, 25 bp, SARS Virus
tccatcatcaaaggactggtgttac

SEQ ID NO: 216757 - DNA, 25 bp, SARS Virus
ccatcatcaaaagactggtgttaca

SEQ ID NO: 216758 - DNA, 25 bp, SARS Virus
catcatcaaaaggctggtgttacaa

SEQ ID NO: 216759 - DNA, 25 bp, SARS Virus
atcatcaaaagagtggtgttacaaa

SEQ ID NO: 216760 - DNA, 25 bp, SARS Virus
tcatcaaaagacgggtgttacaaat

SEQ ID NO: 216761 - DNA, 25 bp, SARS Virus
catcaaaagactggtgttacaaatg

SEQ ID NO: 216762 - DNA, 25 bp, SARS Virus
atcaaaagactggtgttacaaatgt

SEQ ID NO: 216763 - DNA, 25 bp, SARS Virus
tcaaaagactggggttacaaatgtg

SEQ ID NO: 216764 - DNA, 25 bp, SARS Virus
caaaagactggtgttacaaatgtgt

SEQ ID NO: 216765 - DNA, 25 bp, SARS Virus
aaaagactggtggtacaaatgtgtg

SEQ ID NO: 216766 - DNA, 25 bp, SARS Virus
aaagactggtgtgacaaatgtgtgg

SEQ ID NO: 216767 - DNA, 25 bp, SARS Virus
aagactggtgttgcaaatgtgtggt

SEQ ID NO: 216768 - DNA, 25 bp, SARS Virus
agactggtgttagaaatgtgtggtg

SEQ ID NO: 216769 - DNA, 25 bp, SARS Virus
gactggtgttacgaatgtgtggtgt

SEQ ID NO: 216770 - DNA, 25 bp, SARS Virus
actggtgttacagatgtgtggtgta

SEQ ID NO: 216771 - DNA, 25 bp, SARS Virus
ctggtgttacaagtgtgtggtgtaa

SEQ ID NO: 216772 - DNA, 25 bp, SARS Virus
tggtgttacaaaggtgtggtgtaat

SEQ ID NO: 216773 - DNA, 25 bp, SARS Virus
ggtgttacaaatgtgtggtgtaatt

SEQ ID NO: 216774 - DNA, 25 bp, SARS Virus
gtgttacaaatgggtggtgtaattc

SEQ ID NO: 216775 - DNA, 25 bp, SARS Virus
tgttacaaatgtgtggtgtaattct

SEQ ID NO: 216776 - DNA, 25 bp, SARS Virus
gttacaaatgtggggtgtaattctt

SEQ ID NO: 216777 - DNA, 25 bp, SARS Virus
ttacaaatgtgtggtgtaattcttg

SEQ ID NO: 216778 - DNA, 25 bp, SARS Virus
tacaaatgtgtggtgtaattcttga

SEQ ID NO: 216779 - DNA, 25 bp, SARS Virus
acaaatgtgtggggtaattcttgag

SEQ ID NO: 216780 - DNA, 25 bp, SARS Virus
caaatgtgtggtgtaattcttgagc

SEQ ID NO: 216781 - DNA, 25 bp, SARS Virus
aaatgtgtggtggaattcttgagcg

SEQ ID NO: 216782 - DNA, 25 bp, SARS Virus
aatgtgtggtgtgattcttgagcga

SEQ ID NO: 216783 - DNA, 25 bp, SARS Virus
atgtgtggtgtagttcttgagcgaa

SEQ ID NO: 216784 - DNA, 25 bp, SARS Virus
tgtgtggtgtaagtcttgagcgaaa

SEQ ID NO: 216785 - DNA, 25 bp, SARS Virus
gtgtggtgtaatgcttgagcgaaac

SEQ ID NO: 216786 - DNA, 25 bp, SARS Virus
tgtggtgtaattgttgagcgaaacg

SEQ ID NO: 216787 - DNA, 25 bp, SARS Virus
gtggtgtaattcgtgagcgaaacgt

SEQ ID NO: 216788 - DNA, 25 bp, SARS Virus
tggtgtaattctggagcgaaacgtc

SEQ ID NO: 216789 - DNA, 25 bp, SARS Virus
ggtgtaattcttgagcgaaacgtct

SEQ ID NO: 216790 - DNA, 25 bp, SARS Virus
gtgtaattcttgggcgaaacgtcta

SEQ ID NO: 216791 - DNA, 25 bp, SARS Virus
tgtaattcttgagcgaaacgtctaa

SEQ ID NO: 216792 - DNA, 25 bp, SARS Virus
gtaattcttgagggaaacgtctaag

SEQ ID NO: 216793 - DNA, 25 bp, SARS Virus
taattcttgagcgaaacgtctaagg

SEQ ID NO: 216794 - DNA, 25 bp, SARS Virus
aattcttgagcggaacgtctaaggt

SEQ ID NO: 216795 - DNA, 25 bp, SARS Virus
attcttgagcgagacgtctaaggtt

SEQ ID NO: 216796 - DNA, 25 bp, SARS Virus
ttcttgagcgaagcgtctaaggttt

SEQ ID NO: 216797 - DNA, 25 bp, SARS Virus
tcttgagcgaaaggtctaaggttta

SEQ ID NO: 216798 - DNA, 25 bp, SARS Virus
cttgagcgaaacgtctaaggtttaa

SEQ ID NO: 216799 - DNA, 25 bp, SARS Virus
ttgagcgaaacggctaaggtttaat

SEQ ID NO: 216800 - DNA, 25 bp, SARS Virus
tgagcgaaacgtgtaaggtttaatc

SEQ ID NO: 216801 - DNA, 25 bp, SARS Virus
gagcgaaacgtcgaaggtttaatcg

SEQ ID NO: 216802 - DNA, 25 bp, SARS Virus
agcgaaacgtctgaggtttaatcgt

SEQ ID NO: 216803 - DNA, 25 bp, SARS Virus
gcgaaacgtctagggtttaatcgta

SEQ ID NO: 216804 - DNA, 25 bp, SARS Virus
cgaaacgtctaaggtttaatcgtac

SEQ ID NO: 216805 - DNA, 25 bp, SARS Virus
gaaacgtctaaggtttaatcgtacg

SEQ ID NO: 216806 - DNA, 25 bp, SARS Virus
aaacgtctaagggttaatcgtacga

SEQ ID NO: 216807 - DNA, 25 bp, SARS Virus
aacgtctaaggtgtaatcgtacgac

SEQ ID NO: 216808 - DNA, 25 bp, SARS Virus
acgtctaaggttgaatcgtacgaca

SEQ ID NO: 216809 - DNA, 25 bp, SARS Virus
cgtctaaggtttgatcgtacgacat

SEQ ID NO: 216810 - DNA, 25 bp, SARS Virus
gtctaaggtttagtcgtacgacatc

SEQ ID NO: 216811 - DNA, 25 bp, SARS Virus
tctaaggtttaagcgtacgacatct

SEQ ID NO: 216812 - DNA, 25 bp, SARS Virus
ctaaggtttaatggtacgacatctt

SEQ ID NO: 216813 - DNA, 25 bp, SARS Virus
taaggtttaatcgtacgacatcttc

SEQ ID NO: 216814 - DNA, 25 bp, SARS Virus
aaggtttaatcggacgacatcttct

SEQ ID NO: 216815 - DNA, 25 bp, SARS Virus
aggtttaatcgtgcgacatcttcta

SEQ ID NO: 216816 - DNA, 25 bp, SARS Virus
ggtttaatcgtaggacatcttctac

SEQ ID NO: 216817 - DNA, 25 bp, SARS Virus
gtttaatcgtacgacatcttctacc

SEQ ID NO: 216818 - DNA, 25 bp, SARS Virus
tttaatcgtacggcatcttctaccc

SEQ ID NO: 216819 - DNA, 25 bp, SARS Virus
ttaatcgtacgagatcttctaccca

SEQ ID NO: 216820 - DNA, 25 bp, SARS Virus
taatcgtacgacgtcttctacccag

SEQ ID NO: 216821 - DNA, 25 bp, SARS Virus
aatcgtacgacagcttctacccagt

SEQ ID NO: 216822 - DNA, 25 bp, SARS Virus
atcgtacgacatgttctacccagta

SEQ ID NO: 216823 - DNA, 25 bp, SARS Virus
tcgtacgacatcgtctacccagtat

SEQ ID NO: 216824 - DNA, 25 bp, SARS Virus
cgtacgacatctgctacccagtatc

SEQ ID NO: 216825 - DNA, 25 bp, SARS Virus
gtacgacatcttgtacccagtatca

SEQ ID NO: 216826 - DNA, 25 bp, SARS Virus
tacgacatcttcgacccagtatcaa

SEQ ID NO: 216827 - DNA, 25 bp, SARS Virus
acgacatcttctgcccagtatcaaa

SEQ ID NO: 216828 - DNA, 25 bp, SARS Virus
cgacatcttctagccagtatcaaag

SEQ ID NO: 216829 - DNA, 25 bp, SARS Virus
gacatcttctacgcagtatcaaaga

SEQ ID NO: 216830 - DNA, 25 bp, SARS Virus
acatcttctaccgagtatcaaagag

SEQ ID NO: 216831 - DNA, 25 bp, SARS Virus
catcttctacccggtatcaaagaga

SEQ ID NO: 216832 - DNA, 25 bp, SARS Virus
atcttctacccagtatcaaagagac

SEQ ID NO: 216833 - DNA, 25 bp, SARS Virus
tcttctacccaggatcaaagagact

SEQ ID NO: 216834 - DNA, 25 bp, SARS Virus
cttctacccagtgtcaaagagactg

SEQ ID NO: 216835 - DNA, 25 bp, SARS Virus
ttctacccagtagcaaagagactgt

SEQ ID NO: 216836 - DNA, 25 bp, SARS Virus
tctacccagtatgaaagagactgta

SEQ ID NO: 216837 - DNA, 25 bp, SARS Virus
ctacccagtatcgaagagactgtag

SEQ ID NO: 216838 - DNA, 25 bp, SARS Virus
tacccagtatcagagagactgtagt

SEQ ID NO: 216839 - DNA, 25 bp, SARS Virus
acccagtatcaaggagactgtagtg

SEQ ID NO: 216840 - DNA, 25 bp, SARS Virus
cccagtatcaaagagactgtagtgg

SEQ ID NO: 216841 - DNA, 25 bp, SARS Virus
ccagtatcaaagggactgtagtggt

SEQ ID NO: 216842 - DNA, 25 bp, SARS Virus
cagtatcaaagagactgtagtggtt

SEQ ID NO: 216843 - DNA, 25 bp, SARS Virus
agtatcaaagaggctgtagtggttc

SEQ ID NO: 216844 - DNA, 25 bp, SARS Virus
gtatcaaagagagtgtagtggttcg

SEQ ID NO: 216845 - DNA, 25 bp, SARS Virus
tatcaaagagacggtagtggttcga

SEQ ID NO: 216846 - DNA, 25 bp, SARS Virus
atcaaagagactgtagtggttcgag

SEQ ID NO: 216847 - DNA, 25 bp, SARS Virus
tcaaagagactggagtggttcgagc

SEQ ID NO: 216848 - DNA, 25 bp, SARS Virus
caaagagactgtggtggttcgagcg

SEQ ID NO: 216849 - DNA, 25 bp, SARS Virus
aaagagactgtagtggttcgagcgg

SEQ ID NO: 216850 - DNA, 25 bp, SARS Virus
aagagactgtaggggttcgagcggt

SEQ ID NO: 216851 - DNA, 25 bp, SARS Virus
agagactgtagtggttcgagcggtt

SEQ ID NO: 216852 - DNA, 25 bp, SARS Virus
gagactgtagtggttcgagcggttg

SEQ ID NO: 216853 - DNA, 25 bp, SARS Virus
agactgtagtgggtcgagcggttgt

SEQ ID NO: 216854 - DNA, 25 bp, SARS Virus
gactgtagtggtgcgagcggttgtc

SEQ ID NO: 216855 - DNA, 25 bp, SARS Virus
actgtagtggttggagcggttgtca

SEQ ID NO: 216856 - DNA, 25 bp, SARS Virus
ctgtagtggttcgagcggttgtcaa

SEQ ID NO: 216857 - DNA, 25 bp, SARS Virus
tgtagtggttcgggcggttgtcaaa

SEQ ID NO: 216858 - DNA, 25 bp, SARS Virus
gtagtggttcgagcggttgtcaaaa

SEQ ID NO: 216859 - DNA, 25 bp, SARS Virus
tagtggttcgaggggttgtcaaaat

SEQ ID NO: 216860 - DNA, 25 bp, SARS Virus
agtggttcgagcggttgtcaaaata

SEQ ID NO: 216861 - DNA, 25 bp, SARS Virus
gtggttcgagcggttgtcaaaataa

SEQ ID NO: 216862 - DNA, 25 bp, SARS Virus
tggttcgagcgggtgtcaaaataat

SEQ ID NO: 216863 - DNA, 25 bp, SARS Virus
ggttcgagcggtggtcaaaataatg

SEQ ID NO: 216864 - DNA, 25 bp, SARS Virus
gttcgagcggttgtcaaaataatga

SEQ ID NO: 216865 - DNA, 25 bp, SARS Virus
ttcgagcggttggcaaaataatgac

SEQ ID NO: 216866 - DNA, 25 bp, SARS Virus
tcgagcggttgtgaaaataatgaca

SEQ ID NO: 216867 - DNA, 25 bp, SARS Virus
cgagcggttgtcgaaataatgacat

SEQ ID NO: 216868 - DNA, 25 bp, SARS Virus
gagcggttgtcagaataatgacatt

SEQ ID NO: 216869 - DNA, 25 bp, SARS Virus
agcggttgtcaagataatgacattc

SEQ ID NO: 216870 - DNA, 25 bp, SARS Virus
gcggttgtcaaagtaatgacattcg

SEQ ID NO: 216871 - DNA, 25 bp, SARS Virus
cggttgtcaaaagaatgacattcgc

SEQ ID NO: 216872 - DNA, 25 bp, SARS Virus
ggttgtcaaaatgatgacattcgct

SEQ ID NO: 216873 - DNA, 25 bp, SARS Virus
gttgtcaaaatagtgacattcgctc

SEQ ID NO: 216874 - DNA, 25 bp, SARS Virus
ttgtcaaaataaggacattcgctca

SEQ ID NO: 216875 - DNA, 25 bp, SARS Virus
tgtcaaaataatgacattcgctcat

SEQ ID NO: 216876 - DNA, 25 bp, SARS Virus
gtcaaaataatggcattcgctcata

SEQ ID NO: 216877 - DNA, 25 bp, SARS Virus
tcaaaataatgagattcgctcatac

SEQ ID NO: 216878 - DNA, 25 bp, SARS Virus
caaaataatgacgttcgctcatact

SEQ ID NO: 216879 - DNA, 25 bp, SARS Virus
aaaataatgacagtcgctcatactc

SEQ ID NO: 216880 - DNA, 25 bp, SARS Virus
aaataatgacatgcgctcatactca

SEQ ID NO: 216881 - DNA, 25 bp, SARS Virus
aataatgacattggctcatactcac

SEQ ID NO: 216882 - DNA, 25 bp, SARS Virus
ataatgacattcgctcatactcacg

SEQ ID NO: 216883 - DNA, 25 bp, SARS Virus
taatgacattcggtcatactcacgt

SEQ ID NO: 216884 - DNA, 25 bp, SARS Virus
aatgacattcgcgcatactcacgtg

SEQ ID NO: 216885 - DNA, 25 bp, SARS Virus
atgacattcgctgatactcacgtgt

SEQ ID NO: 216886 - DNA, 25 bp, SARS Virus
tgacattcgctcgtactcacgtgtt

SEQ ID NO: 216887 - DNA, 25 bp, SARS Virus
gacattcgctcagactcacgtgttt

SEQ ID NO: 216888 - DNA, 25 bp, SARS Virus
acattcgctcatgctcacgtgtttt

SEQ ID NO: 216889 - DNA, 25 bp, SARS Virus
cattcgctcatagtcacgtgttttc

SEQ ID NO: 216890 - DNA, 25 bp, SARS Virus
attcgctcatacgcacgtgttttca

SEQ ID NO: 216891 - DNA, 25 bp, SARS Virus
ttcgctcatactgacgtgttttcaa

SEQ ID NO: 216892 - DNA, 25 bp, SARS Virus
tcgctcatactcgcgtgttttcaat

SEQ ID NO: 216893 - DNA, 25 bp, SARS Virus
cgctcatactcaggtgttttcaatc

SEQ ID NO: 216894 - DNA, 25 bp, SARS Virus
gctcatactcacgtgttttcaatcg

SEQ ID NO: 216895 - DNA, 25 bp, SARS Virus
ctcatactcacgggttttcaatcgt

SEQ ID NO: 216896 - DNA, 25 bp, SARS Virus
tcatactcacgtgttttcaatcgtc

SEQ ID NO: 216897 - DNA, 25 bp, SARS Virus
catactcacgtggtttcaatcgtcg

SEQ ID NO: 216898 - DNA, 25 bp, SARS Virus
atactcacgtgtgttcaatcgtcgt

SEQ ID NO: 216899 - DNA, 25 bp, SARS Virus
tactcacgtgttgtcaatcgtcgta

SEQ ID NO: 216900 - DNA, 25 bp, SARS Virus
actcacgtgtttgcaatcgtcgtag

SEQ ID NO: 216901 - DNA, 25 bp, SARS Virus
ctcacgtgttttgaatcgtcgtagt

SEQ ID NO: 216902 - DNA, 25 bp, SARS Virus
tcacgtgttttcgatcgtcgtagtg

SEQ ID NO: 216903 - DNA, 25 bp, SARS Virus
cacgtgttttcagtcgtcgtagtgg

SEQ ID NO: 216904 - DNA, 25 bp, SARS Virus
acgtgttttcaagcgtcgtagtggt

SEQ ID NO: 216905 - DNA, 25 bp, SARS Virus
cgtgttttcaatggtcgtagtggtc

SEQ ID NO: 216906 - DNA, 25 bp, SARS Virus
gtgttttcaatcgtcgtagtggtcg

SEQ ID NO: 216907 - DNA, 25 bp, SARS Virus
tgttttcaatcggcgtagtggtcgt

SEQ ID NO: 216908 - DNA, 25 bp, SARS Virus
gttttcaatcgtggtagtggtcgtg

SEQ ID NO: 216909 - DNA, 25 bp, SARS Virus
ttttcaatcgtcgtagtggtcgtgc

SEQ ID NO: 216910 - DNA, 25 bp, SARS Virus
tttcaatcgtcggagtggtcgtgcc

SEQ ID NO: 216911 - DNA, 25 bp, SARS Virus
ttcaatcgtcgtggtggtcgtgccc

SEQ ID NO: 216912 - DNA, 25 bp, SARS Virus
tcaatcgtcgtagtggtcgtgcccg

SEQ ID NO: 216913 - DNA, 25 bp, SARS Virus
caatcgtcgtaggggtcgtgcccga

SEQ ID NO: 216914 - DNA, 25 bp, SARS Virus
aatcgtcgtagtggtcgtgcccgag

SEQ ID NO: 216915 - DNA, 25 bp, SARS Virus
atcgtcgtagtggtcgtgcccgaga

SEQ ID NO: 216916 - DNA, 25 bp, SARS Virus
tcgtcgtagtgggcgtgcccgagat

SEQ ID NO: 216917 - DNA, 25 bp, SARS Virus
cgtcgtagtggtggtgcccgagata

SEQ ID NO: 216918 - DNA, 25 bp, SARS Virus
gtcgtagtggtcgtgcccgagatat

SEQ ID NO: 216919 - DNA, 25 bp, SARS Virus
tcgtagtggtcgggcccgagatatt

SEQ ID NO: 216920 - DNA, 25 bp, SARS Virus
cgtagtggtcgtgcccgagatatta

SEQ ID NO: 216921 - DNA, 25 bp, SARS Virus
gtagtggtcgtggccgagatattat

SEQ ID NO: 216922 - DNA, 25 bp, SARS Virus
tagtggtcgtgcgcgagatattatt

SEQ ID NO: 216923 - DNA, 25 bp, SARS Virus
agtggtcgtgccggagatattattc

SEQ ID NO: 216924 - DNA, 25 bp, SARS Virus
gtggtcgtgcccgagatattattcg

SEQ ID NO: 216925 - DNA, 25 bp, SARS Virus
tggtcgtgcccgggatattattcgg

SEQ ID NO: 216926 - DNA, 25 bp, SARS Virus
ggtcgtgcccgagatattattcgga

SEQ ID NO: 216927 - DNA, 25 bp, SARS Virus
gtcgtgcccgaggtattattcggag

SEQ ID NO: 216928 - DNA, 25 bp, SARS Virus
tcgtgcccgagagattattcggaga

SEQ ID NO: 216929 - DNA, 25 bp, SARS Virus
cgtgcccgagatgttattcggagaa

SEQ ID NO: 216930 - DNA, 25 bp, SARS Virus
gtgcccgagatagtattcggagaac

SEQ ID NO: 216931 - DNA, 25 bp, SARS Virus
tgcccgagatatgattcggagaact

SEQ ID NO: 216932 - DNA, 25 bp, SARS Virus
gcccgagatattgttcggagaactt

SEQ ID NO: 216933 - DNA, 25 bp, SARS Virus
cccgagatattagtcggagaacttc

SEQ ID NO: 216934 - DNA, 25 bp, SARS Virus
ccgagatattatgcggagaacttca

SEQ ID NO: 216935 - DNA, 25 bp, SARS Virus
cgagatattattgggagaacttcac

SEQ ID NO: 216936 - DNA, 25 bp, SARS Virus
gagatattattcggagaacttcacg

SEQ ID NO: 216937 - DNA, 25 bp, SARS Virus
agatattattcggagaacttcacga

SEQ ID NO: 216938 - DNA, 25 bp, SARS Virus
gatattattcggggaacttcacgac

SEQ ID NO: 216939 - DNA, 25 bp, SARS Virus
atattattcggagaacttcacgacc

SEQ ID NO: 216940 - DNA, 25 bp, SARS Virus
tattattcggaggacttcacgacca

SEQ ID NO: 216941 - DNA, 25 bp, SARS Virus
attattcggagagcttcacgaccac

SEQ ID NO: 216942 - DNA, 25 bp, SARS Virus
ttattcggagaagttcacgaccacg

SEQ ID NO: 216943 - DNA, 25 bp, SARS Virus
tattcggagaacgtcacgaccacgt

SEQ ID NO: 216944 - DNA, 25 bp, SARS Virus
attcggagaactgcacgaccacgta

SEQ ID NO: 216945 - DNA, 25 bp, SARS Virus
ttcggagaacttgacgaccacgtaa

SEQ ID NO: 216946 - DNA, 25 bp, SARS Virus
tcggagaacttcgcgaccacgtaac

SEQ ID NO: 216947 - DNA, 25 bp, SARS Virus
cggagaacttcaggaccacgtaact

SEQ ID NO: 216948 - DNA, 25 bp, SARS Virus
ggagaacttcacgaccacgtaactt

SEQ ID NO: 216949 - DNA, 25 bp, SARS Virus
gagaacttcacggccacgtaactta

SEQ ID NO: 216950 - DNA, 25 bp, SARS Virus
agaacttcacgagcacgtaacttaa

SEQ ID NO: 216951 - DNA, 25 bp, SARS Virus
gaacttcacgacgacgtaacttaaa

SEQ ID NO: 216952 - DNA, 25 bp, SARS Virus
aacttcacgaccgcgtaacttaaac

SEQ ID NO: 216953 - DNA, 25 bp, SARS Virus
acttcacgaccaggtaacttaaact

SEQ ID NO: 216954 - DNA, 25 bp, SARS Virus
cttcacgaccacgtaacttaaactg

SEQ ID NO: 216955 - DNA, 25 bp, SARS Virus
ttcacgaccacggaacttaaactga

SEQ ID NO: 216956 - DNA, 25 bp, SARS Virus
tcacgaccacgtgacttaaactgaa

SEQ ID NO: 216957 - DNA, 25 bp, SARS Virus
cacgaccacgtagcttaaactgaag

SEQ ID NO: 216958 - DNA, 25 bp, SARS Virus
acgaccacgtaagttaaactgaagt

SEQ ID NO: 216959 - DNA, 25 bp, SARS Virus
cgaccacgtaacgtaaactgaagtt

SEQ ID NO: 216960 - DNA, 25 bp, SARS Virus
gaccacgtaactgaaactgaagttc

SEQ ID NO: 216961 - DNA, 25 bp, SARS Virus
accacgtaacttgaactgaagttcg

SEQ ID NO: 216962 - DNA, 25 bp, SARS Virus
ccacgtaacttagactgaagttcga

SEQ ID NO: 216963 - DNA, 25 bp, SARS Virus
cacgtaacttaagctgaagttcgac

SEQ ID NO: 216964 - DNA, 25 bp, SARS Virus
acgtaacttaaagtgaagttcgaca

SEQ ID NO: 216965 - DNA, 25 bp, SARS Virus
cgtaacttaaacggaagttcgacaa

SEQ ID NO: 216966 - DNA, 25 bp, SARS Virus
gtaacttaaactgaagttcgacaac

SEQ ID NO: 216967 - DNA, 25 bp, SARS Virus
taacttaaactggagttcgacaact

SEQ ID NO: 216968 - DNA, 25 bp, SARS Virus
aacttaaactgaggttcgacaactt

SEQ ID NO: 216969 - DNA, 25 bp, SARS Virus
acttaaactgaagttcgacaacttc

SEQ ID NO: 216970 - DNA, 25 bp, SARS Virus
cttaaactgaaggtcgacaacttca

SEQ ID NO: 216971 - DNA, 25 bp, SARS Virus
ttaaactgaagtgcgacaacttcac

SEQ ID NO: 216972 - DNA, 25 bp, SARS Virus
taaactgaagttggacaacttcacg

SEQ ID NO: 216973 - DNA, 25 bp, SARS Virus
aaactgaagttcgacaacttcacga

SEQ ID NO: 216974 - DNA, 25 bp, SARS Virus
aactgaagttcggcaacttcacgat

SEQ ID NO: 216975 - DNA, 25 bp, SARS Virus
actgaagttcgagaacttcacgatt

SEQ ID NO: 216976 - DNA, 25 bp, SARS Virus
ctgaagttcgacgacttcacgatta

SEQ ID NO: 216977 - DNA, 25 bp, SARS Virus
tgaagttcgacagcttcacgattat

SEQ ID NO: 216978 - DNA, 25 bp, SARS Virus
gaagttcgacaagttcacgattatt

SEQ ID NO: 216979 - DNA, 25 bp, SARS Virus
aagttcgacaacgtcacgattattt

SEQ ID NO: 216980 - DNA, 25 bp, SARS Virus
agttcgacaactgcacgattatttt

SEQ ID NO: 216981 - DNA, 25 bp, SARS Virus
gttcgacaacttgacgattattttg

SEQ ID NO: 216982 - DNA, 25 bp, SARS Virus
ttcgacaacttcgcgattattttgt

SEQ ID NO: 216983 - DNA, 25 bp, SARS Virus
tcgacaacttcaggattattttgtg

SEQ ID NO: 216984 - DNA, 25 bp, SARS Virus
cgacaacttcacgattattttgtga

SEQ ID NO: 216985 - DNA, 25 bp, SARS Virus
gacaacttcacggttattttgtgat

SEQ ID NO: 216986 - DNA, 25 bp, SARS Virus
acaacttcacgagtattttgtgatc

SEQ ID NO: 216987 - DNA, 25 bp, SARS Virus
caacttcacgatgattttgtgatct

SEQ ID NO: 216988 - DNA, 25 bp, SARS Virus
aacttcacgattgttttgtgatctg

SEQ ID NO: 216989 - DNA, 25 bp, SARS Virus
acttcacgattagtttgtgatctgt

SEQ ID NO: 216990 - DNA, 25 bp, SARS Virus
cttcacgattatgttgtgatctgtt

SEQ ID NO: 216991 - DNA, 25 bp, SARS Virus
ttcacgattattgtgtgatctgttt

SEQ ID NO: 216992 - DNA, 25 bp, SARS Virus
tcacgattatttggtgatctgttta

SEQ ID NO: 216993 - DNA, 25 bp, SARS Virus
cacgattattttgtgatctgtttat

SEQ ID NO: 216994 - DNA, 25 bp, SARS Virus
acgattattttgggatctgtttatt

SEQ ID NO: 216995 - DNA, 25 bp, SARS Virus
cgattattttgtgatctgtttattg

SEQ ID NO: 216996 - DNA, 25 bp, SARS Virus
gattattttgtggtctgtttattgt

SEQ ID NO: 216997 - DNA, 25 bp, SARS Virus
attattttgtgagctgtttattgtt

SEQ ID NO: 216998 - DNA, 25 bp, SARS Virus
ttattttgtgatgtgtttattgtta

SEQ ID NO: 216999 - DNA, 25 bp, SARS Virus
tattttgtgatcggtttattgttaa

SEQ ID NO: 217000 - DNA, 25 bp, SARS Virus
attttgtgatctgtttattgttaac

SEQ ID NO: 217001 - DNA, 25 bp, SARS Virus
ttttgtgatctggttattgttaaca

SEQ ID NO: 217002 - DNA, 25 bp, SARS Virus
tttgtgatctgtgtattgttaacaa

SEQ ID NO: 217003 - DNA, 25 bp, SARS Virus
ttgtgatctgttgattgttaacaat

SEQ ID NO: 217004 - DNA, 25 bp, SARS Virus
tgtgatctgtttgttgttaacaata

SEQ ID NO: 217005 - DNA, 25 bp, SARS Virus
gtgatctgtttagtgttaacaatag

SEQ ID NO: 217006 - DNA, 25 bp, SARS Virus
tgatctgtttatggttaacaatagt

SEQ ID NO: 217007 - DNA, 25 bp, SARS Virus
gatctgtttattgttaacaatagtc

SEQ ID NO: 217008 - DNA, 25 bp, SARS Virus
atctgtttattggtaacaatagtcg

SEQ ID NO: 217009 - DNA, 25 bp, SARS Virus
tctgtttattgtgaacaatagtcgg

SEQ ID NO: 217010 - DNA, 25 bp, SARS Virus
ctgtttattgttgacaatagtcggg

SEQ ID NO: 217011 - DNA, 25 bp, SARS Virus
tgtttattgttagcaatagtcgggt

SEQ ID NO: 217012 - DNA, 25 bp, SARS Virus
gtttattgttaagaatagtcgggta

SEQ ID NO: 217013 - DNA, 25 bp, SARS Virus
tttattgttaacgatagtcgggtaa

SEQ ID NO: 217014 - DNA, 25 bp, SARS Virus
ttattgttaacagtagtcgggtaaa

SEQ ID NO: 217015 - DNA, 25 bp, SARS Virus
tattgttaacaagagtcgggtaaat

SEQ ID NO: 217016 - DNA, 25 bp, SARS Virus
attgttaacaatggtcgggtaaatt

SEQ ID NO: 217017 - DNA, 25 bp, SARS Virus
ttgttaacaatagtcgggtaaatta

SEQ ID NO: 217018 - DNA, 25 bp, SARS Virus
tgttaacaataggcgggtaaattaa

SEQ ID NO: 217019 - DNA, 25 bp, SARS Virus
gttaacaatagtggggtaaattaac

SEQ ID NO: 217020 - DNA, 25 bp, SARS Virus
ttaacaatagtcgggtaaattaact

SEQ ID NO: 217021 - DNA, 25 bp, SARS Virus
taacaatagtcgggtaaattaactt

SEQ ID NO: 217022 - DNA, 25 bp, SARS Virus
aacaatagtcgggtaaattaacttc

SEQ ID NO: 217023 - DNA, 25 bp, SARS Virus
acaatagtcggggaaattaacttca

SEQ ID NO: 217024 - DNA, 25 bp, SARS Virus
caatagtcgggtgaattaacttcaa

SEQ ID NO: 217025 - DNA, 25 bp, SARS Virus
aatagtcgggtagattaacttcaat

SEQ ID NO: 217026 - DNA, 25 bp, SARS Virus
atagtcgggtaagttaacttcaatt

SEQ ID NO: 217027 - DNA, 25 bp, SARS Virus
tagtcgggtaaagtaacttcaattt

SEQ ID NO: 217028 - DNA, 25 bp, SARS Virus
agtcgggtaaatgaacttcaatttg

SEQ ID NO: 217029 - DNA, 25 bp, SARS Virus
gtcgggtaaattgacttcaatttgg

SEQ ID NO: 217030 - DNA, 25 bp, SARS Virus
tcgggtaaattagcttcaatttggt

SEQ ID NO: 217031 - DNA, 25 bp, SARS Virus
cgggtaaattaagttcaatttggtg

SEQ ID NO: 217032 - DNA, 25 bp, SARS Virus
gggtaaattaacgtcaatttggtgg

SEQ ID NO: 217033 - DNA, 25 bp, SARS Virus
ggtaaattaactgcaatttggtggt

SEQ ID NO: 217034 - DNA, 25 bp, SARS Virus
gtaaattaacttgaatttggtggtt

SEQ ID NO: 217035 - DNA, 25 bp, SARS Virus
taaattaacttcgatttggtggttg

SEQ ID NO: 217036 - DNA, 25 bp, SARS Virus
aaattaacttcagtttggtggttga

SEQ ID NO: 217037 - DNA, 25 bp, SARS Virus
aattaacttcaagttggtggttgaa

SEQ ID NO: 217038 - DNA, 25 bp, SARS Virus
attaacttcaatgtggtggttgaac

SEQ ID NO: 217039 - DNA, 25 bp, SARS Virus
ttaacttcaattgggtggttgaact

SEQ ID NO: 217040 - DNA, 25 bp, SARS Virus
taacttcaatttggtggttgaactc

SEQ ID NO: 217041 - DNA, 25 bp, SARS Virus
aacttcaatttggtggttgaactcc

SEQ ID NO: 217042 - DNA, 25 bp, SARS Virus
acttcaatttgggggttgaactcct

SEQ ID NO: 217043 - DNA, 25 bp, SARS Virus
cttcaatttggtggttgaactcctt

SEQ ID NO: 217044 - DNA, 25 bp, SARS Virus
ttcaatttggtggttgaactccttt

SEQ ID NO: 217045 - DNA, 25 bp, SARS Virus
tcaatttggtgggtgaactccttta

SEQ ID NO: 217046 - DNA, 25 bp, SARS Virus
caatttggtggtggaactcctttaa

SEQ ID NO: 217047 - DNA, 25 bp, SARS Virus
aatttggtggttgaactcctttaaa

SEQ ID NO: 217048 - DNA, 25 bp, SARS Virus
atttggtggttggactcctttaaag

SEQ ID NO: 217049 - DNA, 25 bp, SARS Virus
tttggtggttgagctcctttaaagg

SEQ ID NO: 217050 - DNA, 25 bp, SARS Virus
ttggtggttgaagtcctttaaaggt

SEQ ID NO: 217051 - DNA, 25 bp, SARS Virus
tggtggttgaacgcctttaaaggta

SEQ ID NO: 217052 - DNA, 25 bp, SARS Virus
ggtggttgaactgctttaaaggtaa

SEQ ID NO: 217053 - DNA, 25 bp, SARS Virus
gtggttgaactcgtttaaaggtaaa

SEQ ID NO: 217054 - DNA, 25 bp, SARS Virus
tggttgaactccgttaaaggtaaag

SEQ ID NO: 217055 - DNA, 25 bp, SARS Virus
ggttgaactcctgtaaaggtaaaga

SEQ ID NO: 217056 - DNA, 25 bp, SARS Virus
gttgaactccttgaaaggtaaagaa

SEQ ID NO: 217057 - DNA, 25 bp, SARS Virus
ttgaactcctttgaaggtaaagaaa

SEQ ID NO: 217058 - DNA, 25 bp, SARS Virus
tgaactcctttagaggtaaagaaac

SEQ ID NO: 217059 - DNA, 25 bp, SARS Virus
gaactcctttaagggtaaagaaaca

SEQ ID NO: 217060 - DNA, 25 bp, SARS Virus
aactcctttaaaggtaaagaaacac

SEQ ID NO: 217061 - DNA, 25 bp, SARS Virus
actcctttaaaggtaaagaaacaca

SEQ ID NO: 217062 - DNA, 25 bp, SARS Virus
ctcctttaaagggaaagaaacacac

SEQ ID NO: 217063 - DNA, 25 bp, SARS Virus
tcctttaaaggtgaagaaacacacc

SEQ ID NO: 217064 - DNA, 25 bp, SARS Virus
cctttaaaggtagagaaacacacca

SEQ ID NO: 217065 - DNA, 25 bp, SARS Virus
ctttaaaggtaaggaaacacaccaa

SEQ ID NO: 217066 - DNA, 25 bp, SARS Virus
tttaaaggtaaagaaacacaccaaa

SEQ ID NO: 217067 - DNA, 25 bp, SARS Virus
ttaaaggtaaaggaacacaccaaat

SEQ ID NO: 217068 - DNA, 25 bp, SARS Virus
taaaggtaaagagacacaccaaatt

SEQ ID NO: 217069 - DNA, 25 bp, SARS Virus
aaaggtaaagaagcacaccaaattt

SEQ ID NO: 217070 - DNA, 25 bp, SARS Virus
aaggtaaagaaagacaccaaatttc

SEQ ID NO: 217071 - DNA, 25 bp, SARS Virus
aggtaaagaaacgcaccaaatttcg

SEQ ID NO: 217072 - DNA, 25 bp, SARS Virus
ggtaaagaaacagaccaaatttcgt

SEQ ID NO: 217073 - DNA, 25 bp, SARS Virus
gtaaagaaacacgccaaatttcgtc

SEQ ID NO: 217074 - DNA, 25 bp, SARS Virus
taaagaaacacagcaaatttcgtct

SEQ ID NO: 217075 - DNA, 25 bp, SARS Virus
aaagaaacacacgaaatttcgtctg

SEQ ID NO: 217076 - DNA, 25 bp, SARS Virus
aagaaacacaccgaatttcgtctgt

SEQ ID NO: 217077 - DNA, 25 bp, SARS Virus
agaaacacaccagatttcgtctgta

SEQ ID NO: 217078 - DNA, 25 bp, SARS Virus
gaaacacaccaagtttcgtctgtac

SEQ ID NO: 217079 - DNA, 25 bp, SARS Virus
aaacacaccaaagttcgtctgtaca

SEQ ID NO: 217080 - DNA, 25 bp, SARS Virus
aacacaccaaatgtcgtctgtacat

SEQ ID NO: 217081 - DNA, 25 bp, SARS Virus
acacaccaaattgcgtctgtacatg

SEQ ID NO: 217082 - DNA, 25 bp, SARS Virus
cacaccaaatttggtctgtacatgg

SEQ ID NO: 217083 - DNA, 25 bp, SARS Virus
acaccaaatttcgtctgtacatgga

SEQ ID NO: 217084 - DNA, 25 bp, SARS Virus
caccaaatttcggctgtacatggat

SEQ ID NO: 217085 - DNA, 25 bp, SARS Virus
accaaatttcgtgtgtacatggatg

SEQ ID NO: 217086 - DNA, 25 bp, SARS Virus
ccaaatttcgtcggtacatggatgg

SEQ ID NO: 217087 - DNA, 25 bp, SARS Virus
caaatttcgtctgtacatggatggt

SEQ ID NO: 217088 - DNA, 25 bp, SARS Virus
aaatttcgtctggacatggatggtt

SEQ ID NO: 217089 - DNA, 25 bp, SARS Virus
aatttcgtctgtgcatggatggttc

SEQ ID NO: 217090 - DNA, 25 bp, SARS Virus
atttcgtctgtagatggatggttct

SEQ ID NO: 217091 - DNA, 25 bp, SARS Virus
tttcgtctgtacgtggatggttctt

SEQ ID NO: 217092 - DNA, 25 bp, SARS Virus
ttcgtctgtacagggatggttcttt

SEQ ID NO: 217093 - DNA, 25 bp, SARS Virus
tcgtctgtacatggatggttctttt

SEQ ID NO: 217094 - DNA, 25 bp, SARS Virus
cgtctgtacatggatggttcttttg

SEQ ID NO: 217095 - DNA, 25 bp, SARS Virus
gtctgtacatgggtggttcttttga

SEQ ID NO: 217096 - DNA, 25 bp, SARS Virus
tctgtacatggagggttcttttgag

SEQ ID NO: 217097 - DNA, 25 bp, SARS Virus
ctgtacatggatggttcttttgaga

SEQ ID NO: 217098 - DNA, 25 bp, SARS Virus
tgtacatggatggttcttttgagag

SEQ ID NO: 217099 - DNA, 25 bp, SARS Virus
gtacatggatgggtcttttgagagt

SEQ ID NO: 217100 - DNA, 25 bp, SARS Virus
tacatggatggtgcttttgagagta

SEQ ID NO: 217101 - DNA, 25 bp, SARS Virus
acatggatggttgttttgagagtag

SEQ ID NO: 217102 - DNA, 25 bp, SARS Virus
catggatggttcgtttgagagtagt

SEQ ID NO: 217103 - DNA, 25 bp, SARS Virus
atggatggttctgttgagagtagtt

SEQ ID NO: 217104 - DNA, 25 bp, SARS Virus
tggatggttcttgtgagagtagttc

SEQ ID NO: 217105 - DNA, 25 bp, SARS Virus
ggatggttctttggagagtagttct

SEQ ID NO: 217106 - DNA, 25 bp, SARS Virus
gatggttcttttgagagtagttctc

SEQ ID NO: 217107 - DNA, 25 bp, SARS Virus
atggttcttttgggagtagttctca

SEQ ID NO: 217108 - DNA, 25 bp, SARS Virus
tggttcttttgagagtagttctcat

SEQ ID NO: 217109 - DNA, 25 bp, SARS Virus
ggttcttttgagggtagttctcata

SEQ ID NO: 217110 - DNA, 25 bp, SARS Virus
gttcttttgagagtagttctcatac

SEQ ID NO: 217111 - DNA, 25 bp, SARS Virus
ttcttttgagaggagttctcatacc

SEQ ID NO: 217112 - DNA, 25 bp, SARS Virus
tcttttgagagtggttctcatacca

SEQ ID NO: 217113 - DNA, 25 bp, SARS Virus
cttttgagagtagttctcataccat

SEQ ID NO: 217114 - DNA, 25 bp, SARS Virus
ttttgagagtaggtctcataccatc

SEQ ID NO: 217115 - DNA, 25 bp, SARS Virus
tttgagagtagtgctcataccatca

SEQ ID NO: 217116 - DNA, 25 bp, SARS Virus
ttgagagtagttgtcataccatcat

SEQ ID NO: 217117 - DNA, 25 bp, SARS Virus
tgagagtagttcgcataccatcatg

SEQ ID NO: 217118 - DNA, 25 bp, SARS Virus
gagagtagttctgataccatcatga

SEQ ID NO: 217119 - DNA, 25 bp, SARS Virus
agagtagttctcgtaccatcatgag

SEQ ID NO: 217120 - DNA, 25 bp, SARS Virus
gagtagttctcagaccatcatgagc

SEQ ID NO: 217121 - DNA, 25 bp, SARS Virus
agtagttctcatgccatcatgagct

SEQ ID NO: 217122 - DNA, 25 bp, SARS Virus
gtagttctcatagcatcatgagctt

SEQ ID NO: 217123 - DNA, 25 bp, SARS Virus
tagttctcatacgatcatgagcttt

SEQ ID NO: 217124 - DNA, 25 bp, SARS Virus
agttctcataccgtcatgagctttc

SEQ ID NO: 217125 - DNA, 25 bp, SARS Virus
gttctcataccagcatgagctttcg

SEQ ID NO: 217126 - DNA, 25 bp, SARS Virus
ttctcataccatgatgagctttcga

SEQ ID NO: 217127 - DNA, 25 bp, SARS Virus
tctcataccatcgtgagctttcgaa

SEQ ID NO: 217128 - DNA, 25 bp, SARS Virus
ctcataccatcaggagctttcgaag

SEQ ID NO: 217129 - DNA, 25 bp, SARS Virus
tcataccatcatgagctttcgaagt

SEQ ID NO: 217130 - DNA, 25 bp, SARS Virus
cataccatcatgggctttcgaagtg

SEQ ID NO: 217131 - DNA, 25 bp, SARS Virus
ataccatcatgagctttcgaagtga

SEQ ID NO: 217132 - DNA, 25 bp, SARS Virus
taccatcatgaggtttcgaagtgat

SEQ ID NO: 217133 - DNA, 25 bp, SARS Virus
accatcatgagcgttcgaagtgatg

SEQ ID NO: 217134 - DNA, 25 bp, SARS Virus
ccatcatgagctgtcgaagtgatgc

SEQ ID NO: 217135 - DNA, 25 bp, SARS Virus
catcatgagcttgcgaagtgatgca

SEQ ID NO: 217136 - DNA, 25 bp, SARS Virus
atcatgagctttggaagtgatgcat

SEQ ID NO: 217137 - DNA, 25 bp, SARS Virus
tcatgagctttcgaagtgatgcatc

SEQ ID NO: 217138 - DNA, 25 bp, SARS Virus
catgagctttcggagtgatgcatca

SEQ ID NO: 217139 - DNA, 25 bp, SARS Virus
atgagctttcgaggtgatgcatcac

SEQ ID NO: 217140 - DNA, 25 bp, SARS Virus
tgagctttcgaagtgatgcatcaca

SEQ ID NO: 217141 - DNA, 25 bp, SARS Virus
gagctttcgaagggatgcatcacac

SEQ ID NO: 217142 - DNA, 25 bp, SARS Virus
agctttcgaagtgatgcatcacaca

SEQ ID NO: 217143 - DNA, 25 bp, SARS Virus
gctttcgaagtggtgcatcacacag

SEQ ID NO: 217144 - DNA, 25 bp, SARS Virus
ctttcgaagtgaggcatcacacagt

SEQ ID NO: 217145 - DNA, 25 bp, SARS Virus
tttcgaagtgatgcatcacacagta

SEQ ID NO: 217146 - DNA, 25 bp, SARS Virus
ttcgaagtgatggatcacacagtag

SEQ ID NO: 217147 - DNA, 25 bp, SARS Virus
tcgaagtgatgcgtcacacagtagt

SEQ ID NO: 217148 - DNA, 25 bp, SARS Virus
cgaagtgatgcagcacacagtagtg

SEQ ID NO: 217149 - DNA, 25 bp, SARS Virus
gaagtgatgcatgacacagtagtga

SEQ ID NO: 217150 - DNA, 25 bp, SARS Virus
aagtgatgcatcgcacagtagtgat

SEQ ID NO: 217151 - DNA, 25 bp, SARS Virus
agtgatgcatcagacagtagtgatc

SEQ ID NO: 217152 - DNA, 25 bp, SARS Virus
gtgatgcatcacgcagtagtgatcc

SEQ ID NO: 217153 - DNA, 25 bp, SARS Virus
tgatgcatcacagagtagtgatcca

SEQ ID NO: 217154 - DNA, 25 bp, SARS Virus
gatgcatcacacggtagtgatccat

SEQ ID NO: 217155 - DNA, 25 bp, SARS Virus
atgcatcacacagtagtgatccatc

SEQ ID NO: 217156 - DNA, 25 bp, SARS Virus
tgcatcacacaggagtgatccatca

SEQ ID NO: 217157 - DNA, 25 bp, SARS Virus
gcatcacacagtggtgatccatcat

SEQ ID NO: 217158 - DNA, 25 bp, SARS Virus
catcacacagtagtgatccatcatg

SEQ ID NO: 217159 - DNA, 25 bp, SARS Virus
atcacacagtagggatccatcatgt

SEQ ID NO: 217160 - DNA, 25 bp, SARS Virus
tcacacagtagtgatccatcatgtt

SEQ ID NO: 217161 - DNA, 25 bp, SARS Virus
cacacagtagtggtccatcatgttt

SEQ ID NO: 217162 - DNA, 25 bp, SARS Virus
acacagtagtgagccatcatgtttc

SEQ ID NO: 217163 - DNA, 25 bp, SARS Virus
cacagtagtgatgcatcatgtttct

SEQ ID NO: 217164 - DNA, 25 bp, SARS Virus
acagtagtgatcgatcatgtttctt

SEQ ID NO: 217165 - DNA, 25 bp, SARS Virus
cagtagtgatccgtcatgtttcttt

SEQ ID NO: 217166 - DNA, 25 bp, SARS Virus
agtagtgatccagcatgtttctttc

SEQ ID NO: 217167 - DNA, 25 bp, SARS Virus
gtagtgatccatgatgtttctttca

SEQ ID NO: 217168 - DNA, 25 bp, SARS Virus
tagtgatccatcgtgtttctttcag

SEQ ID NO: 217169 - DNA, 25 bp, SARS Virus
agtgatccatcaggtttctttcaga

SEQ ID NO: 217170 - DNA, 25 bp, SARS Virus
gtgatccatcatgtttctttcagaa

SEQ ID NO: 217171 - DNA, 25 bp, SARS Virus
tgatccatcatggttctttcagaat

SEQ ID NO: 217172 - DNA, 25 bp, SARS Virus
gatccatcatgtgtctttcagaatg

SEQ ID NO: 217173 - DNA, 25 bp, SARS Virus
atccatcatgttgctttcagaatgg

SEQ ID NO: 217174 - DNA, 25 bp, SARS Virus
tccatcatgtttgtttcagaatggg

SEQ ID NO: 217175 - DNA, 25 bp, SARS Virus
ccatcatgtttcgttcagaatggga

SEQ ID NO: 217176 - DNA, 25 bp, SARS Virus
catcatgtttctgtcagaatgggag

SEQ ID NO: 217177 - DNA, 25 bp, SARS Virus
atcatgtttcttgcagaatgggagt

SEQ ID NO: 217178 - DNA, 25 bp, SARS Virus
tcatgtttctttgagaatgggagta

SEQ ID NO: 217179 - DNA, 25 bp, SARS Virus
catgtttctttcggaatgggagtac

SEQ ID NO: 217180 - DNA, 25 bp, SARS Virus
atgtttctttcagaatgggagtact

SEQ ID NO: 217181 - DNA, 25 bp, SARS Virus
tgtttctttcaggatgggagtacta

SEQ ID NO: 217182 - DNA, 25 bp, SARS Virus
gtttctttcagagtgggagtactaa

SEQ ID NO: 217183 - DNA, 25 bp, SARS Virus
tttctttcagaaggggagtactaaa

SEQ ID NO: 217184 - DNA, 25 bp, SARS Virus
ttctttcagaatgggagtactaaat

SEQ ID NO: 217185 - DNA, 25 bp, SARS Virus
tctttcagaatgggagtactaaatg

SEQ ID NO: 217186 - DNA, 25 bp, SARS Virus
ctttcagaatgggagtactaaatgt

SEQ ID NO: 217187 - DNA, 25 bp, SARS Virus
tttcagaatgggggtactaaatgta

SEQ ID NO: 217188 - DNA, 25 bp, SARS Virus
ttcagaatgggagtactaaatgtac

SEQ ID NO: 217189 - DNA, 25 bp, SARS Virus
tcagaatgggaggactaaatgtact

SEQ ID NO: 217190 - DNA, 25 bp, SARS Virus
cagaatgggagtgctaaatgtactc

SEQ ID NO: 217191 - DNA, 25 bp, SARS Virus
agaatgggagtagtaaatgtactcc

SEQ ID NO: 217192 - DNA, 25 bp, SARS Virus
gaatgggagtacgaaatgtactcca

SEQ ID NO: 217193 - DNA, 25 bp, SARS Virus
ctaatagtattctatctcatgggta

SEQ ID NO: 217194 - DNA, 25 bp, SARS Virus
taatagtattctttctcatgggtat

SEQ ID NO: 217195 - DNA, 25 bp, SARS Virus
aatagtattctatctcatgggtata

SEQ ID NO: 217196 - DNA, 25 bp, SARS Virus
atagtattctatttcatgggtatat

SEQ ID NO: 217197 - DNA, 25 bp, SARS Virus
tagtattctatctcatgggtatatg

SEQ ID NO: 217198 - DNA, 25 bp, SARS Virus
agtattctatcttatgggtatatgt

SEQ ID NO: 217199 - DNA, 25 bp, SARS Virus
gtattctatctcttgggtatatgta

SEQ ID NO: 217200 - DNA, 25 bp, SARS Virus
tattctatctcatgggtatatgtag

SEQ ID NO: 217201 - DNA, 25 bp, SARS Virus
attctatctcattggtatatgtagt

SEQ ID NO: 217202 - DNA, 25 bp, SARS Virus
ttctatctcatgtgtatatgtagtg

SEQ ID NO: 217203 - DNA, 25 bp, SARS Virus
tctatctcatggttatatgtagtgt

SEQ ID NO: 217204 - DNA, 25 bp, SARS Virus
ctatctcatgggtatatgtagtgtc

SEQ ID NO: 217205 - DNA, 25 bp, SARS Virus
tatctcatgggtttatgtagtgtcg

SEQ ID NO: 217206 - DNA, 25 bp, SARS Virus
atctcatgggtatatgtagtgtcga

SEQ ID NO: 217207 - DNA, 25 bp, SARS Virus
tctcatgggtatttgtagtgtcgaa

SEQ ID NO: 217208 - DNA, 25 bp, SARS Virus
ctcatgggtatatgtagtgtcgaag

SEQ ID NO: 217209 - DNA, 25 bp, SARS Virus
tcatgggtatatttagtgtcgaaga

SEQ ID NO: 217210 - DNA, 25 bp, SARS Virus
catgggtatatgtagtgtcgaagat

SEQ ID NO: 217211 - DNA, 25 bp, SARS Virus
atgggtatatgttgtgtcgaagatg

SEQ ID NO: 217212 - DNA, 25 bp, SARS Virus
tgggtatatgtattgtcgaagatgt

SEQ ID NO: 217213 - DNA, 25 bp, SARS Virus
gggtatatgtagtgtcgaagatgtg

SEQ ID NO: 217214 - DNA, 25 bp, SARS Virus
ggtatatgtagtttcgaagatgtgg

SEQ ID NO: 217215 - DNA, 25 bp, SARS Virus
gtatatgtagtgtcgaagatgtggg

SEQ ID NO: 217216 - DNA, 25 bp, SARS Virus
tatatgtagtgttgaagatgtgggc

SEQ ID NO: 217217 - DNA, 25 bp, SARS Virus
atatgtagtgtctaagatgtgggca

SEQ ID NO: 217218 - DNA, 25 bp, SARS Virus
tatgtagtgtcgtagatgtgggcaa

SEQ ID NO: 217219 - DNA, 25 bp, SARS Virus
atgtagtgtcgatgatgtgggcaat

SEQ ID NO: 217220 - DNA, 25 bp, SARS Virus
tgtagtgtcgaatatgtgggcaatt

SEQ ID NO: 217221 - DNA, 25 bp, SARS Virus
gtagtgtcgaagttgtgggcaattc

SEQ ID NO: 217222 - DNA, 25 bp, SARS Virus
tagtgtcgaagatgtgggcaattcc

SEQ ID NO: 217223 - DNA, 25 bp, SARS Virus
agtgtcgaagatttgggcaattcca

SEQ ID NO: 217224 - DNA, 25 bp, SARS Virus
gtgtcgaagatgtgggcaattccat

SEQ ID NO: 217225 - DNA, 25 bp, SARS Virus
tgtcgaagatgttggcaattccatc

SEQ ID NO: 217226 - DNA, 25 bp, SARS Virus
gtcgaagatgtgtgcaattccatca

SEQ ID NO: 217227 - DNA, 25 bp, SARS Virus
tcgaagatgtggtcaattccatcat

SEQ ID NO: 217228 - DNA, 25 bp, SARS Virus
cgaagatgtgggtaattccatcatc

SEQ ID NO: 217229 - DNA, 25 bp, SARS Virus
gaagatgtgggctattccatcatca

SEQ ID NO: 217230 - DNA, 25 bp, SARS Virus
aagatgtgggcatttccatcatcaa

SEQ ID NO: 217231 - DNA, 25 bp, SARS Virus
agatgtgggcaattccatcatcaaa

SEQ ID NO: 217232 - DNA, 25 bp, SARS Virus
gatgtgggcaattccatcatcaaaa

SEQ ID NO: 217233 - DNA, 25 bp, SARS Virus
atgtgggcaatttcatcatcaaaag

SEQ ID NO: 217234 - DNA, 25 bp, SARS Virus
tgtgggcaattctatcatcaaaaga

SEQ ID NO: 217235 - DNA, 25 bp, SARS Virus
gtgggcaattccttcatcaaaagac

SEQ ID NO: 217236 - DNA, 25 bp, SARS Virus
tgggcaattccatcatcaaaagact

SEQ ID NO: 217237 - DNA, 25 bp, SARS Virus
gggcaattccattatcaaaagactg

SEQ ID NO: 217238 - DNA, 25 bp, SARS Virus
ggcaattccatcttcaaaagactgg

SEQ ID NO: 217239 - DNA, 25 bp, SARS Virus
gcaattccatcatcaaaagactggt

SEQ ID NO: 217240 - DNA, 25 bp, SARS Virus
caattccatcattaaaagactggtg

SEQ ID NO: 217241 - DNA, 25 bp, SARS Virus
aattccatcatctaaagactggtgt

SEQ ID NO: 217242 - DNA, 25 bp, SARS Virus
attccatcatcataagactggtgtt

SEQ ID NO: 217243 - DNA, 25 bp, SARS Virus
ttccatcatcaatagactggtgtta

SEQ ID NO: 217244 - DNA, 25 bp, SARS Virus
tccatcatcaaatgactggtgttac

SEQ ID NO: 217245 - DNA, 25 bp, SARS Virus
ccatcatcaaaatactggtgttaca

SEQ ID NO: 217246 - DNA, 25 bp, SARS Virus
catcatcaaaagtctggtgttacaa

SEQ ID NO: 217247 - DNA, 25 bp, SARS Virus
atcatcaaaagattggtgttacaaa

SEQ ID NO: 217248 - DNA, 25 bp, SARS Virus
tcatcaaaagactggtgttacaaat

SEQ ID NO: 217249 - DNA, 25 bp, SARS Virus
catcaaaagacttgtgttacaaatg

SEQ ID NO: 217250 - DNA, 25 bp, SARS Virus
atcaaaagactgttgttacaaatgt

SEQ ID NO: 217251 - DNA, 25 bp, SARS Virus
tcaaaagactggtgttacaaatgtg

SEQ ID NO: 217252 - DNA, 25 bp, SARS Virus
caaaagactggttttacaaatgtgt

SEQ ID NO: 217253 - DNA, 25 bp, SARS Virus
aaaagactggtgttacaaatgtgtg

SEQ ID NO: 217254 - DNA, 25 bp, SARS Virus
aaagactggtgttacaaatgtgtgg

SEQ ID NO: 217255 - DNA, 25 bp, SARS Virus
aagactggtgtttcaaatgtgtggt

SEQ ID NO: 217256 - DNA, 25 bp, SARS Virus
agactggtgttataaatgtgtggtg

SEQ ID NO: 217257 - DNA, 25 bp, SARS Virus
gactggtgttactaatgtgtggtgt

SEQ ID NO: 217258 - DNA, 25 bp, SARS Virus
actggtgttacatatgtgtggtgta

SEQ ID NO: 217259 - DNA, 25 bp, SARS Virus
ctggtgttacaattgtgtggtgtaa

SEQ ID NO: 217260 - DNA, 25 bp, SARS Virus
tggtgttacaaatgtgtggtgtaat

SEQ ID NO: 217261 - DNA, 25 bp, SARS Virus
ggtgttacaaatttgtggtgtaatt

SEQ ID NO: 217262 - DNA, 25 bp, SARS Virus
gtgttacaaatgtgtggtgtaattc

SEQ ID NO: 217263 - DNA, 25 bp, SARS Virus
tgttacaaatgtttggtgtaattct

SEQ ID NO: 217264 - DNA, 25 bp, SARS Virus
gttacaaatgtgtggtgtaattctt

SEQ ID NO: 217265 - DNA, 25 bp, SARS Virus
ttacaaatgtgttgtgtaattcttg

SEQ ID NO: 217266 - DNA, 25 bp, SARS Virus
tacaaatgtgtgttgtaattcttga

SEQ ID NO: 217267 - DNA, 25 bp, SARS Virus
acaaatgtgtggtgtaattcttgag

SEQ ID NO: 217268 - DNA, 25 bp, SARS Virus
caaatgtgtggtttaattcttgagc

SEQ ID NO: 217269 - DNA, 25 bp, SARS Virus
aaatgtgtggtgtaattcttgagcg

SEQ ID NO: 217270 - DNA, 25 bp, SARS Virus
aatgtgtggtgttattcttgagcga

SEQ ID NO: 217271 - DNA, 25 bp, SARS Virus
atgtgtggtgtatttcttgagcgaa

SEQ ID NO: 217272 - DNA, 25 bp, SARS Virus
tgtgtggtgtaattcttgagcgaaa

SEQ ID NO: 217273 - DNA, 25 bp, SARS Virus
gtgtggtgtaattcttgagcgaaac

SEQ ID NO: 217274 - DNA, 25 bp, SARS Virus
tgtggtgtaatttttgagcgaaacg

SEQ ID NO: 217275 - DNA, 25 bp, SARS Virus
gtggtgtaattcttgagcgaaacgt

SEQ ID NO: 217276 - DNA, 25 bp, SARS Virus
tggtgtaattcttgagcgaaacgtc

SEQ ID NO: 217277 - DNA, 25 bp, SARS Virus
ggtgtaattctttagcgaaacgtct

SEQ ID NO: 217278 - DNA, 25 bp, SARS Virus
gtgtaattcttgtgcgaaacgtcta

SEQ ID NO: 217279 - DNA, 25 bp, SARS Virus
tgtaattcttgatcgaaacgtctaa

SEQ ID NO: 217280 - DNA, 25 bp, SARS Virus
gtaattcttgagtgaaacgtctaag

SEQ ID NO: 217281 - DNA, 25 bp, SARS Virus
taattcttgagctaaacgtctaagg

SEQ ID NO: 217282 - DNA, 25 bp, SARS Virus
aattcttgagcgtaacgtctaaggt

SEQ ID NO: 217283 - DNA, 25 bp, SARS Virus
attcttgagcgatacgtctaaggtt

SEQ ID NO: 217284 - DNA, 25 bp, SARS Virus
ttcttgagcgaatcgtctaaggttt

SEQ ID NO: 217285 - DNA, 25 bp, SARS Virus
tcttgagcgaaatgtctaaggttta

SEQ ID NO: 217286 - DNA, 25 bp, SARS Virus
cttgagcgaaacttctaaggtttaa

SEQ ID NO: 217287 - DNA, 25 bp, SARS Virus
ttgagcgaaacgtctaaggtttaat

SEQ ID NO: 217288 - DNA, 25 bp, SARS Virus
tgagcgaaacgtttaaggtttaatc

SEQ ID NO: 217289 - DNA, 25 bp, SARS Virus
gagcgaaacgtctaaggtttaatcg

SEQ ID NO: 217290 - DNA, 25 bp, SARS Virus
agcgaaacgtcttaggtttaatcgt

SEQ ID NO: 217291 - DNA, 25 bp, SARS Virus
gcgaaacgtctatggtttaatcgta

SEQ ID NO: 217292 - DNA, 25 bp, SARS Virus
cgaaacgtctaatgtttaatcgtac

SEQ ID NO: 217293 - DNA, 25 bp, SARS Virus
gaaacgtctaagttttaatcgtacg

SEQ ID NO: 217294 - DNA, 25 bp, SARS Virus
aaacgtctaaggtttaatcgtacga

SEQ ID NO: 217295 - DNA, 25 bp, SARS Virus
aacgtctaaggtttaatcgtacgac

SEQ ID NO: 217296 - DNA, 25 bp, SARS Virus
acgtctaaggtttaatcgtacgaca

SEQ ID NO: 217297 - DNA, 25 bp, SARS Virus
cgtctaaggttttatcgtacgacat

SEQ ID NO: 217298 - DNA, 25 bp, SARS Virus
gtctaaggtttattcgtacgacatc

SEQ ID NO: 217299 - DNA, 25 bp, SARS Virus
tctaaggtttaatcgtacgacatct

SEQ ID NO: 217300 - DNA, 25 bp, SARS Virus
ctaaggtttaattgtacgacatctt

SEQ ID NO: 217301 - DNA, 25 bp, SARS Virus
taaggtttaatcttacgacatcttc

SEQ ID NO: 217302 - DNA, 25 bp, SARS Virus
aaggtttaatcgtacgacatcttct

SEQ ID NO: 217303 - DNA, 25 bp, SARS Virus
aggtttaatcgttcgacatcttcta

SEQ ID NO: 217304 - DNA, 25 bp, SARS Virus
ggtttaatcgtatgacatcttctac

SEQ ID NO: 217305 - DNA, 25 bp, SARS Virus
gtttaatcgtactacatcttctacc

SEQ ID NO: 217306 - DNA, 25 bp, SARS Virus
tttaatcgtacgtcatcttctaccc

SEQ ID NO: 217307 - DNA, 25 bp, SARS Virus
ttaatcgtacgatatcttctaccca

SEQ ID NO: 217308 - DNA, 25 bp, SARS Virus
taatcgtacgacttcttctacccag

SEQ ID NO: 217309 - DNA, 25 bp, SARS Virus
aatcgtacgacatcttctacccagt

SEQ ID NO: 217310 - DNA, 25 bp, SARS Virus
atcgtacgacattttctacccagta

SEQ ID NO: 217311 - DNA, 25 bp, SARS Virus
tcgtacgacatcttctacccagtat

SEQ ID NO: 217312 - DNA, 25 bp, SARS Virus
cgtacgacatcttctacccagtatc

SEQ ID NO: 217313 - DNA, 25 bp, SARS Virus
gtacgacatcttttacccagtatca

SEQ ID NO: 217314 - DNA, 25 bp, SARS Virus
tacgacatcttctacccagtatcaa

SEQ ID NO: 217315 - DNA, 25 bp, SARS Virus
acgacatcttcttcccagtatcaaa

SEQ ID NO: 217316 - DNA, 25 bp, SARS Virus
cgacatcttctatccagtatcaaag

SEQ ID NO: 217317 - DNA, 25 bp, SARS Virus
gacatcttctactcagtatcaaaga

SEQ ID NO: 217318 - DNA, 25 bp, SARS Virus
acatcttctacctagtatcaaagag

SEQ ID NO: 217319 - DNA, 25 bp, SARS Virus
catcttctaccctgtatcaaagaga

SEQ ID NO: 217320 - DNA, 25 bp, SARS Virus
atcttctacccattatcaaagagac

SEQ ID NO: 217321 - DNA, 25 bp, SARS Virus
tcttctacccagtatcaaagagact

SEQ ID NO: 217322 - DNA, 25 bp, SARS Virus
cttctacccagtttcaaagagactg

SEQ ID NO: 217323 - DNA, 25 bp, SARS Virus
ttctacccagtatcaaagagactgt

SEQ ID NO: 217324 - DNA, 25 bp, SARS Virus
tctacccagtattaaagagactgta

SEQ ID NO: 217325 - DNA, 25 bp, SARS Virus
ctacccagtatctaagagactgtag

SEQ ID NO: 217326 - DNA, 25 bp, SARS Virus
tacccagtatcatagagactgtagt

SEQ ID NO: 217327 - DNA, 25 bp, SARS Virus
acccagtatcaatgagactgtagtg

SEQ ID NO: 217328 - DNA, 25 bp, SARS Virus
cccagtatcaaatagactgtagtgg

SEQ ID NO: 217329 - DNA, 25 bp, SARS Virus
ccagtatcaaagtgactgtagtggt

SEQ ID NO: 217330 - DNA, 25 bp, SARS Virus
cagtatcaaagatactgtagtggtt

SEQ ID NO: 217331 - DNA, 25 bp, SARS Virus
agtatcaaagagtctgtagtggttc

SEQ ID NO: 217332 - DNA, 25 bp, SARS Virus
gtatcaaagagattgtagtggttcg

SEQ ID NO: 217333 - DNA, 25 bp, SARS Virus
tatcaaagagactgtagtggttcga

SEQ ID NO: 217334 - DNA, 25 bp, SARS Virus
atcaaagagactttagtggttcgag

SEQ ID NO: 217335 - DNA, 25 bp, SARS Virus
tcaaagagactgtagtggttcgagc

SEQ ID NO: 217336 - DNA, 25 bp, SARS Virus
caaagagactgttgtggttcgagcg

SEQ ID NO: 217337 - DNA, 25 bp, SARS Virus
aaagagactgtattggttcgagcgg

SEQ ID NO: 217338 - DNA, 25 bp, SARS Virus
aagagactgtagtggttcgagcggt

SEQ ID NO: 217339 - DNA, 25 bp, SARS Virus
agagactgtagttgttcgagcggtt

SEQ ID NO: 217340 - DNA, 25 bp, SARS Virus
gagactgtagtgtttcgagcggttg

SEQ ID NO: 217341 - DNA, 25 bp, SARS Virus
agactgtagtggttcgagcggttgt

SEQ ID NO: 217342 - DNA, 25 bp, SARS Virus
gactgtagtggttcgagcggttgtc

SEQ ID NO: 217343 - DNA, 25 bp, SARS Virus
actgtagtggtttgagcggttgtca

SEQ ID NO: 217344 - DNA, 25 bp, SARS Virus
ctgtagtggttctagcggttgtcaa

SEQ ID NO: 217345 - DNA, 25 bp, SARS Virus
tgtagtggttcgtgcggttgtcaaa

SEQ ID NO: 217346 - DNA, 25 bp, SARS Virus
gtagtggttcgatcggttgtcaaaa

SEQ ID NO: 217347 - DNA, 25 bp, SARS Virus
tagtggttcgagtggttgtcaaaat

SEQ ID NO: 217348 - DNA, 25 bp, SARS Virus
agtggttcgagctgttgtcaaaata

SEQ ID NO: 217349 - DNA, 25 bp, SARS Virus
gtggttcgagcgtttgtcaaaataa

SEQ ID NO: 217350 - DNA, 25 bp, SARS Virus
tggttcgagcggttgtcaaaataat

SEQ ID NO: 217351 - DNA, 25 bp, SARS Virus
ggttcgagcggttgtcaaaataatg

SEQ ID NO: 217352 - DNA, 25 bp, SARS Virus
gttcgagcggttttcaaaataatga

SEQ ID NO: 217353 - DNA, 25 bp, SARS Virus
ttcgagcggttgtcaaaataatgac

SEQ ID NO: 217354 - DNA, 25 bp, SARS Virus
tcgagcggttgttaaaataatgaca

SEQ ID NO: 217355 - DNA, 25 bp, SARS Virus
cgagcggttgtctaaataatgacat

SEQ ID NO: 217356 - DNA, 25 bp, SARS Virus
gagcggttgtcataataatgacatt

SEQ ID NO: 217357 - DNA, 25 bp, SARS Virus
agcggttgtcaatataatgacattc

SEQ ID NO: 217358 - DNA, 25 bp, SARS Virus
gcggttgtcaaattaatgacattcg

SEQ ID NO: 217359 - DNA, 25 bp, SARS Virus
cggttgtcaaaataatgacattcgc

SEQ ID NO: 217360 - DNA, 25 bp, SARS Virus
ggttgtcaaaattatgacattcgct

SEQ ID NO: 217361 - DNA, 25 bp, SARS Virus
gttgtcaaaatattgacattcgctc

SEQ ID NO: 217362 - DNA, 25 bp, SARS Virus
ttgtcaaaataatgacattcgctca

SEQ ID NO: 217363 - DNA, 25 bp, SARS Virus
tgtcaaaataattacattcgctcat

SEQ ID NO: 217364 - DNA, 25 bp, SARS Virus
gtcaaaataatgtcattcgctcata

SEQ ID NO: 217365 - DNA, 25 bp, SARS Virus
tcaaaataatgatattcgctcatac

SEQ ID NO: 217366 - DNA, 25 bp, SARS Virus
caaaataatgactttcgctcatact

SEQ ID NO: 217367 - DNA, 25 bp, SARS Virus
aaaataatgacattcgctcatactc

SEQ ID NO: 217368 - DNA, 25 bp, SARS Virus
aaataatgacattcgctcatactca

SEQ ID NO: 217369 - DNA, 25 bp, SARS Virus
aataatgacatttgctcatactcac

SEQ ID NO: 217370 - DNA, 25 bp, SARS Virus
ataatgacattctctcatactcacg

SEQ ID NO: 217371 - DNA, 25 bp, SARS Virus
taatgacattcgttcatactcacgt

SEQ ID NO: 217372 - DNA, 25 bp, SARS Virus
aatgacattcgctcatactcacgtg

SEQ ID NO: 217373 - DNA, 25 bp, SARS Virus
atgacattcgcttatactcacgtgt

SEQ ID NO: 217374 - DNA, 25 bp, SARS Virus
tgacattcgctcttactcacgtgtt

SEQ ID NO: 217375 - DNA, 25 bp, SARS Virus
gacattcgctcatactcacgtgttt

SEQ ID NO: 217376 - DNA, 25 bp, SARS Virus
acattcgctcattctcacgtgtttt

SEQ ID NO: 217377 - DNA, 25 bp, SARS Virus
cattcgctcatattcacgtgttttc

SEQ ID NO: 217378 - DNA, 25 bp, SARS Virus
attcgctcatactcacgtgttttca

SEQ ID NO: 217379 - DNA, 25 bp, SARS Virus
ttcgctcatacttacgtgttttcaa

SEQ ID NO: 217380 - DNA, 25 bp, SARS Virus
tcgctcatactctcgtgttttcaat

SEQ ID NO: 217381 - DNA, 25 bp, SARS Virus
cgctcatactcatgtgttttcaatc

SEQ ID NO: 217382 - DNA, 25 bp, SARS Virus
gctcatactcacttgttttcaatcg

SEQ ID NO: 217383 - DNA, 25 bp, SARS Virus
ctcatactcacgtgttttcaatcgt

SEQ ID NO: 217384 - DNA, 25 bp, SARS Virus
tcatactcacgttttttcaatcgtc

SEQ ID NO: 217385 - DNA, 25 bp, SARS Virus
catactcacgtgttttcaatcgtcg

SEQ ID NO: 217386 - DNA, 25 bp, SARS Virus
atactcacgtgttttcaatcgtcgt

SEQ ID NO: 217387 - DNA, 25 bp, SARS Virus
tactcacgtgttttcaatcgtcgta

SEQ ID NO: 217388 - DNA, 25 bp, SARS Virus
actcacgtgttttcaatcgtcgtag

SEQ ID NO: 217389 - DNA, 25 bp, SARS Virus
ctcacgtgtttttaatcgtcgtagt

SEQ ID NO: 217390 - DNA, 25 bp, SARS Virus
tcacgtgttttctatcgtcgtagtg

SEQ ID NO: 217391 - DNA, 25 bp, SARS Virus
cacgtgttttcattcgtcgtagtgg

SEQ ID NO: 217392 - DNA, 25 bp, SARS Virus
acgtgttttcaatcgtcgtagtggt

SEQ ID NO: 217393 - DNA, 25 bp, SARS Virus
cgtgttttcaattgtcgtagtggtc

SEQ ID NO: 217394 - DNA, 25 bp, SARS Virus
gtgttttcaatcttcgtagtggtcg

SEQ ID NO: 217395 - DNA, 25 bp, SARS Virus
tgttttcaatcgtcgtagtggtcgt

SEQ ID NO: 217396 - DNA, 25 bp, SARS Virus
gttttcaatcgttgtagtggtcgtg

SEQ ID NO: 217397 - DNA, 25 bp, SARS Virus
ttttcaatcgtcttagtggtcgtgc

SEQ ID NO: 217398 - DNA, 25 bp, SARS Virus
tttcaatcgtcgtagtggtcgtgcc

SEQ ID NO: 217399 - DNA, 25 bp, SARS Virus
ttcaatcgtcgttgtggtcgtgccc

SEQ ID NO: 217400 - DNA, 25 bp, SARS Virus
tcaatcgtcgtattggtcgtgcccg

SEQ ID NO: 217401 - DNA, 25 bp, SARS Virus
caatcgtcgtagtggtcgtgcccga

SEQ ID NO: 217402 - DNA, 25 bp, SARS Virus
aatcgtcgtagttgtcgtgcccgag

SEQ ID NO: 217403 - DNA, 25 bp, SARS Virus
atcgtcgtagtgttcgtgcccgaga

SEQ ID NO: 217404 - DNA, 25 bp, SARS Virus
tcgtcgtagtggtcgtgcccgagat

SEQ ID NO: 217405 - DNA, 25 bp, SARS Virus
cgtcgtagtggttgtgcccgagata

SEQ ID NO: 217406 - DNA, 25 bp, SARS Virus
gtcgtagtggtcttgcccgagatat

SEQ ID NO: 217407 - DNA, 25 bp, SARS Virus
tcgtagtggtcgtgcccgagatatt

SEQ ID NO: 217408 - DNA, 25 bp, SARS Virus
cgtagtggtcgttcccgagatatta

SEQ ID NO: 217409 - DNA, 25 bp, SARS Virus
gtagtggtcgtgtccgagatattat

SEQ ID NO: 217410 - DNA, 25 bp, SARS Virus
tagtggtcgtgctcgagatattatt

SEQ ID NO: 217411 - DNA, 25 bp, SARS Virus
agtggtcgtgcctgagatattattc

SEQ ID NO: 217412 - DNA, 25 bp, SARS Virus
gtggtcgtgccctagatattattcg

SEQ ID NO: 217413 - DNA, 25 bp, SARS Virus
tggtcgtgcccgtgatattattcgg

SEQ ID NO: 217414 - DNA, 25 bp, SARS Virus
ggtcgtgcccgatatattattcgga

SEQ ID NO: 217415 - DNA, 25 bp, SARS Virus
gtcgtgcccgagttattattcggag

SEQ ID NO: 217416 - DNA, 25 bp, SARS Virus
tcgtgcccgagatattattcggaga

SEQ ID NO: 217417 - DNA, 25 bp, SARS Virus
cgtgcccgagattttattcggagaa

SEQ ID NO: 217418 - DNA, 25 bp, SARS Virus
gtgcccgagatattattcggagaac

SEQ ID NO: 217419 - DNA, 25 bp, SARS Virus
tgcccgagatattattcggagaact

SEQ ID NO: 217420 - DNA, 25 bp, SARS Virus
gcccgagatatttttcggagaactt

SEQ ID NO: 217421 - DNA, 25 bp, SARS Virus
cccgagatattattcggagaacttc

SEQ ID NO: 217422 - DNA, 25 bp, SARS Virus
ccgagatattattcggagaacttca

SEQ ID NO: 217423 - DNA, 25 bp, SARS Virus
cgagatattatttggagaacttcac

SEQ ID NO: 217424 - DNA, 25 bp, SARS Virus
gagatattattctgagaacttcacg

SEQ ID NO: 217425 - DNA, 25 bp, SARS Virus
agatattattcgtagaacttcacga

SEQ ID NO: 217426 - DNA, 25 bp, SARS Virus
gatattattcggtgaacttcacgac

SEQ ID NO: 217427 - DNA, 25 bp, SARS Virus
atattattcggataacttcacgacc

SEQ ID NO: 217428 - DNA, 25 bp, SARS Virus
tattattcggagtacttcacgacca

SEQ ID NO: 217429 - DNA, 25 bp, SARS Virus
attattcggagatcttcacgaccac

SEQ ID NO: 217430 - DNA, 25 bp, SARS Virus
ttattcggagaatttcacgaccacg

SEQ ID NO: 217431 - DNA, 25 bp, SARS Virus
tattcggagaacttcacgaccacgt

SEQ ID NO: 217432 - DNA, 25 bp, SARS Virus
attcggagaacttcacgaccacgta

SEQ ID NO: 217433 - DNA, 25 bp, SARS Virus
ttcggagaactttacgaccacgtaa

SEQ ID NO: 217434 - DNA, 25 bp, SARS Virus
tcggagaacttctcgaccacgtaac

SEQ ID NO: 217435 - DNA, 25 bp, SARS Virus
cggagaacttcatgaccacgtaact

SEQ ID NO: 217436 - DNA, 25 bp, SARS Virus
ggagaacttcactaccacgtaactt

SEQ ID NO: 217437 - DNA, 25 bp, SARS Virus
gagaacttcacgtccacgtaactta

SEQ ID NO: 217438 - DNA, 25 bp, SARS Virus
agaacttcacgatcacgtaacttaa

SEQ ID NO: 217439 - DNA, 25 bp, SARS Virus
gaacttcacgactacgtaacttaaa

SEQ ID NO: 217440 - DNA, 25 bp, SARS Virus
aacttcacgacctcgtaacttaaac

SEQ ID NO: 217441 - DNA, 25 bp, SARS Virus
acttcacgaccatgtaacttaaact

SEQ ID NO: 217442 - DNA, 25 bp, SARS Virus
cttcacgaccacttaacttaaactg

SEQ ID NO: 217443 - DNA, 25 bp, SARS Virus
ttcacgaccacgtaacttaaactga

SEQ ID NO: 217444 - DNA, 25 bp, SARS Virus
tcacgaccacgttacttaaactgaa

SEQ ID NO: 217445 - DNA, 25 bp, SARS Virus
cacgaccacgtatcttaaactgaag

SEQ ID NO: 217446 - DNA, 25 bp, SARS Virus
acgaccacgtaatttaaactgaagt

SEQ ID NO: 217447 - DNA, 25 bp, SARS Virus
cgaccacgtaacttaaactgaagtt

SEQ ID NO: 217448 - DNA, 25 bp, SARS Virus
gaccacgtaacttaaactgaagttc

SEQ ID NO: 217449 - DNA, 25 bp, SARS Virus
accacgtaactttaactgaagttcg

SEQ ID NO: 217450 - DNA, 25 bp, SARS Virus
ccacgtaacttatactgaagttcga

SEQ ID NO: 217451 - DNA, 25 bp, SARS Virus
cacgtaacttaatctgaagttcgac

SEQ ID NO: 217452 - DNA, 25 bp, SARS Virus
acgtaacttaaattgaagttcgaca

SEQ ID NO: 217453 - DNA, 25 bp, SARS Virus
cgtaacttaaactgaagttcgacaa

SEQ ID NO: 217454 - DNA, 25 bp, SARS Virus
gtaacttaaacttaagttcgacaac

SEQ ID NO: 217455 - DNA, 25 bp, SARS Virus
taacttaaactgtagttcgacaact

SEQ ID NO: 217456 - DNA, 25 bp, SARS Virus
aacttaaactgatgttcgacaactt

SEQ ID NO: 217457 - DNA, 25 bp, SARS Virus
acttaaactgaatttcgacaacttc

SEQ ID NO: 217458 - DNA, 25 bp, SARS Virus
cttaaactgaagttcgacaacttca

SEQ ID NO: 217459 - DNA, 25 bp, SARS Virus
ttaaactgaagttcgacaacttcac

SEQ ID NO: 217460 - DNA, 25 bp, SARS Virus
taaactgaagtttgacaacttcacg

SEQ ID NO: 217461 - DNA, 25 bp, SARS Virus
aaactgaagttctacaacttcacga

SEQ ID NO: 217462 - DNA, 25 bp, SARS Virus
aactgaagttcgtcaacttcacgat

SEQ ID NO: 217463 - DNA, 25 bp, SARS Virus
actgaagttcgataacttcacgatt

SEQ ID NO: 217464 - DNA, 25 bp, SARS Virus
ctgaagttcgactacttcacgatta

SEQ ID NO: 217465 - DNA, 25 bp, SARS Virus
tgaagttcgacatcttcacgattat

SEQ ID NO: 217466 - DNA, 25 bp, SARS Virus
gaagttcgacaatttcacgattatt

SEQ ID NO: 217467 - DNA, 25 bp, SARS Virus
aagttcgacaacttcacgattattt

SEQ ID NO: 217468 - DNA, 25 bp, SARS Virus
agttcgacaacttcacgattatttt

SEQ ID NO: 217469 - DNA, 25 bp, SARS Virus
gttcgacaactttacgattattttg

SEQ ID NO: 217470 - DNA, 25 bp, SARS Virus
ttcgacaacttctcgattattttgt

SEQ ID NO: 217471 - DNA, 25 bp, SARS Virus
tcgacaacttcatgattattttgtg

SEQ ID NO: 217472 - DNA, 25 bp, SARS Virus
cgacaacttcactattattttgtga

SEQ ID NO: 217473 - DNA, 25 bp, SARS Virus
gacaacttcacgtttattttgtgat

SEQ ID NO: 217474 - DNA, 25 bp, SARS Virus
acaacttcacgattattttgtgatc

SEQ ID NO: 217475 - DNA, 25 bp, SARS Virus
caacttcacgattattttgtgatct

SEQ ID NO: 217476 - DNA, 25 bp, SARS Virus
aacttcacgatttttttgtgatctg

SEQ ID NO: 217477 - DNA, 25 bp, SARS Virus
acttcacgattattttgtgatctgt

SEQ ID NO: 217478 - DNA, 25 bp, SARS Virus
cttcacgattattttgtgatctgtt

SEQ ID NO: 217479 - DNA, 25 bp, SARS Virus
ttcacgattattttgtgatctgttt

SEQ ID NO: 217480 - DNA, 25 bp, SARS Virus
tcacgattattttgtgatctgttta

SEQ ID NO: 217481 - DNA, 25 bp, SARS Virus
cacgattattttttgatctgtttat

SEQ ID NO: 217482 - DNA, 25 bp, SARS Virus
acgattattttgtgatctgtttatt

SEQ ID NO: 217483 - DNA, 25 bp, SARS Virus
cgattattttgttatctgtttattg

SEQ ID NO: 217484 - DNA, 25 bp, SARS Virus
gattattttgtgttctgtttattgt

SEQ ID NO: 217485 - DNA, 25 bp, SARS Virus
attattttgtgatctgtttattgtt

SEQ ID NO: 217486 - DNA, 25 bp, SARS Virus
ttattttgtgatttgtttattgtta

SEQ ID NO: 217487 - DNA, 25 bp, SARS Virus
tattttgtgatctgtttattgttaa

SEQ ID NO: 217488 - DNA, 25 bp, SARS Virus
attttgtgatctttttattgttaac

SEQ ID NO: 217489 - DNA, 25 bp, SARS Virus
ttttgtgatctgtttattgttaaca

SEQ ID NO: 217490 - DNA, 25 bp, SARS Virus
tttgtgatctgtttattgttaacaa

SEQ ID NO: 217491 - DNA, 25 bp, SARS Virus
ttgtgatctgtttattgttaacaat

SEQ ID NO: 217492 - DNA, 25 bp, SARS Virus
tgtgatctgttttttgttaacaata

SEQ ID NO: 217493 - DNA, 25 bp, SARS Virus
gtgatctgtttattgttaacaatag

SEQ ID NO: 217494 - DNA, 25 bp, SARS Virus
tgatctgtttattgttaacaatagt

SEQ ID NO: 217495 - DNA, 25 bp, SARS Virus
gatctgtttatttttaacaatagtc

SEQ ID NO: 217496 - DNA, 25 bp, SARS Virus
atctgtttattgttaacaatagtcg

SEQ ID NO: 217497 - DNA, 25 bp, SARS Virus
tctgtttattgttaacaatagtcgg

SEQ ID NO: 217498 - DNA, 25 bp, SARS Virus
ctgtttattgtttacaatagtcggg

SEQ ID NO: 217499 - DNA, 25 bp, SARS Virus
tgtttattgttatcaatagtcgggt

SEQ ID NO: 217500 - DNA, 25 bp, SARS Virus
gtttattgttaataatagtcgggta

SEQ ID NO: 217501 - DNA, 25 bp, SARS Virus
tttattgttaactatagtcgggtaa

SEQ ID NO: 217502 - DNA, 25 bp, SARS Virus
ttattgttaacattagtcgggtaaa

SEQ ID NO: 217503 - DNA, 25 bp, SARS Virus
tattgttaacaatagtcgggtaaat

SEQ ID NO: 217504 - DNA, 25 bp, SARS Virus
attgttaacaattgtcgggtaaatt

SEQ ID NO: 217505 - DNA, 25 bp, SARS Virus
ttgttaacaatattcgggtaaatta

SEQ ID NO: 217506 - DNA, 25 bp, SARS Virus
tgttaacaatagtcgggtaaattaa

SEQ ID NO: 217507 - DNA, 25 bp, SARS Virus
gttaacaatagttgggtaaattaac

SEQ ID NO: 217508 - DNA, 25 bp, SARS Virus
ttaacaatagtctggtaaattaact

SEQ ID NO: 217509 - DNA, 25 bp, SARS Virus
taacaatagtcgtgtaaattaactt

SEQ ID NO: 217510 - DNA, 25 bp, SARS Virus
aacaatagtcggttaaattaacttc

SEQ ID NO: 217511 - DNA, 25 bp, SARS Virus
acaatagtcgggtaaattaacttca

SEQ ID NO: 217512 - DNA, 25 bp, SARS Virus
caatagtcgggttaattaacttcaa

SEQ ID NO: 217513 - DNA, 25 bp, SARS Virus
aatagtcgggtatattaacttcaat

SEQ ID NO: 217514 - DNA, 25 bp, SARS Virus
atagtcgggtaatttaacttcaatt

SEQ ID NO: 217515 - DNA, 25 bp, SARS Virus
tagtcgggtaaattaacttcaattt

SEQ ID NO: 217516 - DNA, 25 bp, SARS Virus
agtcgggtaaattaacttcaatttg

SEQ ID NO: 217517 - DNA, 25 bp, SARS Virus
gtcgggtaaatttacttcaatttgg

SEQ ID NO: 217518 - DNA, 25 bp, SARS Virus
tcgggtaaattatcttcaatttggt

SEQ ID NO: 217519 - DNA, 25 bp, SARS Virus
cgggtaaattaatttcaatttggtg

SEQ ID NO: 217520 - DNA, 25 bp, SARS Virus
gggtaaattaacttcaatttggtgg

SEQ ID NO: 217521 - DNA, 25 bp, SARS Virus
ggtaaattaacttcaatttggtggt

SEQ ID NO: 217522 - DNA, 25 bp, SARS Virus
gtaaattaactttaatttggtggtt

SEQ ID NO: 217523 - DNA, 25 bp, SARS Virus
taaattaacttctatttggtggttg

SEQ ID NO: 217524 - DNA, 25 bp, SARS Virus
aaattaacttcattttggtggttga

SEQ ID NO: 217525 - DNA, 25 bp, SARS Virus
aattaacttcaatttggtggttgaa

SEQ ID NO: 217526 - DNA, 25 bp, SARS Virus
attaacttcaatttggtggttgaac

SEQ ID NO: 217527 - DNA, 25 bp, SARS Virus
ttaacttcaatttggtggttgaact

SEQ ID NO: 217528 - DNA, 25 bp, SARS Virus
taacttcaattttgtggttgaactc

SEQ ID NO: 217529 - DNA, 25 bp, SARS Virus
aacttcaatttgttggttgaactcc

SEQ ID NO: 217530 - DNA, 25 bp, SARS Virus
acttcaatttggtggttgaactcct

SEQ ID NO: 217531 - DNA, 25 bp, SARS Virus
cttcaatttggttgttgaactcctt

SEQ ID NO: 217532 - DNA, 25 bp, SARS Virus
ttcaatttggtgtttgaactccttt

SEQ ID NO: 217533 - DNA, 25 bp, SARS Virus
tcaatttggtggttgaactccttta

SEQ ID NO: 217534 - DNA, 25 bp, SARS Virus
caatttggtggttgaactcctttaa

SEQ ID NO: 217535 - DNA, 25 bp, SARS Virus
aatttggtggtttaactcctttaaa

SEQ ID NO: 217536 - DNA, 25 bp, SARS Virus
atttggtggttgtactcctttaaag

SEQ ID NO: 217537 - DNA, 25 bp, SARS Virus
tttggtggttgatctcctttaaagg

SEQ ID NO: 217538 - DNA, 25 bp, SARS Virus
ttggtggttgaattcctttaaaggt

SEQ ID NO: 217539 - DNA, 25 bp, SARS Virus
tggtggttgaactcctttaaaggta

SEQ ID NO: 217540 - DNA, 25 bp, SARS Virus
ggtggttgaacttctttaaaggtaa

SEQ ID NO: 217541 - DNA, 25 bp, SARS Virus
gtggttgaactcttttaaaggtaaa

SEQ ID NO: 217542 - DNA, 25 bp, SARS Virus
tggttgaactcctttaaaggtaaag

SEQ ID NO: 217543 - DNA, 25 bp, SARS Virus
ggttgaactcctttaaaggtaaaga

SEQ ID NO: 217544 - DNA, 25 bp, SARS Virus
gttgaactcctttaaaggtaaagaa

SEQ ID NO: 217545 - DNA, 25 bp, SARS Virus
ttgaactccttttaaggtaaagaaa

SEQ ID NO: 217546 - DNA, 25 bp, SARS Virus
tgaactcctttataggtaaagaaac

SEQ ID NO: 217547 - DNA, 25 bp, SARS Virus
gaactcctttaatggtaaagaaaca

SEQ ID NO: 217548 - DNA, 25 bp, SARS Virus
aactcctttaaatgtaaagaaacac

SEQ ID NO: 217549 - DNA, 25 bp, SARS Virus
actcctttaaagttaaagaaacaca

SEQ ID NO: 217550 - DNA, 25 bp, SARS Virus
ctcctttaaaggtaaagaaacacac

SEQ ID NO: 217551 - DNA, 25 bp, SARS Virus
tcctttaaaggttaagaaacacacc

SEQ ID NO: 217552 - DNA, 25 bp, SARS Virus
cctttaaaggtatagaaacacacca

SEQ ID NO: 217553 - DNA, 25 bp, SARS Virus
ctttaaaggtaatgaaacacaccaa

SEQ ID NO: 217554 - DNA, 25 bp, SARS Virus
tttaaaggtaaataaacacaccaaa

SEQ ID NO: 217555 - DNA, 25 bp, SARS Virus
ttaaaggtaaagtaacacaccaaat

SEQ ID NO: 217556 - DNA, 25 bp, SARS Virus
taaaggtaaagatacacaccaaatt

SEQ ID NO: 217557 - DNA, 25 bp, SARS Virus
aaaggtaaagaatcacaccaaattt

SEQ ID NO: 217558 - DNA, 25 bp, SARS Virus
aaggtaaagaaatacaccaaatttc

SEQ ID NO: 217559 - DNA, 25 bp, SARS Virus
aggtaaagaaactcaccaaatttcg

SEQ ID NO: 217560 - DNA, 25 bp, SARS Virus
ggtaaagaaacataccaaatttcgt

SEQ ID NO: 217561 - DNA, 25 bp, SARS Virus
gtaaagaaacactccaaatttcgtc

SEQ ID NO: 217562 - DNA, 25 bp, SARS Virus
taaagaaacacatcaaatttcgtct

SEQ ID NO: 217563 - DNA, 25 bp, SARS Virus
aaagaaacacactaaatttcgtctg

SEQ ID NO: 217564 - DNA, 25 bp, SARS Virus
aagaaacacacctaatttcgtctgt

SEQ ID NO: 217565 - DNA, 25 bp, SARS Virus
agaaacacaccatatttcgtctgta

SEQ ID NO: 217566 - DNA, 25 bp, SARS Virus
gaaacacaccaattttcgtctgtac

SEQ ID NO: 217567 - DNA, 25 bp, SARS Virus
aaacacaccaaatttcgtctgtaca

SEQ ID NO: 217568 - DNA, 25 bp, SARS Virus
aacacaccaaatttcgtctgtacat

SEQ ID NO: 217569 - DNA, 25 bp, SARS Virus
acacaccaaatttcgtctgtacatg

SEQ ID NO: 217570 - DNA, 25 bp, SARS Virus
cacaccaaattttgtctgtacatgg

SEQ ID NO: 217571 - DNA, 25 bp, SARS Virus
acaccaaatttcttctgtacatgga

SEQ ID NO: 217572 - DNA, 25 bp, SARS Virus
caccaaatttcgtctgtacatggat

SEQ ID NO: 217573 - DNA, 25 bp, SARS Virus
accaaatttcgtttgtacatggatg

SEQ ID NO: 217574 - DNA, 25 bp, SARS Virus
ccaaatttcgtctgtacatggatgg

SEQ ID NO: 217575 - DNA, 25 bp, SARS Virus
caaatttcgtctttacatggatggt

SEQ ID NO: 217576 - DNA, 25 bp, SARS Virus
aaatttcgtctgtacatggatggtt

SEQ ID NO: 217577 - DNA, 25 bp, SARS Virus
aatttcgtctgttcatggatggttc

SEQ ID NO: 217578 - DNA, 25 bp, SARS Virus
atttcgtctgtatatggatggttct

SEQ ID NO: 217579 - DNA, 25 bp, SARS Virus
tttcgtctgtacttggatggttctt

SEQ ID NO: 217580 - DNA, 25 bp, SARS Virus
ttcgtctgtacatggatggttcttt

SEQ ID NO: 217581 - DNA, 25 bp, SARS Virus
tcgtctgtacattgatggttctttt

SEQ ID NO: 217582 - DNA, 25 bp, SARS Virus
cgtctgtacatgtatggttcttttg

SEQ ID NO: 217583 - DNA, 25 bp, SARS Virus
gtctgtacatggttggttcttttga

SEQ ID NO: 217584 - DNA, 25 bp, SARS Virus
tctgtacatggatggttcttttgag

SEQ ID NO: 217585 - DNA, 25 bp, SARS Virus
ctgtacatggattgttcttttgaga

SEQ ID NO: 217586 - DNA, 25 bp, SARS Virus
tgtacatggatgtttcttttgagag

SEQ ID NO: 217587 - DNA, 25 bp, SARS Virus
gtacatggatggttcttttgagagt

SEQ ID NO: 217588 - DNA, 25 bp, SARS Virus
tacatggatggttcttttgagagta

SEQ ID NO: 217589 - DNA, 25 bp, SARS Virus
acatggatggtttttttgagagtag

SEQ ID NO: 217590 - DNA, 25 bp, SARS Virus
catggatggttcttttgagagtagt

SEQ ID NO: 217591 - DNA, 25 bp, SARS Virus
atggatggttcttttgagagtagtt

SEQ ID NO: 217592 - DNA, 25 bp, SARS Virus
tggatggttcttttgagagtagttc

SEQ ID NO: 217593 - DNA, 25 bp, SARS Virus
ggatggttcttttgagagtagttct

SEQ ID NO: 217594 - DNA, 25 bp, SARS Virus
gatggttctttttagagtagttctc

SEQ ID NO: 217595 - DNA, 25 bp, SARS Virus
atggttcttttgtgagtagttctca

SEQ ID NO: 217596 - DNA, 25 bp, SARS Virus
tggttcttttgatagtagttctcat

SEQ ID NO: 217597 - DNA, 25 bp, SARS Virus
ggttcttttgagtgtagttctcata

SEQ ID NO: 217598 - DNA, 25 bp, SARS Virus
gttcttttgagattagttctcatac

SEQ ID NO: 217599 - DNA, 25 bp, SARS Virus
ttcttttgagagtagttctcatacc

SEQ ID NO: 217600 - DNA, 25 bp, SARS Virus
tcttttgagagttgttctcatacca

SEQ ID NO: 217601 - DNA, 25 bp, SARS Virus
cttttgagagtatttctcataccat

SEQ ID NO: 217602 - DNA, 25 bp, SARS Virus
ttttgagagtagttctcataccatc

SEQ ID NO: 217603 - DNA, 25 bp, SARS Virus
tttgagagtagttctcataccatca

SEQ ID NO: 217604 - DNA, 25 bp, SARS Virus
ttgagagtagttttcataccatcat

SEQ ID NO: 217605 - DNA, 25 bp, SARS Virus
tgagagtagttctcataccatcatg

SEQ ID NO: 217606 - DNA, 25 bp, SARS Virus
gagagtagttcttataccatcatga

SEQ ID NO: 217607 - DNA, 25 bp, SARS Virus
agagtagttctcttaccatcatgag

SEQ ID NO: 217608 - DNA, 25 bp, SARS Virus
gagtagttctcataccatcatgagc

SEQ ID NO: 217609 - DNA, 25 bp, SARS Virus
agtagttctcattccatcatgagct

SEQ ID NO: 217610 - DNA, 25 bp, SARS Virus
gtagttctcatatcatcatgagctt

SEQ ID NO: 217611 - DNA, 25 bp, SARS Virus
tagttctcatactatcatgagcttt

SEQ ID NO: 217612 - DNA, 25 bp, SARS Virus
agttctcataccttcatgagctttc

SEQ ID NO: 217613 - DNA, 25 bp, SARS Virus
gttctcataccatcatgagctttcg

SEQ ID NO: 217614 - DNA, 25 bp, SARS Virus
ttctcataccattatgagctttcga

SEQ ID NO: 217615 - DNA, 25 bp, SARS Virus
tctcataccatcttgagctttcgaa

SEQ ID NO: 217616 - DNA, 25 bp, SARS Virus
ctcataccatcatgagctttcgaag

SEQ ID NO: 217617 - DNA, 25 bp, SARS Virus
tcataccatcattagctttcgaagt

SEQ ID NO: 217618 - DNA, 25 bp, SARS Virus
cataccatcatgtgctttcgaagtg

SEQ ID NO: 217619 - DNA, 25 bp, SARS Virus
ataccatcatgatctttcgaagtga

SEQ ID NO: 217620 - DNA, 25 bp, SARS Virus
taccatcatgagttttcgaagtgat

SEQ ID NO: 217621 - DNA, 25 bp, SARS Virus
accatcatgagctttcgaagtgatg

SEQ ID NO: 217622 - DNA, 25 bp, SARS Virus
ccatcatgagctttcgaagtgatgc

SEQ ID NO: 217623 - DNA, 25 bp, SARS Virus
catcatgagctttcgaagtgatgca

SEQ ID NO: 217624 - DNA, 25 bp, SARS Virus
atcatgagcttttgaagtgatgcat

SEQ ID NO: 217625 - DNA, 25 bp, SARS Virus
tcatgagctttctaagtgatgcatc

SEQ ID NO: 217626 - DNA, 25 bp, SARS Virus
catgagctttcgtagtgatgcatca

SEQ ID NO: 217627 - DNA, 25 bp, SARS Virus
atgagctttcgatgtgatgcatcac

SEQ ID NO: 217628 - DNA, 25 bp, SARS Virus
tgagctttcgaattgatgcatcaca

SEQ ID NO: 217629 - DNA, 25 bp, SARS Virus
gagctttcgaagtgatgcatcacac

SEQ ID NO: 217630 - DNA, 25 bp, SARS Virus
agctttcgaagttatgcatcacaca

SEQ ID NO: 217631 - DNA, 25 bp, SARS Virus
gctttcgaagtgttgcatcacacag

SEQ ID NO: 217632 - DNA, 25 bp, SARS Virus
ctttcgaagtgatgcatcacacagt

SEQ ID NO: 217633 - DNA, 25 bp, SARS Virus
tttcgaagtgattcatcacacagta

SEQ ID NO: 217634 - DNA, 25 bp, SARS Virus
ttcgaagtgatgtatcacacagtag

SEQ ID NO: 217635 - DNA, 25 bp, SARS Virus
tcgaagtgatgcttcacacagtagt

SEQ ID NO: 217636 - DNA, 25 bp, SARS Virus
cgaagtgatgcatcacacagtagtg

SEQ ID NO: 217637 - DNA, 25 bp, SARS Virus
gaagtgatgcattacacagtagtga

SEQ ID NO: 217638 - DNA, 25 bp, SARS Virus
aagtgatgcatctcacagtagtgat

SEQ ID NO: 217639 - DNA, 25 bp, SARS Virus
agtgatgcatcatacagtagtgatc

SEQ ID NO: 217640 - DNA, 25 bp, SARS Virus
gtgatgcatcactcagtagtgatcc

SEQ ID NO: 217641 - DNA, 25 bp, SARS Virus
tgatgcatcacatagtagtgatcca

SEQ ID NO: 217642 - DNA, 25 bp, SARS Virus
gatgcatcacactgtagtgatccat

SEQ ID NO: 217643 - DNA, 25 bp, SARS Virus
atgcatcacacattagtgatccatc

SEQ ID NO: 217644 - DNA, 25 bp, SARS Virus
tgcatcacacagtagtgatccatca

SEQ ID NO: 217645 - DNA, 25 bp, SARS Virus
gcatcacacagttgtgatccatcat

SEQ ID NO: 217646 - DNA, 25 bp, SARS Virus
catcacacagtattgatccatcatg

SEQ ID NO: 217647 - DNA, 25 bp, SARS Virus
atcacacagtagtgatccatcatgt

SEQ ID NO: 217648 - DNA, 25 bp, SARS Virus
tcacacagtagttatccatcatgtt

SEQ ID NO: 217649 - DNA, 25 bp, SARS Virus
cacacagtagtgttccatcatgttt

SEQ ID NO: 217650 - DNA, 25 bp, SARS Virus
acacagtagtgatccatcatgtttc

SEQ ID NO: 217651 - DNA, 25 bp, SARS Virus
cacagtagtgattcatcatgtttct

SEQ ID NO: 217652 - DNA, 25 bp, SARS Virus
acagtagtgatctatcatgtttctt

SEQ ID NO: 217653 - DNA, 25 bp, SARS Virus
cagtagtgatccttcatgtttcttt

SEQ ID NO: 217654 - DNA, 25 bp, SARS Virus
agtagtgatccatcatgtttctttc

SEQ ID NO: 217655 - DNA, 25 bp, SARS Virus
gtagtgatccattatgtttctttca

SEQ ID NO: 217656 - DNA, 25 bp, SARS Virus
tagtgatccatcttgtttctttcag

SEQ ID NO: 217657 - DNA, 25 bp, SARS Virus
agtgatccatcatgtttctttcaga

SEQ ID NO: 217658 - DNA, 25 bp, SARS Virus
gtgatccatcatttttctttcagaa

SEQ ID NO: 217659 - DNA, 25 bp, SARS Virus
tgatccatcatgtttctttcagaat

SEQ ID NO: 217660 - DNA, 25 bp, SARS Virus
gatccatcatgtttctttcagaatg

SEQ ID NO: 217661 - DNA, 25 bp, SARS Virus
atccatcatgtttctttcagaatgg

SEQ ID NO: 217662 - DNA, 25 bp, SARS Virus
tccatcatgtttttttcagaatggg

SEQ ID NO: 217663 - DNA, 25 bp, SARS Virus
ccatcatgtttctttcagaatggga

SEQ ID NO: 217664 - DNA, 25 bp, SARS Virus
catcatgtttctttcagaatgggag

SEQ ID NO: 217665 - DNA, 25 bp, SARS Virus
atcatgtttctttcagaatgggagt

SEQ ID NO: 217666 - DNA, 25 bp, SARS Virus
tcatgtttcttttagaatgggagta

SEQ ID NO: 217667 - DNA, 25 bp, SARS Virus
catgtttctttctgaatgggagtac

SEQ ID NO: 217668 - DNA, 25 bp, SARS Virus
atgtttctttcataatgggagtact

SEQ ID NO: 217669 - DNA, 25 bp, SARS Virus
tgtttctttcagtatgggagtacta

SEQ ID NO: 217670 - DNA, 25 bp, SARS Virus
gtttctttcagattgggagtactaa

SEQ ID NO: 217671 - DNA, 25 bp, SARS Virus
tttctttcagaatgggagtactaaa

SEQ ID NO: 217672 - DNA, 25 bp, SARS Virus
ttctttcagaattggagtactaaat

SEQ ID NO: 217673 - DNA, 25 bp, SARS Virus
tctttcagaatgtgagtactaaatg

SEQ ID NO: 217674 - DNA, 25 bp, SARS Virus
ctttcagaatggtagtactaaatgt

SEQ ID NO: 217675 - DNA, 25 bp, SARS Virus
tttcagaatgggtgtactaaatgta

SEQ ID NO: 217676 - DNA, 25 bp, SARS Virus
ttcagaatgggattactaaatgtac

SEQ ID NO: 217677 - DNA, 25 bp, SARS Virus
tcagaatgggagtactaaatgtact

SEQ ID NO: 217678 - DNA, 25 bp, SARS Virus
cagaatgggagttctaaatgtactc

SEQ ID NO: 217679 - DNA, 25 bp, SARS Virus
agaatgggagtattaaatgtactcc

SEQ ID NO: 217680 - DNA, 25 bp, SARS Virus
gaatgggagtactaaatgtactcca

SEQ ID NO: 217681 - DNA, 25 bp, SARS Virus
aatgggagtactaaatgtactccaa

SEQ ID NO: 217682 - DNA, 25 bp, SARS Virus
atgggagtactaaatgtactccaaa

SEQ ID NO: 217683 - DNA, 25 bp, SARS Virus
tgggagtactaaatgtactccaaat

SEQ ID NO: 217684 - DNA, 25 bp, SARS Virus
gggagtactaaaagtactccaaatt

SEQ ID NO: 217685 - DNA, 25 bp, SARS Virus
ggagtactaaatatactccaaatta

SEQ ID NO: 217686 - DNA, 25 bp, SARS Virus
gagtactaaatgaactccaaattaa

SEQ ID NO: 217687 - DNA, 25 bp, SARS Virus
agtactaaatgtactccaaattaaa

SEQ ID NO: 217688 - DNA, 25 bp, SARS Virus
gtactaaatgtaatccaaattaaaa

SEQ ID NO: 217689 - DNA, 25 bp, SARS Virus
tactaaatgtacaccaaattaaaaa

SEQ ID NO: 217690 - DNA, 25 bp, SARS Virus
actaaatgtactacaaattaaaaac

SEQ ID NO: 217691 - DNA, 25 bp, SARS Virus
ctaaatgtactcaaaattaaaaaca

SEQ ID NO: 217692 - DNA, 25 bp, SARS Virus
taaatgtactccaaattaaaaacat

SEQ ID NO: 217693 - DNA, 25 bp, SARS Virus
aaatgtactccaaattaaaaacatt

SEQ ID NO: 217694 - DNA, 25 bp, SARS Virus
aatgtactccaaattaaaaacattg

SEQ ID NO: 217695 - DNA, 25 bp, SARS Virus
atgtactccaaaataaaaacattgt

SEQ ID NO: 217696 - DNA, 25 bp, SARS Virus
tgtactccaaataaaaaacattgta

SEQ ID NO: 217697 - DNA, 25 bp, SARS Virus
gtactccaaattaaaaacattgtag

SEQ ID NO: 217698 - DNA, 25 bp, SARS Virus
tactccaaattaaaaacattgtagt

SEQ ID NO: 217699 - DNA, 25 bp, SARS Virus
actccaaattaaaaacattgtagtc

SEQ ID NO: 217700 - DNA, 25 bp, SARS Virus
ctccaaattaaaaacattgtagtcg

SEQ ID NO: 217701 - DNA, 25 bp, SARS Virus
tccaaattaaaaacattgtagtcgt

SEQ ID NO: 217702 - DNA, 25 bp, SARS Virus
ccaaattaaaaaaattgtagtcgtg

SEQ ID NO: 217703 - DNA, 25 bp, SARS Virus
caaattaaaaacattgtagtcgtgg

SEQ ID NO: 217704 - DNA, 25 bp, SARS Virus
aaattaaaaacaatgtagtcgtggt

SEQ ID NO: 217705 - DNA, 25 bp, SARS Virus
aattaaaaacatagtagtcgtggta

SEQ ID NO: 217706 - DNA, 25 bp, SARS Virus
attaaaaacattatagtcgtggtag

SEQ ID NO: 217707 - DNA, 25 bp, SARS Virus
ttaaaaacattgaagtcgtggtagg

SEQ ID NO: 217708 - DNA, 25 bp, SARS Virus
taaaaacattgtagtcgtggtaggt

SEQ ID NO: 217709 - DNA, 25 bp, SARS Virus
aaaaacattgtaatcgtggtaggtt

SEQ ID NO: 217710 - DNA, 25 bp, SARS Virus
aaaacattgtagacgtggtaggttc

SEQ ID NO: 217711 - DNA, 25 bp, SARS Virus
aaacattgtagtagtggtaggttca

SEQ ID NO: 217712 - DNA, 25 bp, SARS Virus
aacattgtagtcatggtaggttcat

SEQ ID NO: 217713 - DNA, 25 bp, SARS Virus
acattgtagtcgaggtaggttcata

SEQ ID NO: 217714 - DNA, 25 bp, SARS Virus
cattgtagtcgtagtaggttcatac

SEQ ID NO: 217715 - DNA, 25 bp, SARS Virus
attgtagtcgtgataggttcataca

SEQ ID NO: 217716 - DNA, 25 bp, SARS Virus
ttgtagtcgtggaaggttcatacaa

SEQ ID NO: 217717 - DNA, 25 bp, SARS Virus
tgtagtcgtggtaggttcatacaac

SEQ ID NO: 217718 - DNA, 25 bp, SARS Virus
gtagtcgtggtaagttcatacaacc

SEQ ID NO: 217719 - DNA, 25 bp, SARS Virus
tagtcgtggtagattcatacaacct

SEQ ID NO: 217720 - DNA, 25 bp, SARS Virus
agtcgtggtaggatcatacaacctg

SEQ ID NO: 217721 - DNA, 25 bp, SARS Virus
gtcgtggtaggtacatacaacctgg

SEQ ID NO: 217722 - DNA, 25 bp, SARS Virus
tcgtggtaggttaatacaacctggt

SEQ ID NO: 217723 - DNA, 25 bp, SARS Virus
cgtggtaggttcatacaacctggtt

SEQ ID NO: 217724 - DNA, 25 bp, SARS Virus
gtggtaggttcaaacaacctggttt

SEQ ID NO: 217725 - DNA, 25 bp, SARS Virus
tggtaggttcatacaacctggtttg

SEQ ID NO: 217726 - DNA, 25 bp, SARS Virus
ggtaggttcataaaacctggtttga

SEQ ID NO: 217727 - DNA, 25 bp, SARS Virus
gtaggttcatacaacctggtttgac

SEQ ID NO: 217728 - DNA, 25 bp, SARS Virus
taggttcatacaacctggtttgacg

SEQ ID NO: 217729 - DNA, 25 bp, SARS Virus
aggttcatacaaactggtttgacga

SEQ ID NO: 217730 - DNA, 25 bp, SARS Virus
ggttcatacaacatggtttgacgac

SEQ ID NO: 217731 - DNA, 25 bp, SARS Virus
gttcatacaaccaggtttgacgaca

SEQ ID NO: 217732 - DNA, 25 bp, SARS Virus
ttcatacaacctagtttgacgacag

SEQ ID NO: 217733 - DNA, 25 bp, SARS Virus
tcatacaacctgatttgacgacagg

SEQ ID NO: 217734 - DNA, 25 bp, SARS Virus
catacaacctggattgacgacaggt

SEQ ID NO: 217735 - DNA, 25 bp, SARS Virus
atacaacctggtatgacgacaggta

SEQ ID NO: 217736 - DNA, 25 bp, SARS Virus
tacaacctggttagacgacaggtat

SEQ ID NO: 217737 - DNA, 25 bp, SARS Virus
acaacctggtttaacgacaggtata

SEQ ID NO: 217738 - DNA, 25 bp, SARS Virus
caacctggtttgacgacaggtatac

SEQ ID NO: 217739 - DNA, 25 bp, SARS Virus
aacctggtttgaagacaggtataca

SEQ ID NO: 217740 - DNA, 25 bp, SARS Virus
acctggtttgacaacaggtatacag

SEQ ID NO: 217741 - DNA, 25 bp, SARS Virus
cctggtttgacgacaggtatacagt

SEQ ID NO: 217742 - DNA, 25 bp, SARS Virus
ctggtttgacgaaaggtatacagta

SEQ ID NO: 217743 - DNA, 25 bp, SARS Virus
tggtttgacgacaggtatacagtat

SEQ ID NO: 217744 - DNA, 25 bp, SARS Virus
ggtttgacgacaagtatacagtatc

SEQ ID NO: 217745 - DNA, 25 bp, SARS Virus
gtttgacgacagatatacagtatct

SEQ ID NO: 217746 - DNA, 25 bp, SARS Virus
tttgacgacaggaatacagtatctg

SEQ ID NO: 217747 - DNA, 25 bp, SARS Virus
ttgacgacaggtatacagtatctgt

SEQ ID NO: 217748 - DNA, 25 bp, SARS Virus
tgacgacaggtaaacagtatctgta

SEQ ID NO: 217749 - DNA, 25 bp, SARS Virus
gacgacaggtatacagtatctgtat

SEQ ID NO: 217750 - DNA, 25 bp, SARS Virus
acgacaggtataaagtatctgtata

SEQ ID NO: 217751 - DNA, 25 bp, SARS Virus
cgacaggtatacagtatctgtatag

SEQ ID NO: 217752 - DNA, 25 bp, SARS Virus
gacaggtatacaatatctgtatagg

SEQ ID NO: 217753 - DNA, 25 bp, SARS Virus
acaggtatacagaatctgtataggt

SEQ ID NO: 217754 - DNA, 25 bp, SARS Virus
caggtatacagtatctgtataggtg

SEQ ID NO: 217755 - DNA, 25 bp, SARS Virus
aggtatacagtaactgtataggtgt

SEQ ID NO: 217756 - DNA, 25 bp, SARS Virus
ggtatacagtatatgtataggtgtt

SEQ ID NO: 217757 - DNA, 25 bp, SARS Virus
gtatacagtatcagtataggtgttc

SEQ ID NO: 217758 - DNA, 25 bp, SARS Virus
tatacagtatctatataggtgttcg

SEQ ID NO: 217759 - DNA, 25 bp, SARS Virus
atacagtatctgaataggtgttcga

SEQ ID NO: 217760 - DNA, 25 bp, SARS Virus
tacagtatctgtataggtgttcgac

SEQ ID NO: 217761 - DNA, 25 bp, SARS Virus
acagtatctgtaaaggtgttcgaca

SEQ ID NO: 217762 - DNA, 25 bp, SARS Virus
cagtatctgtataggtgttcgacac

SEQ ID NO: 217763 - DNA, 25 bp, SARS Virus
agtatctgtataagtgttcgacaca

SEQ ID NO: 217764 - DNA, 25 bp, SARS Virus
gtatctgtatagatgttcgacacac

SEQ ID NO: 217765 - DNA, 25 bp, SARS Virus
tatctgtataggagttcgacacaca

SEQ ID NO: 217766 - DNA, 25 bp, SARS Virus
atctgtataggtattcgacacacac

SEQ ID NO: 217767 - DNA, 25 bp, SARS Virus
tctgtataggtgatcgacacacacc

SEQ ID NO: 217768 - DNA, 25 bp, SARS Virus
ctgtataggtgtacgacacacacct

SEQ ID NO: 217769 - DNA, 25 bp, SARS Virus
tgtataggtgttagacacacacctc

SEQ ID NO: 217770 - DNA, 25 bp, SARS Virus
gtataggtgttcaacacacacctct

SEQ ID NO: 217771 - DNA, 25 bp, SARS Virus
tataggtgttcgacacacacctcta

SEQ ID NO: 217772 - DNA, 25 bp, SARS Virus
ataggtgttcgaaacacacctctaa

SEQ ID NO: 217773 - DNA, 25 bp, SARS Virus
taggtgttcgacacacacctctaat

SEQ ID NO: 217774 - DNA, 25 bp, SARS Virus
aggtgttcgacaaacacctctaatc

SEQ ID NO: 217775 - DNA, 25 bp, SARS Virus
ggtgttcgacacacacctctaatca

SEQ ID NO: 217776 - DNA, 25 bp, SARS Virus
gtgttcgacacaaacctctaatcac

SEQ ID NO: 217777 - DNA, 25 bp, SARS Virus
tgttcgacacacacctctaatcaca

SEQ ID NO: 217778 - DNA, 25 bp, SARS Virus
gttcgacacacaactctaatcacaa

SEQ ID NO: 217779 - DNA, 25 bp, SARS Virus
ttcgacacacacatctaatcacaac

SEQ ID NO: 217780 - DNA, 25 bp, SARS Virus
tcgacacacaccactaatcacaaca

SEQ ID NO: 217781 - DNA, 25 bp, SARS Virus
cgacacacacctataatcacaacag

SEQ ID NO: 217782 - DNA, 25 bp, SARS Virus
gacacacacctcaaatcacaacagg

SEQ ID NO: 217783 - DNA, 25 bp, SARS Virus
acacacacctctaatcacaacaggt

SEQ ID NO: 217784 - DNA, 25 bp, SARS Virus
cacacacctctaatcacaacaggtg

SEQ ID NO: 217785 - DNA, 25 bp, SARS Virus
acacacctctaaacacaacaggtgt

SEQ ID NO: 217786 - DNA, 25 bp, SARS Virus
cacacctctaataacaacaggtgtc

SEQ ID NO: 217787 - DNA, 25 bp, SARS Virus
acacctctaatcacaacaggtgtca

SEQ ID NO: 217788 - DNA, 25 bp, SARS Virus
cacctctaatcaaaacaggtgtcaa

SEQ ID NO: 217789 - DNA, 25 bp, SARS Virus
acctctaatcacaacaggtgtcaac

SEQ ID NO: 217790 - DNA, 25 bp, SARS Virus
cctctaatcacaacaggtgtcaaca

SEQ ID NO: 217791 - DNA, 25 bp, SARS Virus
ctctaatcacaaaaggtgtcaacac

SEQ ID NO: 217792 - DNA, 25 bp, SARS Virus
tctaatcacaacaggtgtcaacact

SEQ ID NO: 217793 - DNA, 25 bp, SARS Virus
ctaatcacaacaagtgtcaacactt

SEQ ID NO: 217794 - DNA, 25 bp, SARS Virus
taatcacaacagatgtcaacacttg

SEQ ID NO: 217795 - DNA, 25 bp, SARS Virus
aatcacaacaggagtcaacacttgt

SEQ ID NO: 217796 - DNA, 25 bp, SARS Virus
atcacaacaggtatcaacacttgtg

SEQ ID NO: 217797 - DNA, 25 bp, SARS Virus
tcacaacaggtgacaacacttgtga

SEQ ID NO: 217798 - DNA, 25 bp, SARS Virus
cacaacaggtgtaaacacttgtgaa

SEQ ID NO: 217799 - DNA, 25 bp, SARS Virus
acaacaggtgtcaacacttgtgaaa

SEQ ID NO: 217800 - DNA, 25 bp, SARS Virus
caacaggtgtcaacacttgtgaaaa

SEQ ID NO: 217801 - DNA, 25 bp, SARS Virus
aacaggtgtcaaaacttgtgaaaat

SEQ ID NO: 217802 - DNA, 25 bp, SARS Virus
acaggtgtcaacacttgtgaaaata

SEQ ID NO: 217803 - DNA, 25 bp, SARS Virus
caggtgtcaacaattgtgaaaatat

SEQ ID NO: 217804 - DNA, 25 bp, SARS Virus
aggtgtcaacacatgtgaaaatatc

SEQ ID NO: 217805 - DNA, 25 bp, SARS Virus
ggtgtcaacactagtgaaaatatca

SEQ ID NO: 217806 - DNA, 25 bp, SARS Virus
gtgtcaacacttatgaaaatatcag

SEQ ID NO: 217807 - DNA, 25 bp, SARS Virus
tgtcaacacttgagaaaatatcaga

SEQ ID NO: 217808 - DNA, 25 bp, SARS Virus
gtcaacacttgtaaaaatatcagaa

SEQ ID NO: 217809 - DNA, 25 bp, SARS Virus
tcaacacttgtgaaaatatcagaat

SEQ ID NO: 217810 - DNA, 25 bp, SARS Virus
caacacttgtgaaaatatcagaatt

SEQ ID NO: 217811 - DNA, 25 bp, SARS Virus
aacacttgtgaaaatatcagaattg

SEQ ID NO: 217812 - DNA, 25 bp, SARS Virus
acacttgtgaaaatatcagaattgg

SEQ ID NO: 217813 - DNA, 25 bp, SARS Virus
cacttgtgaaaaaatcagaattgga

SEQ ID NO: 217814 - DNA, 25 bp, SARS Virus
acttgtgaaaatatcagaattggag

SEQ ID NO: 217815 - DNA, 25 bp, SARS Virus
cttgtgaaaataacagaattggagg

SEQ ID NO: 217816 - DNA, 25 bp, SARS Virus
ttgtgaaaatataagaattggaggg

SEQ ID NO: 217817 - DNA, 25 bp, SARS Virus
tgtgaaaatatcagaattggagggc

SEQ ID NO: 217818 - DNA, 25 bp, SARS Virus
gtgaaaatatcaaaattggagggcg

SEQ ID NO: 217819 - DNA, 25 bp, SARS Virus
tgaaaatatcagaattggagggcgt

SEQ ID NO: 217820 - DNA, 25 bp, SARS Virus
gaaaatatcagaattggagggcgtc

SEQ ID NO: 217821 - DNA, 25 bp, SARS Virus
aaaatatcagaaatggagggcgtcc

SEQ ID NO: 217822 - DNA, 25 bp, SARS Virus
aaatatcagaataggagggcgtccc

SEQ ID NO: 217823 - DNA, 25 bp, SARS Virus
aatatcagaattagagggcgtccct

SEQ ID NO: 217824 - DNA, 25 bp, SARS Virus
atatcagaattgaagggcgtcccta

SEQ ID NO: 217825 - DNA, 25 bp, SARS Virus
tatcagaattggagggcgtccctat

SEQ ID NO: 217826 - DNA, 25 bp, SARS Virus
atcagaattggaaggcgtccctatt

SEQ ID NO: 217827 - DNA, 25 bp, SARS Virus
tcagaattggagagcgtccctattc

SEQ ID NO: 217828 - DNA, 25 bp, SARS Virus
cagaattggaggacgtccctattct

SEQ ID NO: 217829 - DNA, 25 bp, SARS Virus
agaattggagggagtccctattctc

SEQ ID NO: 217830 - DNA, 25 bp, SARS Virus
gaattggagggcatccctattctct

SEQ ID NO: 217831 - DNA, 25 bp, SARS Virus
aattggagggcgaccctattctctg

SEQ ID NO: 217832 - DNA, 25 bp, SARS Virus
attggagggcgtacctattctctga

SEQ ID NO: 217833 - DNA, 25 bp, SARS Virus
ttggagggcgtcactattctctgag

SEQ ID NO: 217834 - DNA, 25 bp, SARS Virus
tggagggcgtccatattctctgaga

SEQ ID NO: 217835 - DNA, 25 bp, SARS Virus
ggagggcgtcccaattctctgagaa

SEQ ID NO: 217836 - DNA, 25 bp, SARS Virus
gagggcgtccctattctctgagaaa

SEQ ID NO: 217837 - DNA, 25 bp, SARS Virus
agggcgtccctaatctctgagaaat

SEQ ID NO: 217838 - DNA, 25 bp, SARS Virus
gggcgtccctatactctgagaaatc

SEQ ID NO: 217839 - DNA, 25 bp, SARS Virus
ggcgtccctattatctgagaaatca

SEQ ID NO: 217840 - DNA, 25 bp, SARS Virus
gcgtccctattcactgagaaatcaa

SEQ ID NO: 217841 - DNA, 25 bp, SARS Virus
cgtccctattctatgagaaatcaaa

SEQ ID NO: 217842 - DNA, 25 bp, SARS Virus
gtccctattctcagagaaatcaaac

SEQ ID NO: 217843 - DNA, 25 bp, SARS Virus
tccctattctctaagaaatcaaaca

SEQ ID NO: 217844 - DNA, 25 bp, SARS Virus
ccctattctctgagaaatcaaacag

SEQ ID NO: 217845 - DNA, 25 bp, SARS Virus
cctattctctgaaaaatcaaacagt

SEQ ID NO: 217846 - DNA, 25 bp, SARS Virus
ctattctctgagaaatcaaacagtt

SEQ ID NO: 217847 - DNA, 25 bp, SARS Virus
tattctctgagaaatcaaacagttc

SEQ ID NO: 217848 - DNA, 25 bp, SARS Virus
attctctgagaaatcaaacagttca

SEQ ID NO: 217849 - DNA, 25 bp, SARS Virus
ttctctgagaaaacaaacagttcac

SEQ ID NO: 217850 - DNA, 25 bp, SARS Virus
tctctgagaaataaaacagttcact

SEQ ID NO: 217851 - DNA, 25 bp, SARS Virus
ctctgagaaatcaaacagttcactt

SEQ ID NO: 217852 - DNA, 25 bp, SARS Virus
tctgagaaatcaaacagttcacttt

SEQ ID NO: 217853 - DNA, 25 bp, SARS Virus
ctgagaaatcaaacagttcactttc

SEQ ID NO: 217854 - DNA, 25 bp, SARS Virus
tgagaaatcaaaaagttcactttct

SEQ ID NO: 217855 - DNA, 25 bp, SARS Virus
gagaaatcaaacagttcactttctt

SEQ ID NO: 217856 - DNA, 25 bp, SARS Virus
agaaatcaaacaattcactttcttg

SEQ ID NO: 217857 - DNA, 25 bp, SARS Virus
gaaatcaaacagatcactttcttgg

SEQ ID NO: 217858 - DNA, 25 bp, SARS Virus
aaatcaaacagtacactttcttgga

SEQ ID NO: 217859 - DNA, 25 bp, SARS Virus
aatcaaacagttaactttcttggag

SEQ ID NO: 217860 - DNA, 25 bp, SARS Virus
atcaaacagttcactttcttggagt

SEQ ID NO: 217861 - DNA, 25 bp, SARS Virus
tcaaacagttcaatttcttggagtg

SEQ ID NO: 217862 - DNA, 25 bp, SARS Virus
caaacagttcacattcttggagtgg

SEQ ID NO: 217863 - DNA, 25 bp, SARS Virus
aaacagttcactatcttggagtggc

SEQ ID NO: 217864 - DNA, 25 bp, SARS Virus
aacagttcacttacttggagtggca

SEQ ID NO: 217865 - DNA, 25 bp, SARS Virus
acagttcactttattggagtggcag

SEQ ID NO: 217866 - DNA, 25 bp, SARS Virus
cagttcactttcatggagtggcagt

SEQ ID NO: 217867 - DNA, 25 bp, SARS Virus
agttcactttctaggagtggcagtt

SEQ ID NO: 217868 - DNA, 25 bp, SARS Virus
gttcactttcttagagtggcagttc

SEQ ID NO: 217869 - DNA, 25 bp, SARS Virus
ttcactttcttgaagtggcagttct

SEQ ID NO: 217870 - DNA, 25 bp, SARS Virus
tcactttcttggagtggcagttcta

SEQ ID NO: 217871 - DNA, 25 bp, SARS Virus
cactttcttggaatggcagttctac

SEQ ID NO: 217872 - DNA, 25 bp, SARS Virus
actttcttggagaggcagttctact

SEQ ID NO: 217873 - DNA, 25 bp, SARS Virus
ctttcttggagtagcagttctactt

SEQ ID NO: 217874 - DNA, 25 bp, SARS Virus
tttcttggagtgacagttctacttt

SEQ ID NO: 217875 - DNA, 25 bp, SARS Virus
ttcttggagtggaagttctactttg

SEQ ID NO: 217876 - DNA, 25 bp, SARS Virus
tcttggagtggcagttctactttga

SEQ ID NO: 217877 - DNA, 25 bp, SARS Virus
cttggagtggcaattctactttgag

SEQ ID NO: 217878 - DNA, 25 bp, SARS Virus
ttggagtggcagatctactttgagc

SEQ ID NO: 217879 - DNA, 25 bp, SARS Virus
tggagtggcagtactactttgagct

SEQ ID NO: 217880 - DNA, 25 bp, SARS Virus
ggagtggcagttatactttgagctg

SEQ ID NO: 217881 - DNA, 25 bp, SARS Virus
gagtggcagttcaactttgagctgc

SEQ ID NO: 217882 - DNA, 25 bp, SARS Virus
agtggcagttctactttgagctgcc

SEQ ID NO: 217883 - DNA, 25 bp, SARS Virus
gtggcagttctaatttgagctgccc

SEQ ID NO: 217884 - DNA, 25 bp, SARS Virus
tggcagttctacattgagctgcccc

SEQ ID NO: 217885 - DNA, 25 bp, SARS Virus
ggcagttctactatgagctgccccg

SEQ ID NO: 217886 - DNA, 25 bp, SARS Virus
gcagttctacttagagctgccccga

SEQ ID NO: 217887 - DNA, 25 bp, SARS Virus
cagttctactttaagctgccccgag

SEQ ID NO: 217888 - DNA, 25 bp, SARS Virus
agttctactttgagctgccccgaga

SEQ ID NO: 217889 - DNA, 25 bp, SARS Virus
gttctactttgaactgccccgagag

SEQ ID NO: 217890 - DNA, 25 bp, SARS Virus
ttctactttgagatgccccgagagg

SEQ ID NO: 217891 - DNA, 25 bp, SARS Virus
tctactttgagcagccccgagaggt

SEQ ID NO: 217892 - DNA, 25 bp, SARS Virus
ctactttgagctaccccgagaggtc

SEQ ID NO: 217893 - DNA, 25 bp, SARS Virus
tactttgagctgacccgagaggtct

SEQ ID NO: 217894 - DNA, 25 bp, SARS Virus
actttgagctgcaccgagaggtctc

SEQ ID NO: 217895 - DNA, 25 bp, SARS Virus
ctttgagctgccacgagaggtctca

SEQ ID NO: 217896 - DNA, 25 bp, SARS Virus
tttgagctgcccagagaggtctcac

SEQ ID NO: 217897 - DNA, 25 bp, SARS Virus
ttgagctgccccaagaggtctcaca

SEQ ID NO: 217898 - DNA, 25 bp, SARS Virus
tgagctgccccgagaggtctcacac

SEQ ID NO: 217899 - DNA, 25 bp, SARS Virus
gagctgccccgaaaggtctcacacc

SEQ ID NO: 217900 - DNA, 25 bp, SARS Virus
agctgccccgagaggtctcacacca

SEQ ID NO: 217901 - DNA, 25 bp, SARS Virus
gctgccccgagaagtctcacaccat

SEQ ID NO: 217902 - DNA, 25 bp, SARS Virus
ctgccccgagagatctcacaccatg

SEQ ID NO: 217903 - DNA, 25 bp, SARS Virus
tgccccgagaggactcacaccatgt

SEQ ID NO: 217904 - DNA, 25 bp, SARS Virus
gccccgagaggtatcacaccatgtg

SEQ ID NO: 217905 - DNA, 25 bp, SARS Virus
ccccgagaggtcacacaccatgtgt

SEQ ID NO: 217906 - DNA, 25 bp, SARS Virus
cccgagaggtctaacaccatgtgtt

SEQ ID NO: 217907 - DNA, 25 bp, SARS Virus
ccgagaggtctcacaccatgtgtta

SEQ ID NO: 217908 - DNA, 25 bp, SARS Virus
cgagaggtctcaaaccatgtgttaa

SEQ ID NO: 217909 - DNA, 25 bp, SARS Virus
gagaggtctcacaccatgtgttaaa

SEQ ID NO: 217910 - DNA, 25 bp, SARS Virus
agaggtctcacaacatgtgttaaaa

SEQ ID NO: 217911 - DNA, 25 bp, SARS Virus
gaggtctcacacaatgtgttaaaac

SEQ ID NO: 217912 - DNA, 25 bp, SARS Virus
aggtctcacaccatgtgttaaaaca

SEQ ID NO: 217913 - DNA, 25 bp, SARS Virus
ggtctcacaccaagtgttaaaacag

SEQ ID NO: 217914 - DNA, 25 bp, SARS Virus
gtctcacaccatatgttaaaacagt

SEQ ID NO: 217915 - DNA, 25 bp, SARS Virus
tctcacaccatgagttaaaacagtg

SEQ ID NO: 217916 - DNA, 25 bp, SARS Virus
ctcacaccatgtattaaaacagtgg

SEQ ID NO: 217917 - DNA, 25 bp, SARS Virus
tcacaccatgtgataaaacagtggt

SEQ ID NO: 217918 - DNA, 25 bp, SARS Virus
cacaccatgtgtaaaaacagtggtg

SEQ ID NO: 217919 - DNA, 25 bp, SARS Virus
acaccatgtgttaaaacagtggtgc

SEQ ID NO: 217920 - DNA, 25 bp, SARS Virus
caccatgtgttaaaacagtggtgcg

SEQ ID NO: 217921 - DNA, 25 bp, SARS Virus
accatgtgttaaaacagtggtgcga

SEQ ID NO: 217922 - DNA, 25 bp, SARS Virus
ccatgtgttaaaacagtggtgcgaa

SEQ ID NO: 217923 - DNA, 25 bp, SARS Virus
catgtgttaaaaaagtggtgcgaat

SEQ ID NO: 217924 - DNA, 25 bp, SARS Virus
atgtgttaaaacagtggtgcgaatt

SEQ ID NO: 217925 - DNA, 25 bp, SARS Virus
tgtgttaaaacaatggtgcgaattc

SEQ ID NO: 217926 - DNA, 25 bp, SARS Virus
gtgttaaaacagaggtgcgaattct

SEQ ID NO: 217927 - DNA, 25 bp, SARS Virus
tgttaaaacagtagtgcgaattctt

SEQ ID NO: 217928 - DNA, 25 bp, SARS Virus
gttaaaacagtgatgcgaattcttt

SEQ ID NO: 217929 - DNA, 25 bp, SARS Virus
ttaaaacagtggagcgaattcttta

SEQ ID NO: 217930 - DNA, 25 bp, SARS Virus
taaaacagtggtacgaattctttaa

SEQ ID NO: 217931 - DNA, 25 bp, SARS Virus
aaaacagtggtgagaattctttaag

SEQ ID NO: 217932 - DNA, 25 bp, SARS Virus
aaacagtggtgcaaattctttaagt

SEQ ID NO: 217933 - DNA, 25 bp, SARS Virus
aacagtggtgcgaattctttaagtt

SEQ ID NO: 217934 - DNA, 25 bp, SARS Virus
acagtggtgcgaattctttaagttg

SEQ ID NO: 217935 - DNA, 25 bp, SARS Virus
cagtggtgcgaaatctttaagttgt

SEQ ID NO: 217936 - DNA, 25 bp, SARS Virus
agtggtgcgaatactttaagttgtg

SEQ ID NO: 217937 - DNA, 25 bp, SARS Virus
gtggtgcgaattatttaagttgtgg

SEQ ID NO: 217938 - DNA, 25 bp, SARS Virus
tggtgcgaattcattaagttgtgga

SEQ ID NO: 217939 - DNA, 25 bp, SARS Virus
ggtgcgaattctataagttgtggat

SEQ ID NO: 217940 - DNA, 25 bp, SARS Virus
gtgcgaattcttaaagttgtggatt

SEQ ID NO: 217941 - DNA, 25 bp, SARS Virus
tgcgaattctttaagttgtggattg

SEQ ID NO: 217942 - DNA, 25 bp, SARS Virus
gcgaattctttaagttgtggattga

SEQ ID NO: 217943 - DNA, 25 bp, SARS Virus
cgaattctttaaattgtggattgag

SEQ ID NO: 217944 - DNA, 25 bp, SARS Virus
gaattctttaagatgtggattgaga

SEQ ID NO: 217945 - DNA, 25 bp, SARS Virus
aattctttaagtagtggattgagac

SEQ ID NO: 217946 - DNA, 25 bp, SARS Virus
attctttaagttatggattgagaca

SEQ ID NO: 217947 - DNA, 25 bp, SARS Virus
ttctttaagttgaggattgagacat

SEQ ID NO: 217948 - DNA, 25 bp, SARS Virus
tctttaagttgtagattgagacatg

SEQ ID NO: 217949 - DNA, 25 bp, SARS Virus
ctttaagttgtgaattgagacatgc

SEQ ID NO: 217950 - DNA, 25 bp, SARS Virus
tttaagttgtggattgagacatgcg

SEQ ID NO: 217951 - DNA, 25 bp, SARS Virus
ttaagttgtggaatgagacatgcga

SEQ ID NO: 217952 - DNA, 25 bp, SARS Virus
taagttgtggatagagacatgcgac

SEQ ID NO: 217953 - DNA, 25 bp, SARS Virus
aagttgtggattaagacatgcgaca

SEQ ID NO: 217954 - DNA, 25 bp, SARS Virus
agttgtggattgagacatgcgacag

SEQ ID NO: 217955 - DNA, 25 bp, SARS Virus
gttgtggattgaaacatgcgacagg

SEQ ID NO: 217956 - DNA, 25 bp, SARS Virus
ttgtggattgagacatgcgacagga

SEQ ID NO: 217957 - DNA, 25 bp, SARS Virus
tgtggattgagaaatgcgacaggac

SEQ ID NO: 217958 - DNA, 25 bp, SARS Virus
gtggattgagacatgcgacaggact

SEQ ID NO: 217959 - DNA, 25 bp, SARS Virus
tggattgagacaagcgacaggactt

SEQ ID NO: 217960 - DNA, 25 bp, SARS Virus
ggattgagacatacgacaggactta

SEQ ID NO: 217961 - DNA, 25 bp, SARS Virus
gattgagacatgagacaggacttat

SEQ ID NO: 217962 - DNA, 25 bp, SARS Virus
attgagacatgcaacaggacttatc

SEQ ID NO: 217963 - DNA, 25 bp, SARS Virus
ttgagacatgcgacaggacttatcc

SEQ ID NO: 217964 - DNA, 25 bp, SARS Virus
tgagacatgcgaaaggacttatcct

SEQ ID NO: 217965 - DNA, 25 bp, SARS Virus
gagacatgcgacaggacttatcctg

SEQ ID NO: 217966 - DNA, 25 bp, SARS Virus
agacatgcgacaagacttatcctgg

SEQ ID NO: 217967 - DNA, 25 bp, SARS Virus
gacatgcgacagaacttatcctggt

SEQ ID NO: 217968 - DNA, 25 bp, SARS Virus
acatgcgacaggacttatcctggtt

SEQ ID NO: 217969 - DNA, 25 bp, SARS Virus
catgcgacaggaattatcctggtta

SEQ ID NO: 217970 - DNA, 25 bp, SARS Virus
atgcgacaggacatatcctggttag

SEQ ID NO: 217971 - DNA, 25 bp, SARS Virus
tgcgacaggactaatcctggttaga

SEQ ID NO: 217972 - DNA, 25 bp, SARS Virus
gcgacaggacttatcctggttagag

SEQ ID NO: 217973 - DNA, 25 bp, SARS Virus
cgacaggacttaacctggttagaga

SEQ ID NO: 217974 - DNA, 25 bp, SARS Virus
gacaggacttatactggttagagac

SEQ ID NO: 217975 - DNA, 25 bp, SARS Virus
acaggacttatcatggttagagaca

SEQ ID NO: 217976 - DNA, 25 bp, SARS Virus
caggacttatccaggttagagacat

SEQ ID NO: 217977 - DNA, 25 bp, SARS Virus
aggacttatcctagttagagacatt

SEQ ID NO: 217978 - DNA, 25 bp, SARS Virus
ggacttatcctgattagagacattc

SEQ ID NO: 217979 - DNA, 25 bp, SARS Virus
gacttatcctggatagagacattct

SEQ ID NO: 217980 - DNA, 25 bp, SARS Virus
acttatcctggtaagagacattctc

SEQ ID NO: 217981 - DNA, 25 bp, SARS Virus
cttatcctggttagagacattctcg

SEQ ID NO: 217982 - DNA, 25 bp, SARS Virus
ttatcctggttaaagacattctcgg

SEQ ID NO: 217983 - DNA, 25 bp, SARS Virus
tatcctggttagagacattctcggt

SEQ ID NO: 217984 - DNA, 25 bp, SARS Virus
atcctggttagaaacattctcggtc

SEQ ID NO: 217985 - DNA, 25 bp, SARS Virus
tcctggttagagacattctcggtcg

SEQ ID NO: 217986 - DNA, 25 bp, SARS Virus
cctggttagagaaattctcggtcgg

SEQ ID NO: 217987 - DNA, 25 bp, SARS Virus
ctggttagagacattctcggtcggt

SEQ ID NO: 217988 - DNA, 25 bp, SARS Virus
tggttagagacaatctcggtcggtt

SEQ ID NO: 217989 - DNA, 25 bp, SARS Virus
ggttagagacatactcggtcggttt

SEQ ID NO: 217990 - DNA, 25 bp, SARS Virus
gttagagacattatcggtcggtttc

SEQ ID NO: 217991 - DNA, 25 bp, SARS Virus
ttagagacattcacggtcggtttct

SEQ ID NO: 217992 - DNA, 25 bp, SARS Virus
tagagacattctaggtcggtttctt

SEQ ID NO: 217993 - DNA, 25 bp, SARS Virus
agagacattctcagtcggtttcttt

SEQ ID NO: 217994 - DNA, 25 bp, SARS Virus
gagacattctcgatcggtttctttg

SEQ ID NO: 217995 - DNA, 25 bp, SARS Virus
agacattctcggacggtttctttga

SEQ ID NO: 217996 - DNA, 25 bp, SARS Virus
gacattctcggtaggtttctttgac

SEQ ID NO: 217997 - DNA, 25 bp, SARS Virus
acattctcggtcagtttctttgaca

SEQ ID NO: 217998 - DNA, 25 bp, SARS Virus
cattctcggtcgatttctttgacaa

SEQ ID NO: 217999 - DNA, 25 bp, SARS Virus
attctcggtcggattctttgacaaa

SEQ ID NO: 218000 - DNA, 25 bp, SARS Virus
ttctcggtcggtatctttgacaaag

SEQ ID NO: 218001 - DNA, 25 bp, SARS Virus
tctcggtcggttactttgacaaaga

SEQ ID NO: 218002 - DNA, 25 bp, SARS Virus
ctcggtcggtttatttgacaaagat

SEQ ID NO: 218003 - DNA, 25 bp, SARS Virus
tcggtcggtttcattgacaaagatg

SEQ ID NO: 218004 - DNA, 25 bp, SARS Virus
cggtcggtttctatgacaaagatgt

SEQ ID NO: 218005 - DNA, 25 bp, SARS Virus
ggtcggtttcttagacaaagatgtt

SEQ ID NO: 218006 - DNA, 25 bp, SARS Virus
gtcggtttctttaacaaagatgttt

SEQ ID NO: 218007 - DNA, 25 bp, SARS Virus
tcggtttctttgacaaagatgtttc

SEQ ID NO: 218008 - DNA, 25 bp, SARS Virus
cggtttctttgaaaaagatgtttca

SEQ ID NO: 218009 - DNA, 25 bp, SARS Virus
ggtttctttgacaaagatgtttcac

SEQ ID NO: 218010 - DNA, 25 bp, SARS Virus
gtttctttgacaaagatgtttcacg

SEQ ID NO: 218011 - DNA, 25 bp, SARS Virus
tttctttgacaaagatgtttcacga

SEQ ID NO: 218012 - DNA, 25 bp, SARS Virus
ttctttgacaaaaatgtttcacgag

SEQ ID NO: 218013 - DNA, 25 bp, SARS Virus
tctttgacaaagatgtttcacgagg

SEQ ID NO: 218014 - DNA, 25 bp, SARS Virus
ctttgacaaagaagtttcacgagga

SEQ ID NO: 218015 - DNA, 25 bp, SARS Virus
tttgacaaagatatttcacgaggag

SEQ ID NO: 218016 - DNA, 25 bp, SARS Virus
ttgacaaagatgattcacgaggagt

SEQ ID NO: 218017 - DNA, 25 bp, SARS Virus
tgacaaagatgtatcacgaggagtc

SEQ ID NO: 218018 - DNA, 25 bp, SARS Virus
gacaaagatgttacacgaggagtct

SEQ ID NO: 218019 - DNA, 25 bp, SARS Virus
acaaagatgtttaacgaggagtcta

SEQ ID NO: 218020 - DNA, 25 bp, SARS Virus
caaagatgtttcacgaggagtctac

SEQ ID NO: 218021 - DNA, 25 bp, SARS Virus
aaagatgtttcaagaggagtctaca

SEQ ID NO: 218022 - DNA, 25 bp, SARS Virus
aagatgtttcacaaggagtctacag

SEQ ID NO: 218023 - DNA, 25 bp, SARS Virus
agatgtttcacgaggagtctacaga

SEQ ID NO: 218024 - DNA, 25 bp, SARS Virus
gatgtttcacgaagagtctacagaa

SEQ ID NO: 218025 - DNA, 25 bp, SARS Virus
atgtttcacgagaagtctacagaaa

SEQ ID NO: 218026 - DNA, 25 bp, SARS Virus
tgtttcacgaggagtctacagaaac

SEQ ID NO: 218027 - DNA, 25 bp, SARS Virus
gtttcacgaggaatctacagaaact

SEQ ID NO: 218028 - DNA, 25 bp, SARS Virus
tttcacgaggagactacagaaacta

SEQ ID NO: 218029 - DNA, 25 bp, SARS Virus
ttcacgaggagtatacagaaactac

SEQ ID NO: 218030 - DNA, 25 bp, SARS Virus
tcacgaggagtcaacagaaactact

SEQ ID NO: 218031 - DNA, 25 bp, SARS Virus
cacgaggagtctacagaaactactg

SEQ ID NO: 218032 - DNA, 25 bp, SARS Virus
acgaggagtctaaagaaactactgc

SEQ ID NO: 218033 - DNA, 25 bp, SARS Virus
cgaggagtctacagaaactactgct

SEQ ID NO: 218034 - DNA, 25 bp, SARS Virus
gaggagtctacaaaaactactgctt

SEQ ID NO: 218035 - DNA, 25 bp, SARS Virus
aggagtctacagaaactactgcttc

SEQ ID NO: 218036 - DNA, 25 bp, SARS Virus
ggagtctacagaaactactgcttca

SEQ ID NO: 218037 - DNA, 25 bp, SARS Virus
gagtctacagaaactactgcttcac

SEQ ID NO: 218038 - DNA, 25 bp, SARS Virus
agtctacagaaaatactgcttcact

SEQ ID NO: 218039 - DNA, 25 bp, SARS Virus
gtctacagaaacaactgcttcactc

SEQ ID NO: 218040 - DNA, 25 bp, SARS Virus
tctacagaaactactgcttcactcc

SEQ ID NO: 218041 - DNA, 25 bp, SARS Virus
ctacagaaactaatgcttcactcca

SEQ ID NO: 218042 - DNA, 25 bp, SARS Virus
tacagaaactacagcttcactccat

SEQ ID NO: 218043 - DNA, 25 bp, SARS Virus
acagaaactactacttcactccata

SEQ ID NO: 218044 - DNA, 25 bp, SARS Virus
cagaaactactgattcactccatag

SEQ ID NO: 218045 - DNA, 25 bp, SARS Virus
agaaactactgcatcactccatagg

SEQ ID NO: 218046 - DNA, 25 bp, SARS Virus
gaaactactgctacactccataggt

SEQ ID NO: 218047 - DNA, 25 bp, SARS Virus
aaactactgcttaactccataggta

SEQ ID NO: 218048 - DNA, 25 bp, SARS Virus
aactactgcttcactccataggtaa

SEQ ID NO: 218049 - DNA, 25 bp, SARS Virus
actactgcttcaatccataggtaat

SEQ ID NO: 218050 - DNA, 25 bp, SARS Virus
ctactgcttcacaccataggtaata

SEQ ID NO: 218051 - DNA, 25 bp, SARS Virus
tactgcttcactacataggtaatat

SEQ ID NO: 218052 - DNA, 25 bp, SARS Virus
actgcttcactcaataggtaatata

SEQ ID NO: 218053 - DNA, 25 bp, SARS Virus
ctgcttcactccataggtaatatac

SEQ ID NO: 218054 - DNA, 25 bp, SARS Virus
tgcttcactccaaaggtaatataca

SEQ ID NO: 218055 - DNA, 25 bp, SARS Virus
gcttcactccataggtaatatacat

SEQ ID NO: 218056 - DNA, 25 bp, SARS Virus
cttcactccataagtaatatacatc

SEQ ID NO: 218057 - DNA, 25 bp, SARS Virus
ttcactccatagataatatacatca

SEQ ID NO: 218058 - DNA, 25 bp, SARS Virus
tcactccataggaaatatacatcat

SEQ ID NO: 218059 - DNA, 25 bp, SARS Virus
cactccataggtaatatacatcatt

SEQ ID NO: 218060 - DNA, 25 bp, SARS Virus
actccataggtaatatacatcattg

SEQ ID NO: 218061 - DNA, 25 bp, SARS Virus
ctccataggtaaaatacatcattgt

SEQ ID NO: 218062 - DNA, 25 bp, SARS Virus
tccataggtaatatacatcattgtc

SEQ ID NO: 218063 - DNA, 25 bp, SARS Virus
ccataggtaataaacatcattgtcg

SEQ ID NO: 218064 - DNA, 25 bp, SARS Virus
cataggtaatatacatcattgtcgt

SEQ ID NO: 218065 - DNA, 25 bp, SARS Virus
ataggtaatataaatcattgtcgta

SEQ ID NO: 218066 - DNA, 25 bp, SARS Virus
taggtaatatacatcattgtcgtag

SEQ ID NO: 218067 - DNA, 25 bp, SARS Virus
aggtaatatacaacattgtcgtaga

SEQ ID NO: 218068 - DNA, 25 bp, SARS Virus
ggtaatatacataattgtcgtagac

SEQ ID NO: 218069 - DNA, 25 bp, SARS Virus
gtaatatacatcattgtcgtagacc

SEQ ID NO: 218070 - DNA, 25 bp, SARS Virus
taatatacatcaatgtcgtagacca

SEQ ID NO: 218071 - DNA, 25 bp, SARS Virus
aatatacatcatagtcgtagaccac

SEQ ID NO: 218072 - DNA, 25 bp, SARS Virus
atatacatcattatcgtagaccact

SEQ ID NO: 218073 - DNA, 25 bp, SARS Virus
tatacatcattgacgtagaccacta

SEQ ID NO: 218074 - DNA, 25 bp, SARS Virus
atacatcattgtagtagaccactac

SEQ ID NO: 218075 - DNA, 25 bp, SARS Virus
tacatcattgtcatagaccactact

SEQ ID NO: 218076 - DNA, 25 bp, SARS Virus
acatcattgtcgaagaccactacta

SEQ ID NO: 218077 - DNA, 25 bp, SARS Virus
catcattgtcgtagaccactactat

SEQ ID NO: 218078 - DNA, 25 bp, SARS Virus
atcattgtcgtaaaccactactatg

SEQ ID NO: 218079 - DNA, 25 bp, SARS Virus
tcattgtcgtagaccactactatga

SEQ ID NO: 218080 - DNA, 25 bp, SARS Virus
cattgtcgtagaacactactatgac

SEQ ID NO: 218081 - DNA, 25 bp, SARS Virus
attgtcgtagacaactactatgact

SEQ ID NO: 218082 - DNA, 25 bp, SARS Virus
ttgtcgtagaccactactatgactg

SEQ ID NO: 218083 - DNA, 25 bp, SARS Virus
tgtcgtagaccaatactatgactgt

SEQ ID NO: 218084 - DNA, 25 bp, SARS Virus
gtcgtagaccacaactatgactgtg

SEQ ID NO: 218085 - DNA, 25 bp, SARS Virus
tcgtagaccactactatgactgtga

SEQ ID NO: 218086 - DNA, 25 bp, SARS Virus
cgtagaccactaatatgactgtgat

SEQ ID NO: 218087 - DNA, 25 bp, SARS Virus
gtagaccactacaatgactgtgatg

SEQ ID NO: 218088 - DNA, 25 bp, SARS Virus
tagaccactactatgactgtgatgc

SEQ ID NO: 218089 - DNA, 25 bp, SARS Virus
agaccactactaagactgtgatgcc

SEQ ID NO: 218090 - DNA, 25 bp, SARS Virus
gaccactactataactgtgatgccg

SEQ ID NO: 218091 - DNA, 25 bp, SARS Virus
accactactatgactgtgatgccgt

SEQ ID NO: 218092 - DNA, 25 bp, SARS Virus
ccactactatgaatgtgatgccgtc

SEQ ID NO: 218093 - DNA, 25 bp, SARS Virus
cactactatgacagtgatgccgtcc

SEQ ID NO: 218094 - DNA, 25 bp, SARS Virus
actactatgactatgatgccgtcct

SEQ ID NO: 218095 - DNA, 25 bp, SARS Virus
ctactatgactgagatgccgtcctc

SEQ ID NO: 218096 - DNA, 25 bp, SARS Virus
tactatgactgtaatgccgtcctcg

SEQ ID NO: 218097 - DNA, 25 bp, SARS Virus
actatgactgtgatgccgtcctcga

SEQ ID NO: 218098 - DNA, 25 bp, SARS Virus
ctatgactgtgaagccgtcctcgaa

SEQ ID NO: 218099 - DNA, 25 bp, SARS Virus
tatgactgtgataccgtcctcgaaa

SEQ ID NO: 218100 - DNA, 25 bp, SARS Virus
atgactgtgatgacgtcctcgaaat

SEQ ID NO: 218101 - DNA, 25 bp, SARS Virus
tgactgtgatgcagtcctcgaaatt

SEQ ID NO: 218102 - DNA, 25 bp, SARS Virus
gactgtgatgccatcctcgaaattc

SEQ ID NO: 218103 - DNA, 25 bp, SARS Virus
actgtgatgccgacctcgaaattct

SEQ ID NO: 218104 - DNA, 25 bp, SARS Virus
ctgtgatgccgtactcgaaattctc

SEQ ID NO: 218105 - DNA, 25 bp, SARS Virus
tgtgatgccgtcatcgaaattctct

SEQ ID NO: 218106 - DNA, 25 bp, SARS Virus
gtgatgccgtccacgaaattctctt

SEQ ID NO: 218107 - DNA, 25 bp, SARS Virus
tgatgccgtcctagaaattctcttg

SEQ ID NO: 218108 - DNA, 25 bp, SARS Virus
gatgccgtcctcaaaattctcttgc

SEQ ID NO: 218109 - DNA, 25 bp, SARS Virus
atgccgtcctcgaaattctcttgcg

SEQ ID NO: 218110 - DNA, 25 bp, SARS Virus
tgccgtcctcgaaattctcttgcgt

SEQ ID NO: 218111 - DNA, 25 bp, SARS Virus
gccgtcctcgaaattctcttgcgta

SEQ ID NO: 218112 - DNA, 25 bp, SARS Virus
ccgtcctcgaaaatctcttgcgtat

SEQ ID NO: 218113 - DNA, 25 bp, SARS Virus
cgtcctcgaaatactcttgcgtatg

SEQ ID NO: 218114 - DNA, 25 bp, SARS Virus
gtcctcgaaattatcttgcgtatgt

SEQ ID NO: 218115 - DNA, 25 bp, SARS Virus
tcctcgaaattcacttgcgtatgtc

SEQ ID NO: 218116 - DNA, 25 bp, SARS Virus
cctcgaaattctattgcgtatgtcg

SEQ ID NO: 218117 - DNA, 25 bp, SARS Virus
ctcgaaattctcatgcgtatgtcgc

SEQ ID NO: 218118 - DNA, 25 bp, SARS Virus
tcgaaattctctagcgtatgtcgcg

SEQ ID NO: 218119 - DNA, 25 bp, SARS Virus
cgaaattctcttacgtatgtcgcgc

SEQ ID NO: 218120 - DNA, 25 bp, SARS Virus
gaaattctcttgagtatgtcgcgcg

SEQ ID NO: 218121 - DNA, 25 bp, SARS Virus
aaattctcttgcatatgtcgcgcgt

SEQ ID NO: 218122 - DNA, 25 bp, SARS Virus
aattctcttgcgaatgtcgcgcgtc

SEQ ID NO: 218123 - DNA, 25 bp, SARS Virus
attctcttgcgtatgtcgcgcgtcg

SEQ ID NO: 218124 - DNA, 25 bp, SARS Virus
ttctcttgcgtaagtcgcgcgtcgg

SEQ ID NO: 218125 - DNA, 25 bp, SARS Virus
tctcttgcgtatatcgcgcgtcgga

SEQ ID NO: 218126 - DNA, 25 bp, SARS Virus
ctcttgcgtatgacgcgcgtcggag

SEQ ID NO: 218127 - DNA, 25 bp, SARS Virus
tcttgcgtatgtagcgcgtcggaga

SEQ ID NO: 218128 - DNA, 25 bp, SARS Virus
cttgcgtatgtcacgcgtcggagaa

SEQ ID NO: 218129 - DNA, 25 bp, SARS Virus
ttgcgtatgtcgagcgtcggagaag

SEQ ID NO: 218130 - DNA, 25 bp, SARS Virus
tgcgtatgtcgcacgtcggagaagt

SEQ ID NO: 218131 - DNA, 25 bp, SARS Virus
gcgtatgtcgcgagtcggagaagtt

SEQ ID NO: 218132 - DNA, 25 bp, SARS Virus
cgtatgtcgcgcatcggagaagttc

SEQ ID NO: 218133 - DNA, 25 bp, SARS Virus
gtatgtcgcgcgacggagaagttct

SEQ ID NO: 218134 - DNA, 25 bp, SARS Virus
tatgtcgcgcgtaggagaagttcta

SEQ ID NO: 218135 - DNA, 25 bp, SARS Virus
atgtcgcgcgtcagagaagttctaa

SEQ ID NO: 218136 - DNA, 25 bp, SARS Virus
tgtcgcgcgtcgaagaagttctaat

SEQ ID NO: 218137 - DNA, 25 bp, SARS Virus
gtcgcgcgtcggagaagttctaatt

SEQ ID NO: 218138 - DNA, 25 bp, SARS Virus
tcgcgcgtcggaaaagttctaattt

SEQ ID NO: 218139 - DNA, 25 bp, SARS Virus
cgcgcgtcggagaagttctaatttt

SEQ ID NO: 218140 - DNA, 25 bp, SARS Virus
gcgcgtcggagaagttctaattttg

SEQ ID NO: 218141 - DNA, 25 bp, SARS Virus
cgcgtcggagaaattctaattttgg

SEQ ID NO: 218142 - DNA, 25 bp, SARS Virus
gcgtcggagaagatctaattttggt

SEQ ID NO: 218143 - DNA, 25 bp, SARS Virus
cgtcggagaagtactaattttggta

SEQ ID NO: 218144 - DNA, 25 bp, SARS Virus
gtcggagaagttataattttggtac

SEQ ID NO: 218145 - DNA, 25 bp, SARS Virus
tcggagaagttcaaattttggtaca

SEQ ID NO: 218146 - DNA, 25 bp, SARS Virus
cggagaagttctaattttggtacac

SEQ ID NO: 218147 - DNA, 25 bp, SARS Virus
ggagaagttctaattttggtacaca

SEQ ID NO: 218148 - DNA, 25 bp, SARS Virus
gagaagttctaaatttggtacacag

SEQ ID NO: 218149 - DNA, 25 bp, SARS Virus
agaagttctaatattggtacacagt

SEQ ID NO: 218150 - DNA, 25 bp, SARS Virus
gaagttctaattatggtacacagtg

SEQ ID NO: 218151 - DNA, 25 bp, SARS Virus
aagttctaatttaggtacacagtgt

SEQ ID NO: 218152 - DNA, 25 bp, SARS Virus
agttctaattttagtacacagtgta

SEQ ID NO: 218153 - DNA, 25 bp, SARS Virus
gttctaattttgatacacagtgtat

SEQ ID NO: 218154 - DNA, 25 bp, SARS Virus
ttctaattttggaacacagtgtatt

SEQ ID NO: 218155 - DNA, 25 bp, SARS Virus
tctaattttggtacacagtgtattg

SEQ ID NO: 218156 - DNA, 25 bp, SARS Virus
ctaattttggtaaacagtgtattgg

SEQ ID NO: 218157 - DNA, 25 bp, SARS Virus
taattttggtacacagtgtattggt

SEQ ID NO: 218158 - DNA, 25 bp, SARS Virus
aattttggtacaaagtgtattggtt

SEQ ID NO: 218159 - DNA, 25 bp, SARS Virus
attttggtacacagtgtattggtta

SEQ ID NO: 218160 - DNA, 25 bp, SARS Virus
ttttggtacacaatgtattggttaa

SEQ ID NO: 218161 - DNA, 25 bp, SARS Virus
tttggtacacagagtattggttaac

SEQ ID NO: 218162 - DNA, 25 bp, SARS Virus
ttggtacacagtatattggttaacc

SEQ ID NO: 218163 - DNA, 25 bp, SARS Virus
tggtacacagtgaattggttaaccg

SEQ ID NO: 218164 - DNA, 25 bp, SARS Virus
ggtacacagtgtattggttaaccgt

SEQ ID NO: 218165 - DNA, 25 bp, SARS Virus
gtacacagtgtaatggttaaccgta

SEQ ID NO: 218166 - DNA, 25 bp, SARS Virus
tacacagtgtataggttaaccgtaa

SEQ ID NO: 218167 - DNA, 25 bp, SARS Virus
acacagtgtattagttaaccgtaac

SEQ ID NO: 218168 - DNA, 25 bp, SARS Virus
cacagtgtattgattaaccgtaaca

SEQ ID NO: 218169 - DNA, 25 bp, SARS Virus
aatgggagtactcaatgtactccaa

SEQ ID NO: 218170 - DNA, 25 bp, SARS Virus
atgggagtactacatgtactccaaa

SEQ ID NO: 218171 - DNA, 25 bp, SARS Virus
tgggagtactaactgtactccaaat

SEQ ID NO: 218172 - DNA, 25 bp, SARS Virus
gggagtactaaacgtactccaaatt

SEQ ID NO: 218173 - DNA, 25 bp, SARS Virus
ggagtactaaatctactccaaatta

SEQ ID NO: 218174 - DNA, 25 bp, SARS Virus
gagtactaaatgcactccaaattaa

SEQ ID NO: 218175 - DNA, 25 bp, SARS Virus
agtactaaatgtcctccaaattaaa

SEQ ID NO: 218176 - DNA, 25 bp, SARS Virus
gtactaaatgtactccaaattaaaa

SEQ ID NO: 218177 - DNA, 25 bp, SARS Virus
tactaaatgtaccccaaattaaaaa

SEQ ID NO: 218178 - DNA, 25 bp, SARS Virus
actaaatgtactccaaattaaaaac

SEQ ID NO: 218179 - DNA, 25 bp, SARS Virus
ctaaatgtactccaaattaaaaaca

SEQ ID NO: 218180 - DNA, 25 bp, SARS Virus
taaatgtactcccaattaaaaacat

SEQ ID NO: 218181 - DNA, 25 bp, SARS Virus
aaatgtactccacattaaaaacatt

SEQ ID NO: 218182 - DNA, 25 bp, SARS Virus
aatgtactccaacttaaaaacattg

SEQ ID NO: 218183 - DNA, 25 bp, SARS Virus
atgtactccaaactaaaaacattgt

SEQ ID NO: 218184 - DNA, 25 bp, SARS Virus
tgtactccaaatcaaaaacattgta

SEQ ID NO: 218185 - DNA, 25 bp, SARS Virus
gtactccaaattcaaaacattgtag

SEQ ID NO: 218186 - DNA, 25 bp, SARS Virus
tactccaaattacaaacattgtagt

SEQ ID NO: 218187 - DNA, 25 bp, SARS Virus
actccaaattaacaacattgtagtc

SEQ ID NO: 218188 - DNA, 25 bp, SARS Virus
ctccaaattaaacacattgtagtcg

SEQ ID NO: 218189 - DNA, 25 bp, SARS Virus
tccaaattaaaaccattgtagtcgt

SEQ ID NO: 218190 - DNA, 25 bp, SARS Virus
ccaaattaaaaacattgtagtcgtg

SEQ ID NO: 218191 - DNA, 25 bp, SARS Virus
caaattaaaaaccttgtagtcgtgg

SEQ ID NO: 218192 - DNA, 25 bp, SARS Virus
aaattaaaaacactgtagtcgtggt

SEQ ID NO: 218193 - DNA, 25 bp, SARS Virus
aattaaaaacatcgtagtcgtggta

SEQ ID NO: 218194 - DNA, 25 bp, SARS Virus
attaaaaacattctagtcgtggtag

SEQ ID NO: 218195 - DNA, 25 bp, SARS Virus
ttaaaaacattgcagtcgtggtagg

SEQ ID NO: 218196 - DNA, 25 bp, SARS Virus
taaaaacattgtcgtcgtggtaggt

SEQ ID NO: 218197 - DNA, 25 bp, SARS Virus
aaaaacattgtactcgtggtaggtt

SEQ ID NO: 218198 - DNA, 25 bp, SARS Virus
aaaacattgtagccgtggtaggttc

SEQ ID NO: 218199 - DNA, 25 bp, SARS Virus
aaacattgtagtcgtggtaggttca

SEQ ID NO: 218200 - DNA, 25 bp, SARS Virus
aacattgtagtcctggtaggttcat

SEQ ID NO: 218201 - DNA, 25 bp, SARS Virus
acattgtagtcgcggtaggttcata

SEQ ID NO: 218202 - DNA, 25 bp, SARS Virus
cattgtagtcgtcgtaggttcatac

SEQ ID NO: 218203 - DNA, 25 bp, SARS Virus
attgtagtcgtgctaggttcataca

SEQ ID NO: 218204 - DNA, 25 bp, SARS Virus
ttgtagtcgtggcaggttcatacaa

SEQ ID NO: 218205 - DNA, 25 bp, SARS Virus
tgtagtcgtggtcggttcatacaac

SEQ ID NO: 218206 - DNA, 25 bp, SARS Virus
gtagtcgtggtacgttcatacaacc

SEQ ID NO: 218207 - DNA, 25 bp, SARS Virus
tagtcgtggtagcttcatacaacct

SEQ ID NO: 218208 - DNA, 25 bp, SARS Virus
agtcgtggtaggctcatacaacctg

SEQ ID NO: 218209 - DNA, 25 bp, SARS Virus
gtcgtggtaggtccatacaacctgg

SEQ ID NO: 218210 - DNA, 25 bp, SARS Virus
tcgtggtaggttcatacaacctggt

SEQ ID NO: 218211 - DNA, 25 bp, SARS Virus
cgtggtaggttcctacaacctggtt

SEQ ID NO: 218212 - DNA, 25 bp, SARS Virus
gtggtaggttcacacaacctggttt

SEQ ID NO: 218213 - DNA, 25 bp, SARS Virus
tggtaggttcatccaacctggtttg

SEQ ID NO: 218214 - DNA, 25 bp, SARS Virus
ggtaggttcatacaacctggtttga

SEQ ID NO: 218215 - DNA, 25 bp, SARS Virus
gtaggttcataccacctggtttgac

SEQ ID NO: 218216 - DNA, 25 bp, SARS Virus
taggttcatacaccctggtttgacg

SEQ ID NO: 218217 - DNA, 25 bp, SARS Virus
aggttcatacaacctggtttgacga

SEQ ID NO: 218218 - DNA, 25 bp, SARS Virus
ggttcatacaacctggtttgacgac

SEQ ID NO: 218219 - DNA, 25 bp, SARS Virus
gttcatacaacccggtttgacgaca

SEQ ID NO: 218220 - DNA, 25 bp, SARS Virus
ttcatacaacctcgtttgacgacag

SEQ ID NO: 218221 - DNA, 25 bp, SARS Virus
tcatacaacctgctttgacgacagg

SEQ ID NO: 218222 - DNA, 25 bp, SARS Virus
catacaacctggcttgacgacaggt

SEQ ID NO: 218223 - DNA, 25 bp, SARS Virus
atacaacctggtctgacgacaggta

SEQ ID NO: 218224 - DNA, 25 bp, SARS Virus
tacaacctggttcgacgacaggtat

SEQ ID NO: 218225 - DNA, 25 bp, SARS Virus
acaacctggtttcacgacaggtata

SEQ ID NO: 218226 - DNA, 25 bp, SARS Virus
caacctggtttgccgacaggtatac

SEQ ID NO: 218227 - DNA, 25 bp, SARS Virus
aacctggtttgacgacaggtataca

SEQ ID NO: 218228 - DNA, 25 bp, SARS Virus
acctggtttgaccacaggtatacag

SEQ ID NO: 218229 - DNA, 25 bp, SARS Virus
cctggtttgacgccaggtatacagt

SEQ ID NO: 218230 - DNA, 25 bp, SARS Virus
ctggtttgacgacaggtatacagta

SEQ ID NO: 218231 - DNA, 25 bp, SARS Virus
tggtttgacgaccggtatacagtat

SEQ ID NO: 218232 - DNA, 25 bp, SARS Virus
ggtttgacgacacgtatacagtatc

SEQ ID NO: 218233 - DNA, 25 bp, SARS Virus
gtttgacgacagctatacagtatct

SEQ ID NO: 218234 - DNA, 25 bp, SARS Virus
tttgacgacaggcatacagtatctg

SEQ ID NO: 218235 - DNA, 25 bp, SARS Virus
ttgacgacaggtctacagtatctgt

SEQ ID NO: 218236 - DNA, 25 bp, SARS Virus
tgacgacaggtacacagtatctgta

SEQ ID NO: 218237 - DNA, 25 bp, SARS Virus
gacgacaggtatccagtatctgtat

SEQ ID NO: 218238 - DNA, 25 bp, SARS Virus
acgacaggtatacagtatctgtata

SEQ ID NO: 218239 - DNA, 25 bp, SARS Virus
cgacaggtataccgtatctgtatag

SEQ ID NO: 218240 - DNA, 25 bp, SARS Virus
gacaggtatacactatctgtatagg

SEQ ID NO: 218241 - DNA, 25 bp, SARS Virus
acaggtatacagcatctgtataggt

SEQ ID NO: 218242 - DNA, 25 bp, SARS Virus
caggtatacagtctctgtataggtg

SEQ ID NO: 218243 - DNA, 25 bp, SARS Virus
aggtatacagtacctgtataggtgt

SEQ ID NO: 218244 - DNA, 25 bp, SARS Virus
ggtatacagtatctgtataggtgtt

SEQ ID NO: 218245 - DNA, 25 bp, SARS Virus
gtatacagtatccgtataggtgttc

SEQ ID NO: 218246 - DNA, 25 bp, SARS Virus
tatacagtatctctataggtgttcg

SEQ ID NO: 218247 - DNA, 25 bp, SARS Virus
atacagtatctgcataggtgttcga

SEQ ID NO: 218248 - DNA, 25 bp, SARS Virus
tacagtatctgtctaggtgttcgac

SEQ ID NO: 218249 - DNA, 25 bp, SARS Virus
acagtatctgtacaggtgttcgaca

SEQ ID NO: 218250 - DNA, 25 bp, SARS Virus
cagtatctgtatcggtgttcgacac

SEQ ID NO: 218251 - DNA, 25 bp, SARS Virus
agtatctgtatacgtgttcgacaca

SEQ ID NO: 218252 - DNA, 25 bp, SARS Virus
gtatctgtatagctgttcgacacac

SEQ ID NO: 218253 - DNA, 25 bp, SARS Virus
tatctgtataggcgttcgacacaca

SEQ ID NO: 218254 - DNA, 25 bp, SARS Virus
atctgtataggtcttcgacacacac

SEQ ID NO: 218255 - DNA, 25 bp, SARS Virus
tctgtataggtgctcgacacacacc

SEQ ID NO: 218256 - DNA, 25 bp, SARS Virus
ctgtataggtgtccgacacacacct

SEQ ID NO: 218257 - DNA, 25 bp, SARS Virus
tgtataggtgttcgacacacacctc

SEQ ID NO: 218258 - DNA, 25 bp, SARS Virus
gtataggtgttccacacacacctct

SEQ ID NO: 218259 - DNA, 25 bp, SARS Virus
tataggtgttcgccacacacctcta

SEQ ID NO: 218260 - DNA, 25 bp, SARS Virus
ataggtgttcgacacacacctctaa

SEQ ID NO: 218261 - DNA, 25 bp, SARS Virus
taggtgttcgacccacacctctaat

SEQ ID NO: 218262 - DNA, 25 bp, SARS Virus
aggtgttcgacacacacctctaatc

SEQ ID NO: 218263 - DNA, 25 bp, SARS Virus
ggtgttcgacacccacctctaatca

SEQ ID NO: 218264 - DNA, 25 bp, SARS Virus
gtgttcgacacacacctctaatcac

SEQ ID NO: 218265 - DNA, 25 bp, SARS Virus
tgttcgacacacccctctaatcaca

SEQ ID NO: 218266 - DNA, 25 bp, SARS Virus
gttcgacacacacctctaatcacaa

SEQ ID NO: 218267 - DNA, 25 bp, SARS Virus
ttcgacacacacctctaatcacaac

SEQ ID NO: 218268 - DNA, 25 bp, SARS Virus
tcgacacacacccctaatcacaaca

SEQ ID NO: 218269 - DNA, 25 bp, SARS Virus
cgacacacacctctaatcacaacag

SEQ ID NO: 218270 - DNA, 25 bp, SARS Virus
gacacacacctccaatcacaacagg

SEQ ID NO: 218271 - DNA, 25 bp, SARS Virus
acacacacctctcatcacaacaggt

SEQ ID NO: 218272 - DNA, 25 bp, SARS Virus
cacacacctctactcacaacaggtg

SEQ ID NO: 218273 - DNA, 25 bp, SARS Virus
acacacctctaaccacaacaggtgt

SEQ ID NO: 218274 - DNA, 25 bp, SARS Virus
cacacctctaatcacaacaggtgtc

SEQ ID NO: 218275 - DNA, 25 bp, SARS Virus
acacctctaatcccaacaggtgtca

SEQ ID NO: 218276 - DNA, 25 bp, SARS Virus
cacctctaatcacaacaggtgtcaa

SEQ ID NO: 218277 - DNA, 25 bp, SARS Virus
acctctaatcaccacaggtgtcaac

SEQ ID NO: 218278 - DNA, 25 bp, SARS Virus
cctctaatcacaccaggtgtcaaca

SEQ ID NO: 218279 - DNA, 25 bp, SARS Virus
ctctaatcacaacaggtgtcaacac

SEQ ID NO: 218280 - DNA, 25 bp, SARS Virus
tctaatcacaaccggtgtcaacact

SEQ ID NO: 218281 - DNA, 25 bp, SARS Virus
ctaatcacaacacgtgtcaacactt

SEQ ID NO: 218282 - DNA, 25 bp, SARS Virus
taatcacaacagctgtcaacacttg

SEQ ID NO: 218283 - DNA, 25 bp, SARS Virus
aatcacaacaggcgtcaacacttgt

SEQ ID NO: 218284 - DNA, 25 bp, SARS Virus
atcacaacaggtctcaacacttgtg

SEQ ID NO: 218285 - DNA, 25 bp, SARS Virus
tcacaacaggtgccaacacttgtga

SEQ ID NO: 218286 - DNA, 25 bp, SARS Virus
cacaacaggtgtcaacacttgtgaa

SEQ ID NO: 218287 - DNA, 25 bp, SARS Virus
acaacaggtgtccacacttgtgaaa

SEQ ID NO: 218288 - DNA, 25 bp, SARS Virus
caacaggtgtcaccacttgtgaaaa

SEQ ID NO: 218289 - DNA, 25 bp, SARS Virus
aacaggtgtcaacacttgtgaaaat

SEQ ID NO: 218290 - DNA, 25 bp, SARS Virus
acaggtgtcaacccttgtgaaaata

SEQ ID NO: 218291 - DNA, 25 bp, SARS Virus
caggtgtcaacacttgtgaaaatat

SEQ ID NO: 218292 - DNA, 25 bp, SARS Virus
aggtgtcaacacctgtgaaaatatc

SEQ ID NO: 218293 - DNA, 25 bp, SARS Virus
ggtgtcaacactcgtgaaaatatca

SEQ ID NO: 218294 - DNA, 25 bp, SARS Virus
gtgtcaacacttctgaaaatatcag

SEQ ID NO: 218295 - DNA, 25 bp, SARS Virus
tgtcaacacttgcgaaaatatcaga

SEQ ID NO: 218296 - DNA, 25 bp, SARS Virus
gtcaacacttgtcaaaatatcagaa

SEQ ID NO: 218297 - DNA, 25 bp, SARS Virus
tcaacacttgtgcaaatatcagaat

SEQ ID NO: 218298 - DNA, 25 bp, SARS Virus
caacacttgtgacaatatcagaatt

SEQ ID NO: 218299 - DNA, 25 bp, SARS Virus
aacacttgtgaacatatcagaattg

SEQ ID NO: 218300 - DNA, 25 bp, SARS Virus
acacttgtgaaactatcagaattgg

SEQ ID NO: 218301 - DNA, 25 bp, SARS Virus
cacttgtgaaaacatcagaattgga

SEQ ID NO: 218302 - DNA, 25 bp, SARS Virus
acttgtgaaaatctcagaattggag

SEQ ID NO: 218303 - DNA, 25 bp, SARS Virus
cttgtgaaaataccagaattggagg

SEQ ID NO: 218304 - DNA, 25 bp, SARS Virus
ttgtgaaaatatcagaattggaggg

SEQ ID NO: 218305 - DNA, 25 bp, SARS Virus
tgtgaaaatatccgaattggagggc

SEQ ID NO: 218306 - DNA, 25 bp, SARS Virus
gtgaaaatatcacaattggagggcg

SEQ ID NO: 218307 - DNA, 25 bp, SARS Virus
tgaaaatatcagcattggagggcgt

SEQ ID NO: 218308 - DNA, 25 bp, SARS Virus
gaaaatatcagacttggagggcgtc

SEQ ID NO: 218309 - DNA, 25 bp, SARS Virus
aaaatatcagaactggagggcgtcc

SEQ ID NO: 218310 - DNA, 25 bp, SARS Virus
aaatatcagaatcggagggcgtccc

SEQ ID NO: 218311 - DNA, 25 bp, SARS Virus
aatatcagaattcgagggcgtccct

SEQ ID NO: 218312 - DNA, 25 bp, SARS Virus
atatcagaattgcagggcgtcccta

SEQ ID NO: 218313 - DNA, 25 bp, SARS Virus
tatcagaattggcgggcgtccctat

SEQ ID NO: 218314 - DNA, 25 bp, SARS Virus
atcagaattggacggcgtccctatt

SEQ ID NO: 218315 - DNA, 25 bp, SARS Virus
tcagaattggagcgcgtccctattc

SEQ ID NO: 218316 - DNA, 25 bp, SARS Virus
cagaattggaggccgtccctattct

SEQ ID NO: 218317 - DNA, 25 bp, SARS Virus
agaattggagggcgtccctattctc

SEQ ID NO: 218318 - DNA, 25 bp, SARS Virus
gaattggagggcctccctattctct

SEQ ID NO: 218319 - DNA, 25 bp, SARS Virus
aattggagggcgcccctattctctg

SEQ ID NO: 218320 - DNA, 25 bp, SARS Virus
attggagggcgtccctattctctga

SEQ ID NO: 218321 - DNA, 25 bp, SARS Virus
ttggagggcgtccctattctctgag

SEQ ID NO: 218322 - DNA, 25 bp, SARS Virus
tggagggcgtccctattctctgaga

SEQ ID NO: 218323 - DNA, 25 bp, SARS Virus
ggagggcgtccccattctctgagaa

SEQ ID NO: 218324 - DNA, 25 bp, SARS Virus
gagggcgtccctcttctctgagaaa

SEQ ID NO: 218325 - DNA, 25 bp, SARS Virus
agggcgtccctactctctgagaaat

SEQ ID NO: 218326 - DNA, 25 bp, SARS Virus
gggcgtccctatcctctgagaaatc

SEQ ID NO: 218327 - DNA, 25 bp, SARS Virus
ggcgtccctattctctgagaaatca

SEQ ID NO: 218328 - DNA, 25 bp, SARS Virus
gcgtccctattccctgagaaatcaa

SEQ ID NO: 218329 - DNA, 25 bp, SARS Virus
cgtccctattctctgagaaatcaaa

SEQ ID NO: 218330 - DNA, 25 bp, SARS Virus
gtccctattctccgagaaatcaaac

SEQ ID NO: 218331 - DNA, 25 bp, SARS Virus
tccctattctctcagaaatcaaaca

SEQ ID NO: 218332 - DNA, 25 bp, SARS Virus
ccctattctctgcgaaatcaaacag

SEQ ID NO: 218333 - DNA, 25 bp, SARS Virus
cctattctctgacaaatcaaacagt

SEQ ID NO: 218334 - DNA, 25 bp, SARS Virus
ctattctctgagcaatcaaacagtt

SEQ ID NO: 218335 - DNA, 25 bp, SARS Virus
tattctctgagacatcaaacagttc

SEQ ID NO: 218336 - DNA, 25 bp, SARS Virus
attctctgagaactcaaacagttca

SEQ ID NO: 218337 - DNA, 25 bp, SARS Virus
ttctctgagaaaccaaacagttcac

SEQ ID NO: 218338 - DNA, 25 bp, SARS Virus
tctctgagaaatcaaacagttcact

SEQ ID NO: 218339 - DNA, 25 bp, SARS Virus
ctctgagaaatccaacagttcactt

SEQ ID NO: 218340 - DNA, 25 bp, SARS Virus
tctgagaaatcacacagttcacttt

SEQ ID NO: 218341 - DNA, 25 bp, SARS Virus
ctgagaaatcaaccagttcactttc

SEQ ID NO: 218342 - DNA, 25 bp, SARS Virus
tgagaaatcaaacagttcactttct

SEQ ID NO: 218343 - DNA, 25 bp, SARS Virus
gagaaatcaaaccgttcactttctt

SEQ ID NO: 218344 - DNA, 25 bp, SARS Virus
agaaatcaaacacttcactttcttg

SEQ ID NO: 218345 - DNA, 25 bp, SARS Virus
gaaatcaaacagctcactttcttgg

SEQ ID NO: 218346 - DNA, 25 bp, SARS Virus
aaatcaaacagtccactttcttgga

SEQ ID NO: 218347 - DNA, 25 bp, SARS Virus
aatcaaacagttcactttcttggag

SEQ ID NO: 218348 - DNA, 25 bp, SARS Virus
atcaaacagttccctttcttggagt

SEQ ID NO: 218349 - DNA, 25 bp, SARS Virus
tcaaacagttcactttcttggagtg

SEQ ID NO: 218350 - DNA, 25 bp, SARS Virus
caaacagttcaccttcttggagtgg

SEQ ID NO: 218351 - DNA, 25 bp, SARS Virus
aaacagttcactctcttggagtggc

SEQ ID NO: 218352 - DNA, 25 bp, SARS Virus
aacagttcacttccttggagtggca

SEQ ID NO: 218353 - DNA, 25 bp, SARS Virus
acagttcactttcttggagtggcag

SEQ ID NO: 218354 - DNA, 25 bp, SARS Virus
cagttcactttcctggagtggcagt

SEQ ID NO: 218355 - DNA, 25 bp, SARS Virus
agttcactttctcggagtggcagtt

SEQ ID NO: 218356 - DNA, 25 bp, SARS Virus
gttcactttcttcgagtggcagttc

SEQ ID NO: 218357 - DNA, 25 bp, SARS Virus
ttcactttcttgcagtggcagttct

SEQ ID NO: 218358 - DNA, 25 bp, SARS Virus
tcactttcttggcgtggcagttcta

SEQ ID NO: 218359 - DNA, 25 bp, SARS Virus
cactttcttggactggcagttctac

SEQ ID NO: 218360 - DNA, 25 bp, SARS Virus
actttcttggagcggcagttctact

SEQ ID NO: 218361 - DNA, 25 bp, SARS Virus
ctttcttggagtcgcagttctactt

SEQ ID NO: 218362 - DNA, 25 bp, SARS Virus
tttcttggagtgccagttctacttt

SEQ ID NO: 218363 - DNA, 25 bp, SARS Virus
ttcttggagtggcagttctactttg

SEQ ID NO: 218364 - DNA, 25 bp, SARS Virus
tcttggagtggccgttctactttga

SEQ ID NO: 218365 - DNA, 25 bp, SARS Virus
cttggagtggcacttctactttgag

SEQ ID NO: 218366 - DNA, 25 bp, SARS Virus
ttggagtggcagctctactttgagc

SEQ ID NO: 218367 - DNA, 25 bp, SARS Virus
tggagtggcagtcctactttgagct

SEQ ID NO: 218368 - DNA, 25 bp, SARS Virus
ggagtggcagttctactttgagctg

SEQ ID NO: 218369 - DNA, 25 bp, SARS Virus
gagtggcagttccactttgagctgc

SEQ ID NO: 218370 - DNA, 25 bp, SARS Virus
agtggcagttctcctttgagctgcc

SEQ ID NO: 218371 - DNA, 25 bp, SARS Virus
gtggcagttctactttgagctgccc

SEQ ID NO: 218372 - DNA, 25 bp, SARS Virus
tggcagttctaccttgagctgcccc

SEQ ID NO: 218373 - DNA, 25 bp, SARS Virus
ggcagttctactctgagctgccccg

SEQ ID NO: 218374 - DNA, 25 bp, SARS Virus
gcagttctacttcgagctgccccga

SEQ ID NO: 218375 - DNA, 25 bp, SARS Virus
cagttctactttcagctgccccgag

SEQ ID NO: 218376 - DNA, 25 bp, SARS Virus
agttctactttgcgctgccccgaga

SEQ ID NO: 218377 - DNA, 25 bp, SARS Virus
gttctactttgacctgccccgagag

SEQ ID NO: 218378 - DNA, 25 bp, SARS Virus
ttctactttgagctgccccgagagg

SEQ ID NO: 218379 - DNA, 25 bp, SARS Virus
tctactttgagccgccccgagaggt

SEQ ID NO: 218380 - DNA, 25 bp, SARS Virus
ctactttgagctcccccgagaggtc

SEQ ID NO: 218381 - DNA, 25 bp, SARS Virus
tactttgagctgccccgagaggtct

SEQ ID NO: 218382 - DNA, 25 bp, SARS Virus
actttgagctgccccgagaggtctc

SEQ ID NO: 218383 - DNA, 25 bp, SARS Virus
ctttgagctgccccgagaggtctca

SEQ ID NO: 218384 - DNA, 25 bp, SARS Virus
tttgagctgccccgagaggtctcac

SEQ ID NO: 218385 - DNA, 25 bp, SARS Virus
ttgagctgcccccagaggtctcaca

SEQ ID NO: 218386 - DNA, 25 bp, SARS Virus
tgagctgccccgcgaggtctcacac

SEQ ID NO: 218387 - DNA, 25 bp, SARS Virus
gagctgccccgacaggtctcacacc

SEQ ID NO: 218388 - DNA, 25 bp, SARS Virus
agctgccccgagcggtctcacacca

SEQ ID NO: 218389 - DNA, 25 bp, SARS Virus
gctgccccgagacgtctcacaccat

SEQ ID NO: 218390 - DNA, 25 bp, SARS Virus
ctgccccgagagctctcacaccatg

SEQ ID NO: 218391 - DNA, 25 bp, SARS Virus
tgccccgagaggcctcacaccatgt

SEQ ID NO: 218392 - DNA, 25 bp, SARS Virus
gccccgagaggtctcacaccatgtg

SEQ ID NO: 218393 - DNA, 25 bp, SARS Virus
ccccgagaggtcccacaccatgtgt

SEQ ID NO: 218394 - DNA, 25 bp, SARS Virus
cccgagaggtctcacaccatgtgtt

SEQ ID NO: 218395 - DNA, 25 bp, SARS Virus
ccgagaggtctcccaccatgtgtta

SEQ ID NO: 218396 - DNA, 25 bp, SARS Virus
cgagaggtctcacaccatgtgttaa

SEQ ID NO: 218397 - DNA, 25 bp, SARS Virus
gagaggtctcaccccatgtgttaaa

SEQ ID NO: 218398 - DNA, 25 bp, SARS Virus
agaggtctcacaccatgtgttaaaa

SEQ ID NO: 218399 - DNA, 25 bp, SARS Virus
gaggtctcacaccatgtgttaaaac

SEQ ID NO: 218400 - DNA, 25 bp, SARS Virus
aggtctcacaccctgtgttaaaaca

SEQ ID NO: 218401 - DNA, 25 bp, SARS Virus
ggtctcacaccacgtgttaaaacag

SEQ ID NO: 218402 - DNA, 25 bp, SARS Virus
gtctcacaccatctgttaaaacagt

SEQ ID NO: 218403 - DNA, 25 bp, SARS Virus
tctcacaccatgcgttaaaacagtg

SEQ ID NO: 218404 - DNA, 25 bp, SARS Virus
ctcacaccatgtcttaaaacagtgg

SEQ ID NO: 218405 - DNA, 25 bp, SARS Virus
tcacaccatgtgctaaaacagtggt

SEQ ID NO: 218406 - DNA, 25 bp, SARS Virus
cacaccatgtgtcaaaacagtggtg

SEQ ID NO: 218407 - DNA, 25 bp, SARS Virus
acaccatgtgttcaaacagtggtgc

SEQ ID NO: 218408 - DNA, 25 bp, SARS Virus
caccatgtgttacaacagtggtgcg

SEQ ID NO: 218409 - DNA, 25 bp, SARS Virus
accatgtgttaacacagtggtgcga

SEQ ID NO: 218410 - DNA, 25 bp, SARS Virus
ccatgtgttaaaccagtggtgcgaa

SEQ ID NO: 218411 - DNA, 25 bp, SARS Virus
catgtgttaaaacagtggtgcgaat

SEQ ID NO: 218412 - DNA, 25 bp, SARS Virus
atgtgttaaaaccgtggtgcgaatt

SEQ ID NO: 218413 - DNA, 25 bp, SARS Virus
tgtgttaaaacactggtgcgaattc

SEQ ID NO: 218414 - DNA, 25 bp, SARS Virus
gtgttaaaacagcggtgcgaattct

SEQ ID NO: 218415 - DNA, 25 bp, SARS Virus
tgttaaaacagtcgtgcgaattctt

SEQ ID NO: 218416 - DNA, 25 bp, SARS Virus
gttaaaacagtgctgcgaattcttt

SEQ ID NO: 218417 - DNA, 25 bp, SARS Virus
ttaaaacagtggcgcgaattcttta

SEQ ID NO: 218418 - DNA, 25 bp, SARS Virus
taaaacagtggtccgaattctttaa

SEQ ID NO: 218419 - DNA, 25 bp, SARS Virus
aaaacagtggtgcgaattctttaag

SEQ ID NO: 218420 - DNA, 25 bp, SARS Virus
aaacagtggtgccaattctttaagt

SEQ ID NO: 218421 - DNA, 25 bp, SARS Virus
aacagtggtgcgcattctttaagtt

SEQ ID NO: 218422 - DNA, 25 bp, SARS Virus
acagtggtgcgacttctttaagttg

SEQ ID NO: 218423 - DNA, 25 bp, SARS Virus
cagtggtgcgaactctttaagttgt

SEQ ID NO: 218424 - DNA, 25 bp, SARS Virus
agtggtgcgaatcctttaagttgtg

SEQ ID NO: 218425 - DNA, 25 bp, SARS Virus
gtggtgcgaattctttaagttgtgg

SEQ ID NO: 218426 - DNA, 25 bp, SARS Virus
tggtgcgaattccttaagttgtgga

SEQ ID NO: 218427 - DNA, 25 bp, SARS Virus
ggtgcgaattctctaagttgtggat

SEQ ID NO: 218428 - DNA, 25 bp, SARS Virus
gtgcgaattcttcaagttgtggatt

SEQ ID NO: 218429 - DNA, 25 bp, SARS Virus
tgcgaattctttcagttgtggattg

SEQ ID NO: 218430 - DNA, 25 bp, SARS Virus
gcgaattctttacgttgtggattga

SEQ ID NO: 218431 - DNA, 25 bp, SARS Virus
cgaattctttaacttgtggattgag

SEQ ID NO: 218432 - DNA, 25 bp, SARS Virus
gaattctttaagctgtggattgaga

SEQ ID NO: 218433 - DNA, 25 bp, SARS Virus
aattctttaagtcgtggattgagac

SEQ ID NO: 218434 - DNA, 25 bp, SARS Virus
attctttaagttctggattgagaca

SEQ ID NO: 218435 - DNA, 25 bp, SARS Virus
ttctttaagttgcggattgagacat

SEQ ID NO: 218436 - DNA, 25 bp, SARS Virus
tctttaagttgtcgattgagacatg

SEQ ID NO: 218437 - DNA, 25 bp, SARS Virus
ctttaagttgtgcattgagacatgc

SEQ ID NO: 218438 - DNA, 25 bp, SARS Virus
tttaagttgtggcttgagacatgcg

SEQ ID NO: 218439 - DNA, 25 bp, SARS Virus
ttaagttgtggactgagacatgcga

SEQ ID NO: 218440 - DNA, 25 bp, SARS Virus
taagttgtggatcgagacatgcgac

SEQ ID NO: 218441 - DNA, 25 bp, SARS Virus
aagttgtggattcagacatgcgaca

SEQ ID NO: 218442 - DNA, 25 bp, SARS Virus
agttgtggattgcgacatgcgacag

SEQ ID NO: 218443 - DNA, 25 bp, SARS Virus
gttgtggattgacacatgcgacagg

SEQ ID NO: 218444 - DNA, 25 bp, SARS Virus
ttgtggattgagccatgcgacagga

SEQ ID NO: 218445 - DNA, 25 bp, SARS Virus
tgtggattgagacatgcgacaggac

SEQ ID NO: 218446 - DNA, 25 bp, SARS Virus
gtggattgagacctgcgacaggact

SEQ ID NO: 218447 - DNA, 25 bp, SARS Virus
tggattgagacacgcgacaggactt

SEQ ID NO: 218448 - DNA, 25 bp, SARS Virus
ggattgagacatccgacaggactta

SEQ ID NO: 218449 - DNA, 25 bp, SARS Virus
gattgagacatgcgacaggacttat

SEQ ID NO: 218450 - DNA, 25 bp, SARS Virus
attgagacatgccacaggacttatc

SEQ ID NO: 218451 - DNA, 25 bp, SARS Virus
ttgagacatgcgccaggacttatcc

SEQ ID NO: 218452 - DNA, 25 bp, SARS Virus
tgagacatgcgacaggacttatcct

SEQ ID NO: 218453 - DNA, 25 bp, SARS Virus
gagacatgcgaccggacttatcctg

SEQ ID NO: 218454 - DNA, 25 bp, SARS Virus
agacatgcgacacgacttatcctgg

SEQ ID NO: 218455 - DNA, 25 bp, SARS Virus
gacatgcgacagcacttatcctggt

SEQ ID NO: 218456 - DNA, 25 bp, SARS Virus
acatgcgacaggccttatcctggtt

SEQ ID NO: 218457 - DNA, 25 bp, SARS Virus
catgcgacaggacttatcctggtta

SEQ ID NO: 218458 - DNA, 25 bp, SARS Virus
atgcgacaggacctatcctggttag

SEQ ID NO: 218459 - DNA, 25 bp, SARS Virus
tgcgacaggactcatcctggttaga

SEQ ID NO: 218460 - DNA, 25 bp, SARS Virus
gcgacaggacttctcctggttagag

SEQ ID NO: 218461 - DNA, 25 bp, SARS Virus
cgacaggacttaccctggttagaga

SEQ ID NO: 218462 - DNA, 25 bp, SARS Virus
gacaggacttatcctggttagagac

SEQ ID NO: 218463 - DNA, 25 bp, SARS Virus
acaggacttatcctggttagagaca

SEQ ID NO: 218464 - DNA, 25 bp, SARS Virus
caggacttatcccggttagagacat

SEQ ID NO: 218465 - DNA, 25 bp, SARS Virus
aggacttatcctcgttagagacatt

SEQ ID NO: 218466 - DNA, 25 bp, SARS Virus
ggacttatcctgcttagagacattc

SEQ ID NO: 218467 - DNA, 25 bp, SARS Virus
gacttatcctggctagagacattct

SEQ ID NO: 218468 - DNA, 25 bp, SARS Virus
acttatcctggtcagagacattctc

SEQ ID NO: 218469 - DNA, 25 bp, SARS Virus
cttatcctggttcgagacattctcg

SEQ ID NO: 218470 - DNA, 25 bp, SARS Virus
ttatcctggttacagacattctcgg

SEQ ID NO: 218471 - DNA, 25 bp, SARS Virus
tatcctggttagcgacattctcggt

SEQ ID NO: 218472 - DNA, 25 bp, SARS Virus
atcctggttagacacattctcggtc

SEQ ID NO: 218473 - DNA, 25 bp, SARS Virus
tcctggttagagccattctcggtcg

SEQ ID NO: 218474 - DNA, 25 bp, SARS Virus
cctggttagagacattctcggtcgg

SEQ ID NO: 218475 - DNA, 25 bp, SARS Virus
ctggttagagaccttctcggtcggt

SEQ ID NO: 218476 - DNA, 25 bp, SARS Virus
tggttagagacactctcggtcggtt

SEQ ID NO: 218477 - DNA, 25 bp, SARS Virus
ggttagagacatcctcggtcggttt

SEQ ID NO: 218478 - DNA, 25 bp, SARS Virus
gttagagacattctcggtcggtttc

SEQ ID NO: 218479 - DNA, 25 bp, SARS Virus
ttagagacattcccggtcggtttct

SEQ ID NO: 218480 - DNA, 25 bp, SARS Virus
tagagacattctcggtcggtttctt

SEQ ID NO: 218481 - DNA, 25 bp, SARS Virus
agagacattctccgtcggtttcttt

SEQ ID NO: 218482 - DNA, 25 bp, SARS Virus
gagacattctcgctcggtttctttg

SEQ ID NO: 218483 - DNA, 25 bp, SARS Virus
agacattctcggccggtttctttga

SEQ ID NO: 218484 - DNA, 25 bp, SARS Virus
gacattctcggtcggtttctttgac

SEQ ID NO: 218485 - DNA, 25 bp, SARS Virus
acattctcggtccgtttctttgaca

SEQ ID NO: 218486 - DNA, 25 bp, SARS Virus
cattctcggtcgctttctttgacaa

SEQ ID NO: 218487 - DNA, 25 bp, SARS Virus
attctcggtcggcttctttgacaaa

SEQ ID NO: 218488 - DNA, 25 bp, SARS Virus
ttctcggtcggtctctttgacaaag

SEQ ID NO: 218489 - DNA, 25 bp, SARS Virus
tctcggtcggttcctttgacaaaga

SEQ ID NO: 218490 - DNA, 25 bp, SARS Virus
ctcggtcggtttctttgacaaagat

SEQ ID NO: 218491 - DNA, 25 bp, SARS Virus
tcggtcggtttccttgacaaagatg

SEQ ID NO: 218492 - DNA, 25 bp, SARS Virus
cggtcggtttctctgacaaagatgt

SEQ ID NO: 218493 - DNA, 25 bp, SARS Virus
ggtcggtttcttcgacaaagatgtt

SEQ ID NO: 218494 - DNA, 25 bp, SARS Virus
gtcggtttctttcacaaagatgttt

SEQ ID NO: 218495 - DNA, 25 bp, SARS Virus
tcggtttctttgccaaagatgtttc

SEQ ID NO: 218496 - DNA, 25 bp, SARS Virus
cggtttctttgacaaagatgtttca

SEQ ID NO: 218497 - DNA, 25 bp, SARS Virus
ggtttctttgaccaagatgtttcac

SEQ ID NO: 218498 - DNA, 25 bp, SARS Virus
gtttctttgacacagatgtttcacg

SEQ ID NO: 218499 - DNA, 25 bp, SARS Virus
tttctttgacaacgatgtttcacga

SEQ ID NO: 218500 - DNA, 25 bp, SARS Virus
ttctttgacaaacatgtttcacgag

SEQ ID NO: 218501 - DNA, 25 bp, SARS Virus
tctttgacaaagctgtttcacgagg

SEQ ID NO: 218502 - DNA, 25 bp, SARS Virus
ctttgacaaagacgtttcacgagga

SEQ ID NO: 218503 - DNA, 25 bp, SARS Virus
tttgacaaagatctttcacgaggag

SEQ ID NO: 218504 - DNA, 25 bp, SARS Virus
ttgacaaagatgcttcacgaggagt

SEQ ID NO: 218505 - DNA, 25 bp, SARS Virus
tgacaaagatgtctcacgaggagtc

SEQ ID NO: 218506 - DNA, 25 bp, SARS Virus
gacaaagatgttccacgaggagtct

SEQ ID NO: 218507 - DNA, 25 bp, SARS Virus
acaaagatgtttcacgaggagtcta

SEQ ID NO: 218508 - DNA, 25 bp, SARS Virus
caaagatgtttcccgaggagtctac

SEQ ID NO: 218509 - DNA, 25 bp, SARS Virus
aaagatgtttcacgaggagtctaca

SEQ ID NO: 218510 - DNA, 25 bp, SARS Virus
aagatgtttcaccaggagtctacag

SEQ ID NO: 218511 - DNA, 25 bp, SARS Virus
agatgtttcacgcggagtctacaga

SEQ ID NO: 218512 - DNA, 25 bp, SARS Virus
gatgtttcacgacgagtctacagaa

SEQ ID NO: 218513 - DNA, 25 bp, SARS Virus
atgtttcacgagcagtctacagaaa

SEQ ID NO: 218514 - DNA, 25 bp, SARS Virus
tgtttcacgaggcgtctacagaaac

SEQ ID NO: 218515 - DNA, 25 bp, SARS Virus
gtttcacgaggactctacagaaact

SEQ ID NO: 218516 - DNA, 25 bp, SARS Virus
tttcacgaggagcctacagaaacta

SEQ ID NO: 218517 - DNA, 25 bp, SARS Virus
ttcacgaggagtctacagaaactac

SEQ ID NO: 218518 - DNA, 25 bp, SARS Virus
tcacgaggagtccacagaaactact

SEQ ID NO: 218519 - DNA, 25 bp, SARS Virus
cacgaggagtctccagaaactactg

SEQ ID NO: 218520 - DNA, 25 bp, SARS Virus
acgaggagtctacagaaactactgc

SEQ ID NO: 218521 - DNA, 25 bp, SARS Virus
cgaggagtctaccgaaactactgct

SEQ ID NO: 218522 - DNA, 25 bp, SARS Virus
gaggagtctacacaaactactgctt

SEQ ID NO: 218523 - DNA, 25 bp, SARS Virus
aggagtctacagcaactactgcttc

SEQ ID NO: 218524 - DNA, 25 bp, SARS Virus
ggagtctacagacactactgcttca

SEQ ID NO: 218525 - DNA, 25 bp, SARS Virus
gagtctacagaacctactgcttcac

SEQ ID NO: 218526 - DNA, 25 bp, SARS Virus
agtctacagaaactactgcttcact

SEQ ID NO: 218527 - DNA, 25 bp, SARS Virus
gtctacagaaaccactgcttcactc

SEQ ID NO: 218528 - DNA, 25 bp, SARS Virus
tctacagaaactcctgcttcactcc

SEQ ID NO: 218529 - DNA, 25 bp, SARS Virus
ctacagaaactactgcttcactcca

SEQ ID NO: 218530 - DNA, 25 bp, SARS Virus
tacagaaactaccgcttcactccat

SEQ ID NO: 218531 - DNA, 25 bp, SARS Virus
acagaaactactccttcactccata

SEQ ID NO: 218532 - DNA, 25 bp, SARS Virus
cagaaactactgcttcactccatag

SEQ ID NO: 218533 - DNA, 25 bp, SARS Virus
agaaactactgcctcactccatagg

SEQ ID NO: 218534 - DNA, 25 bp, SARS Virus
gaaactactgctccactccataggt

SEQ ID NO: 218535 - DNA, 25 bp, SARS Virus
aaactactgcttcactccataggta

SEQ ID NO: 218536 - DNA, 25 bp, SARS Virus
aactactgcttccctccataggtaa

SEQ ID NO: 218537 - DNA, 25 bp, SARS Virus
actactgcttcactccataggtaat

SEQ ID NO: 218538 - DNA, 25 bp, SARS Virus
ctactgcttcaccccataggtaata

SEQ ID NO: 218539 - DNA, 25 bp, SARS Virus
tactgcttcactccataggtaatat

SEQ ID NO: 218540 - DNA, 25 bp, SARS Virus
actgcttcactccataggtaatata

SEQ ID NO: 218541 - DNA, 25 bp, SARS Virus
ctgcttcactccctaggtaatatac

SEQ ID NO: 218542 - DNA, 25 bp, SARS Virus
tgcttcactccacaggtaatataca

SEQ ID NO: 218543 - DNA, 25 bp, SARS Virus
gcttcactccatcggtaatatacat

SEQ ID NO: 218544 - DNA, 25 bp, SARS Virus
cttcactccatacgtaatatacatc

SEQ ID NO: 218545 - DNA, 25 bp, SARS Virus
ttcactccatagctaatatacatca

SEQ ID NO: 218546 - DNA, 25 bp, SARS Virus
tcactccataggcaatatacatcat

SEQ ID NO: 218547 - DNA, 25 bp, SARS Virus
cactccataggtcatatacatcatt

SEQ ID NO: 218548 - DNA, 25 bp, SARS Virus
actccataggtactatacatcattg

SEQ ID NO: 218549 - DNA, 25 bp, SARS Virus
ctccataggtaacatacatcattgt

SEQ ID NO: 218550 - DNA, 25 bp, SARS Virus
tccataggtaatctacatcattgtc

SEQ ID NO: 218551 - DNA, 25 bp, SARS Virus
ccataggtaatacacatcattgtcg

SEQ ID NO: 218552 - DNA, 25 bp, SARS Virus
cataggtaatatccatcattgtcgt

SEQ ID NO: 218553 - DNA, 25 bp, SARS Virus
ataggtaatatacatcattgtcgta

SEQ ID NO: 218554 - DNA, 25 bp, SARS Virus
taggtaatatacctcattgtcgtag

SEQ ID NO: 218555 - DNA, 25 bp, SARS Virus
aggtaatatacaccattgtcgtaga

SEQ ID NO: 218556 - DNA, 25 bp, SARS Virus
ggtaatatacatcattgtcgtagac

SEQ ID NO: 218557 - DNA, 25 bp, SARS Virus
gtaatatacatccttgtcgtagacc

SEQ ID NO: 218558 - DNA, 25 bp, SARS Virus
taatatacatcactgtcgtagacca

SEQ ID NO: 218559 - DNA, 25 bp, SARS Virus
aatatacatcatcgtcgtagaccac

SEQ ID NO: 218560 - DNA, 25 bp, SARS Virus
atatacatcattctcgtagaccact

SEQ ID NO: 218561 - DNA, 25 bp, SARS Virus
tatacatcattgccgtagaccacta

SEQ ID NO: 218562 - DNA, 25 bp, SARS Virus
atacatcattgtcgtagaccactac

SEQ ID NO: 218563 - DNA, 25 bp, SARS Virus
tacatcattgtcctagaccactact

SEQ ID NO: 218564 - DNA, 25 bp, SARS Virus
acatcattgtcgcagaccactacta

SEQ ID NO: 218565 - DNA, 25 bp, SARS Virus
catcattgtcgtcgaccactactat

SEQ ID NO: 218566 - DNA, 25 bp, SARS Virus
atcattgtcgtacaccactactatg

SEQ ID NO: 218567 - DNA, 25 bp, SARS Virus
tcattgtcgtagcccactactatga

SEQ ID NO: 218568 - DNA, 25 bp, SARS Virus
cattgtcgtagaccactactatgac

SEQ ID NO: 218569 - DNA, 25 bp, SARS Virus
attgtcgtagaccactactatgact

SEQ ID NO: 218570 - DNA, 25 bp, SARS Virus
ttgtcgtagacccctactatgactg

SEQ ID NO: 218571 - DNA, 25 bp, SARS Virus
tgtcgtagaccactactatgactgt

SEQ ID NO: 218572 - DNA, 25 bp, SARS Virus
gtcgtagaccaccactatgactgtg

SEQ ID NO: 218573 - DNA, 25 bp, SARS Virus
tcgtagaccactcctatgactgtga

SEQ ID NO: 218574 - DNA, 25 bp, SARS Virus
cgtagaccactactatgactgtgat

SEQ ID NO: 218575 - DNA, 25 bp, SARS Virus
gtagaccactaccatgactgtgatg

SEQ ID NO: 218576 - DNA, 25 bp, SARS Virus
tagaccactactctgactgtgatgc

SEQ ID NO: 218577 - DNA, 25 bp, SARS Virus
agaccactactacgactgtgatgcc

SEQ ID NO: 218578 - DNA, 25 bp, SARS Virus
gaccactactatcactgtgatgccg

SEQ ID NO: 218579 - DNA, 25 bp, SARS Virus
accactactatgcctgtgatgccgt

SEQ ID NO: 218580 - DNA, 25 bp, SARS Virus
ccactactatgactgtgatgccgtc

SEQ ID NO: 218581 - DNA, 25 bp, SARS Virus
cactactatgaccgtgatgccgtcc

SEQ ID NO: 218582 - DNA, 25 bp, SARS Virus
actactatgactctgatgccgtcct

SEQ ID NO: 218583 - DNA, 25 bp, SARS Virus
ctactatgactgcgatgccgtcctc

SEQ ID NO: 218584 - DNA, 25 bp, SARS Virus
tactatgactgtcatgccgtcctcg

SEQ ID NO: 218585 - DNA, 25 bp, SARS Virus
actatgactgtgctgccgtcctcga

SEQ ID NO: 218586 - DNA, 25 bp, SARS Virus
ctatgactgtgacgccgtcctcgaa

SEQ ID NO: 218587 - DNA, 25 bp, SARS Virus
tatgactgtgatcccgtcctcgaaa

SEQ ID NO: 218588 - DNA, 25 bp, SARS Virus
atgactgtgatgccgtcctcgaaat

SEQ ID NO: 218589 - DNA, 25 bp, SARS Virus
tgactgtgatgccgtcctcgaaatt

SEQ ID NO: 218590 - DNA, 25 bp, SARS Virus
gactgtgatgccctcctcgaaattc

SEQ ID NO: 218591 - DNA, 25 bp, SARS Virus
actgtgatgccgccctcgaaattct

SEQ ID NO: 218592 - DNA, 25 bp, SARS Virus
ctgtgatgccgtcctcgaaattctc

SEQ ID NO: 218593 - DNA, 25 bp, SARS Virus
tgtgatgccgtcctcgaaattctct

SEQ ID NO: 218594 - DNA, 25 bp, SARS Virus
gtgatgccgtccccgaaattctctt

SEQ ID NO: 218595 - DNA, 25 bp, SARS Virus
tgatgccgtcctcgaaattctcttg

SEQ ID NO: 218596 - DNA, 25 bp, SARS Virus
gatgccgtcctccaaattctcttgc

SEQ ID NO: 218597 - DNA, 25 bp, SARS Virus
atgccgtcctcgcaattctcttgcg

SEQ ID NO: 218598 - DNA, 25 bp, SARS Virus
tgccgtcctcgacattctcttgcgt

SEQ ID NO: 218599 - DNA, 25 bp, SARS Virus
gccgtcctcgaacttctcttgcgta

SEQ ID NO: 218600 - DNA, 25 bp, SARS Virus
ccgtcctcgaaactctcttgcgtat

SEQ ID NO: 218601 - DNA, 25 bp, SARS Virus
cgtcctcgaaatcctcttgcgtatg

SEQ ID NO: 218602 - DNA, 25 bp, SARS Virus
gtcctcgaaattctcttgcgtatgt

SEQ ID NO: 218603 - DNA, 25 bp, SARS Virus
tcctcgaaattcccttgcgtatgtc

SEQ ID NO: 218604 - DNA, 25 bp, SARS Virus
cctcgaaattctcttgcgtatgtcg

SEQ ID NO: 218605 - DNA, 25 bp, SARS Virus
ctcgaaattctcctgcgtatgtcgc

SEQ ID NO: 218606 - DNA, 25 bp, SARS Virus
tcgaaattctctcgcgtatgtcgcg

SEQ ID NO: 218607 - DNA, 25 bp, SARS Virus
cgaaattctcttccgtatgtcgcgc

SEQ ID NO: 218608 - DNA, 25 bp, SARS Virus
gaaattctcttgcgtatgtcgcgcg

SEQ ID NO: 218609 - DNA, 25 bp, SARS Virus
aaattctcttgcctatgtcgcgcgt

SEQ ID NO: 218610 - DNA, 25 bp, SARS Virus
aattctcttgcgcatgtcgcgcgtc

SEQ ID NO: 218611 - DNA, 25 bp, SARS Virus
attctcttgcgtctgtcgcgcgtcg

SEQ ID NO: 218612 - DNA, 25 bp, SARS Virus
ttctcttgcgtacgtcgcgcgtcgg

SEQ ID NO: 218613 - DNA, 25 bp, SARS Virus
tctcttgcgtatctcgcgcgtcgga

SEQ ID NO: 218614 - DNA, 25 bp, SARS Virus
ctcttgcgtatgccgcgcgtcggag

SEQ ID NO: 218615 - DNA, 25 bp, SARS Virus
tcttgcgtatgtcgcgcgtcggaga

SEQ ID NO: 218616 - DNA, 25 bp, SARS Virus
cttgcgtatgtcccgcgtcggagaa

SEQ ID NO: 218617 - DNA, 25 bp, SARS Virus
ttgcgtatgtcgcgcgtcggagaag

SEQ ID NO: 218618 - DNA, 25 bp, SARS Virus
tgcgtatgtcgcccgtcggagaagt

SEQ ID NO: 218619 - DNA, 25 bp, SARS Virus
gcgtatgtcgcgcgtcggagaagtt

SEQ ID NO: 218620 - DNA, 25 bp, SARS Virus
cgtatgtcgcgcctcggagaagttc

SEQ ID NO: 218621 - DNA, 25 bp, SARS Virus
gtatgtcgcgcgccggagaagttct

SEQ ID NO: 218622 - DNA, 25 bp, SARS Virus
tatgtcgcgcgtcggagaagttcta

SEQ ID NO: 218623 - DNA, 25 bp, SARS Virus
atgtcgcgcgtccgagaagttctaa

SEQ ID NO: 218624 - DNA, 25 bp, SARS Virus
tgtcgcgcgtcgcagaagttctaat

SEQ ID NO: 218625 - DNA, 25 bp, SARS Virus
gtcgcgcgtcggcgaagttctaatt

SEQ ID NO: 218626 - DNA, 25 bp, SARS Virus
tcgcgcgtcggacaagttctaattt

SEQ ID NO: 218627 - DNA, 25 bp, SARS Virus
cgcgcgtcggagcagttctaatttt

SEQ ID NO: 218628 - DNA, 25 bp, SARS Virus
gcgcgtcggagacgttctaattttg

SEQ ID NO: 218629 - DNA, 25 bp, SARS Virus
cgcgtcggagaacttctaattttgg

SEQ ID NO: 218630 - DNA, 25 bp, SARS Virus
gcgtcggagaagctctaattttggt

SEQ ID NO: 218631 - DNA, 25 bp, SARS Virus
cgtcggagaagtcctaattttggta

SEQ ID NO: 218632 - DNA, 25 bp, SARS Virus
gtcggagaagttctaattttggtac

SEQ ID NO: 218633 - DNA, 25 bp, SARS Virus
tcggagaagttccaattttggtaca

SEQ ID NO: 218634 - DNA, 25 bp, SARS Virus
cggagaagttctcattttggtacac

SEQ ID NO: 218635 - DNA, 25 bp, SARS Virus
ggagaagttctacttttggtacaca

SEQ ID NO: 218636 - DNA, 25 bp, SARS Virus
gagaagttctaactttggtacacag

SEQ ID NO: 218637 - DNA, 25 bp, SARS Virus
agaagttctaatcttggtacacagt

SEQ ID NO: 218638 - DNA, 25 bp, SARS Virus
gaagttctaattctggtacacagtg

SEQ ID NO: 218639 - DNA, 25 bp, SARS Virus
aagttctaatttcggtacacagtgt

SEQ ID NO: 218640 - DNA, 25 bp, SARS Virus
agttctaattttcgtacacagtgta

SEQ ID NO: 218641 - DNA, 25 bp, SARS Virus
gttctaattttgctacacagtgtat

SEQ ID NO: 218642 - DNA, 25 bp, SARS Virus
ttctaattttggcacacagtgtatt

SEQ ID NO: 218643 - DNA, 25 bp, SARS Virus
tctaattttggtccacagtgtattg

SEQ ID NO: 218644 - DNA, 25 bp, SARS Virus
ctaattttggtacacagtgtattgg

SEQ ID NO: 218645 - DNA, 25 bp, SARS Virus
taattttggtacccagtgtattggt

SEQ ID NO: 218646 - DNA, 25 bp, SARS Virus
aattttggtacacagtgtattggtt

SEQ ID NO: 218647 - DNA, 25 bp, SARS Virus
attttggtacaccgtgtattggtta

SEQ ID NO: 218648 - DNA, 25 bp, SARS Virus
ttttggtacacactgtattggttaa

SEQ ID NO: 218649 - DNA, 25 bp, SARS Virus
tttggtacacagcgtattggttaac

SEQ ID NO: 218650 - DNA, 25 bp, SARS Virus
ttggtacacagtctattggttaacc

SEQ ID NO: 218651 - DNA, 25 bp, SARS Virus
tggtacacagtgcattggttaaccg

SEQ ID NO: 218652 - DNA, 25 bp, SARS Virus
ggtacacagtgtcttggttaaccgt

SEQ ID NO: 218653 - DNA, 25 bp, SARS Virus
gtacacagtgtactggttaaccgta

SEQ ID NO: 218654 - DNA, 25 bp, SARS Virus
tacacagtgtatcggttaaccgtaa

SEQ ID NO: 218655 - DNA, 25 bp, SARS Virus
acacagtgtattcgttaaccgtaac

SEQ ID NO: 218656 - DNA, 25 bp, SARS Virus
cacagtgtattgcttaaccgtaaca

SEQ ID NO: 218657 - DNA, 25 bp, SARS Virus
aatgggagtactgaatgtactccaa

SEQ ID NO: 218658 - DNA, 25 bp, SARS Virus
atgggagtactagatgtactccaaa

SEQ ID NO: 218659 - DNA, 25 bp, SARS Virus
tgggagtactaagtgtactccaaat

SEQ ID NO: 218660 - DNA, 25 bp, SARS Virus
gggagtactaaaggtactccaaatt

SEQ ID NO: 218661 - DNA, 25 bp, SARS Virus
ggagtactaaatgtactccaaatta

SEQ ID NO: 218662 - DNA, 25 bp, SARS Virus
gagtactaaatggactccaaattaa

SEQ ID NO: 218663 - DNA, 25 bp, SARS Virus
agtactaaatgtgctccaaattaaa

SEQ ID NO: 218664 - DNA, 25 bp, SARS Virus
gtactaaatgtagtccaaattaaaa

SEQ ID NO: 218665 - DNA, 25 bp, SARS Virus
tactaaatgtacgccaaattaaaaa

SEQ ID NO: 218666 - DNA, 25 bp, SARS Virus
actaaatgtactgcaaattaaaaac

SEQ ID NO: 218667 - DNA, 25 bp, SARS Virus
ctaaatgtactcgaaattaaaaaca

SEQ ID NO: 218668 - DNA, 25 bp, SARS Virus
taaatgtactccgaattaaaaacat

SEQ ID NO: 218669 - DNA, 25 bp, SARS Virus
aaatgtactccagattaaaaacatt

SEQ ID NO: 218670 - DNA, 25 bp, SARS Virus
aatgtactccaagttaaaaacattg

SEQ ID NO: 218671 - DNA, 25 bp, SARS Virus
atgtactccaaagtaaaaacattgt

SEQ ID NO: 218672 - DNA, 25 bp, SARS Virus
tgtactccaaatgaaaaacattgta

SEQ ID NO: 218673 - DNA, 25 bp, SARS Virus
gtactccaaattgaaaacattgtag

SEQ ID NO: 218674 - DNA, 25 bp, SARS Virus
tactccaaattagaaacattgtagt

SEQ ID NO: 218675 - DNA, 25 bp, SARS Virus
actccaaattaagaacattgtagtc

SEQ ID NO: 218676 - DNA, 25 bp, SARS Virus
ctccaaattaaagacattgtagtcg

SEQ ID NO: 218677 - DNA, 25 bp, SARS Virus
tccaaattaaaagcattgtagtcgt

SEQ ID NO: 218678 - DNA, 25 bp, SARS Virus
ccaaattaaaaagattgtagtcgtg

SEQ ID NO: 218679 - DNA, 25 bp, SARS Virus
caaattaaaaacgttgtagtcgtgg

SEQ ID NO: 218680 - DNA, 25 bp, SARS Virus
aaattaaaaacagtgtagtcgtggt

SEQ ID NO: 218681 - DNA, 25 bp, SARS Virus
aattaaaaacatggtagtcgtggta

SEQ ID NO: 218682 - DNA, 25 bp, SARS Virus
attaaaaacattgtagtcgtggtag

SEQ ID NO: 218683 - DNA, 25 bp, SARS Virus
ttaaaaacattggagtcgtggtagg

SEQ ID NO: 218684 - DNA, 25 bp, SARS Virus
taaaaacattgtggtcgtggtaggt

SEQ ID NO: 218685 - DNA, 25 bp, SARS Virus
aaaaacattgtagtcgtggtaggtt

SEQ ID NO: 218686 - DNA, 25 bp, SARS Virus
aaaacattgtaggcgtggtaggttc

SEQ ID NO: 218687 - DNA, 25 bp, SARS Virus
aaacattgtagtggtggtaggttca

SEQ ID NO: 218688 - DNA, 25 bp, SARS Virus
aacattgtagtcgtggtaggttcat

SEQ ID NO: 218689 - DNA, 25 bp, SARS Virus
acattgtagtcggggtaggttcata

SEQ ID NO: 218690 - DNA, 25 bp, SARS Virus
cattgtagtcgtggtaggttcatac

SEQ ID NO: 218691 - DNA, 25 bp, SARS Virus
attgtagtcgtggtaggttcataca

SEQ ID NO: 218692 - DNA, 25 bp, SARS Virus
ttgtagtcgtgggaggttcatacaa

SEQ ID NO: 218693 - DNA, 25 bp, SARS Virus
tgtagtcgtggtgggttcatacaac

SEQ ID NO: 218694 - DNA, 25 bp, SARS Virus
gtagtcgtggtaggttcatacaacc

SEQ ID NO: 218695 - DNA, 25 bp, SARS Virus
tagtcgtggtaggttcatacaacct

SEQ ID NO: 218696 - DNA, 25 bp, SARS Virus
agtcgtggtagggtcatacaacctg

SEQ ID NO: 218697 - DNA, 25 bp, SARS Virus
gtcgtggtaggtgcatacaacctgg

SEQ ID NO: 218698 - DNA, 25 bp, SARS Virus
tcgtggtaggttgatacaacctggt

SEQ ID NO: 218699 - DNA, 25 bp, SARS Virus
cgtggtaggttcgtacaacctggtt

SEQ ID NO: 218700 - DNA, 25 bp, SARS Virus
gtggtaggttcagacaacctggttt

SEQ ID NO: 218701 - DNA, 25 bp, SARS Virus
tggtaggttcatgcaacctggtttg

SEQ ID NO: 218702 - DNA, 25 bp, SARS Virus
ggtaggttcatagaacctggtttga

SEQ ID NO: 218703 - DNA, 25 bp, SARS Virus
gtaggttcatacgacctggtttgac

SEQ ID NO: 218704 - DNA, 25 bp, SARS Virus
taggttcatacagcctggtttgacg

SEQ ID NO: 218705 - DNA, 25 bp, SARS Virus
aggttcatacaagctggtttgacga

SEQ ID NO: 218706 - DNA, 25 bp, SARS Virus
ggttcatacaacgtggtttgacgac

SEQ ID NO: 218707 - DNA, 25 bp, SARS Virus
gttcatacaaccgggtttgacgaca

SEQ ID NO: 218708 - DNA, 25 bp, SARS Virus
ttcatacaacctggtttgacgacag

SEQ ID NO: 218709 - DNA, 25 bp, SARS Virus
tcatacaacctggtttgacgacagg

SEQ ID NO: 218710 - DNA, 25 bp, SARS Virus
catacaacctgggttgacgacaggt

SEQ ID NO: 218711 - DNA, 25 bp, SARS Virus
atacaacctggtgtgacgacaggta

SEQ ID NO: 218712 - DNA, 25 bp, SARS Virus
tacaacctggttggacgacaggtat

SEQ ID NO: 218713 - DNA, 25 bp, SARS Virus
acaacctggtttgacgacaggtata

SEQ ID NO: 218714 - DNA, 25 bp, SARS Virus
caacctggtttggcgacaggtatac

SEQ ID NO: 218715 - DNA, 25 bp, SARS Virus
aacctggtttgaggacaggtataca

SEQ ID NO: 218716 - DNA, 25 bp, SARS Virus
acctggtttgacgacaggtatacag

SEQ ID NO: 218717 - DNA, 25 bp, SARS Virus
cctggtttgacggcaggtatacagt

SEQ ID NO: 218718 - DNA, 25 bp, SARS Virus
ctggtttgacgagaggtatacagta

SEQ ID NO: 218719 - DNA, 25 bp, SARS Virus
tggtttgacgacgggtatacagtat

SEQ ID NO: 218720 - DNA, 25 bp, SARS Virus
ggtttgacgacaggtatacagtatc

SEQ ID NO: 218721 - DNA, 25 bp, SARS Virus
gtttgacgacaggtatacagtatct

SEQ ID NO: 218722 - DNA, 25 bp, SARS Virus
tttgacgacagggatacagtatctg

SEQ ID NO: 218723 - DNA, 25 bp, SARS Virus
ttgacgacaggtgtacagtatctgt

SEQ ID NO: 218724 - DNA, 25 bp, SARS Virus
tgacgacaggtagacagtatctgta

SEQ ID NO: 218725 - DNA, 25 bp, SARS Virus
gacgacaggtatgcagtatctgtat

SEQ ID NO: 218726 - DNA, 25 bp, SARS Virus
acgacaggtatagagtatctgtata

SEQ ID NO: 218727 - DNA, 25 bp, SARS Virus
cgacaggtatacggtatctgtatag

SEQ ID NO: 218728 - DNA, 25 bp, SARS Virus
gacaggtatacagtatctgtatagg

SEQ ID NO: 218729 - DNA, 25 bp, SARS Virus
acaggtatacaggatctgtataggt

SEQ ID NO: 218730 - DNA, 25 bp, SARS Virus
caggtatacagtgtctgtataggtg

SEQ ID NO: 218731 - DNA, 25 bp, SARS Virus
aggtatacagtagctgtataggtgt

SEQ ID NO: 218732 - DNA, 25 bp, SARS Virus
ggtatacagtatgtgtataggtgtt

SEQ ID NO: 218733 - DNA, 25 bp, SARS Virus
gtatacagtatcggtataggtgttc

SEQ ID NO: 218734 - DNA, 25 bp, SARS Virus
tatacagtatctgtataggtgttcg

SEQ ID NO: 218735 - DNA, 25 bp, SARS Virus
atacagtatctggataggtgttcga

SEQ ID NO: 218736 - DNA, 25 bp, SARS Virus
tacagtatctgtgtaggtgttcgac

SEQ ID NO: 218737 - DNA, 25 bp, SARS Virus
acagtatctgtagaggtgttcgaca

SEQ ID NO: 218738 - DNA, 25 bp, SARS Virus
cagtatctgtatgggtgttcgacac

SEQ ID NO: 218739 - DNA, 25 bp, SARS Virus
agtatctgtataggtgttcgacaca

SEQ ID NO: 218740 - DNA, 25 bp, SARS Virus
gtatctgtataggtgttcgacacac

SEQ ID NO: 218741 - DNA, 25 bp, SARS Virus
tatctgtataggggttcgacacaca

SEQ ID NO: 218742 - DNA, 25 bp, SARS Virus
atctgtataggtgttcgacacacac

SEQ ID NO: 218743 - DNA, 25 bp, SARS Virus
tctgtataggtggtcgacacacacc

SEQ ID NO: 218744 - DNA, 25 bp, SARS Virus
ctgtataggtgtgcgacacacacct

SEQ ID NO: 218745 - DNA, 25 bp, SARS Virus
tgtataggtgttggacacacacctc

SEQ ID NO: 218746 - DNA, 25 bp, SARS Virus
gtataggtgttcgacacacacctct

SEQ ID NO: 218747 - DNA, 25 bp, SARS Virus
tataggtgttcggcacacacctcta

SEQ ID NO: 218748 - DNA, 25 bp, SARS Virus
ataggtgttcgagacacacctctaa

SEQ ID NO: 218749 - DNA, 25 bp, SARS Virus
taggtgttcgacgcacacctctaat

SEQ ID NO: 218750 - DNA, 25 bp, SARS Virus
aggtgttcgacagacacctctaatc

SEQ ID NO: 218751 - DNA, 25 bp, SARS Virus
ggtgttcgacacgcacctctaatca

SEQ ID NO: 218752 - DNA, 25 bp, SARS Virus
gtgttcgacacagacctctaatcac

SEQ ID NO: 218753 - DNA, 25 bp, SARS Virus
tgttcgacacacgcctctaatcaca

SEQ ID NO: 218754 - DNA, 25 bp, SARS Virus
gttcgacacacagctctaatcacaa

SEQ ID NO: 218755 - DNA, 25 bp, SARS Virus
ttcgacacacacgtctaatcacaac

SEQ ID NO: 218756 - DNA, 25 bp, SARS Virus
tcgacacacaccgctaatcacaaca

SEQ ID NO: 218757 - DNA, 25 bp, SARS Virus
cgacacacacctgtaatcacaacag

SEQ ID NO: 218758 - DNA, 25 bp, SARS Virus
gacacacacctcgaatcacaacagg

SEQ ID NO: 218759 - DNA, 25 bp, SARS Virus
acacacacctctgatcacaacaggt

SEQ ID NO: 218760 - DNA, 25 bp, SARS Virus
cacacacctctagtcacaacaggtg

SEQ ID NO: 218761 - DNA, 25 bp, SARS Virus
acacacctctaagcacaacaggtgt

SEQ ID NO: 218762 - DNA, 25 bp, SARS Virus
cacacctctaatgacaacaggtgtc

SEQ ID NO: 218763 - DNA, 25 bp, SARS Virus
acacctctaatcgcaacaggtgtca

SEQ ID NO: 218764 - DNA, 25 bp, SARS Virus
cacctctaatcagaacaggtgtcaa

SEQ ID NO: 218765 - DNA, 25 bp, SARS Virus
acctctaatcacgacaggtgtcaac

SEQ ID NO: 218766 - DNA, 25 bp, SARS Virus
cctctaatcacagcaggtgtcaaca

SEQ ID NO: 218767 - DNA, 25 bp, SARS Virus
ctctaatcacaagaggtgtcaacac

SEQ ID NO: 218768 - DNA, 25 bp, SARS Virus
tctaatcacaacgggtgtcaacact

SEQ ID NO: 218769 - DNA, 25 bp, SARS Virus
ctaatcacaacaggtgtcaacactt

SEQ ID NO: 218770 - DNA, 25 bp, SARS Virus
taatcacaacaggtgtcaacacttg

SEQ ID NO: 218771 - DNA, 25 bp, SARS Virus
aatcacaacaggggtcaacacttgt

SEQ ID NO: 218772 - DNA, 25 bp, SARS Virus
atcacaacaggtgtcaacacttgtg

SEQ ID NO: 218773 - DNA, 25 bp, SARS Virus
tcacaacaggtggcaacacttgtga

SEQ ID NO: 218774 - DNA, 25 bp, SARS Virus
cacaacaggtgtgaacacttgtgaa

SEQ ID NO: 218775 - DNA, 25 bp, SARS Virus
acaacaggtgtcgacacttgtgaaa

SEQ ID NO: 218776 - DNA, 25 bp, SARS Virus
caacaggtgtcagcacttgtgaaaa

SEQ ID NO: 218777 - DNA, 25 bp, SARS Virus
aacaggtgtcaagacttgtgaaaat

SEQ ID NO: 218778 - DNA, 25 bp, SARS Virus
acaggtgtcaacgcttgtgaaaata

SEQ ID NO: 218779 - DNA, 25 bp, SARS Virus
caggtgtcaacagttgtgaaaatat

SEQ ID NO: 218780 - DNA, 25 bp, SARS Virus
aggtgtcaacacgtgtgaaaatatc

SEQ ID NO: 218781 - DNA, 25 bp, SARS Virus
ggtgtcaacactggtgaaaatatca

SEQ ID NO: 218782 - DNA, 25 bp, SARS Virus
gtgtcaacacttgtgaaaatatcag

SEQ ID NO: 218783 - DNA, 25 bp, SARS Virus
tgtcaacacttgggaaaatatcaga

SEQ ID NO: 218784 - DNA, 25 bp, SARS Virus
gtcaacacttgtgaaaatatcagaa

SEQ ID NO: 218785 - DNA, 25 bp, SARS Virus
tcaacacttgtggaaatatcagaat

SEQ ID NO: 218786 - DNA, 25 bp, SARS Virus
caacacttgtgagaatatcagaatt

SEQ ID NO: 218787 - DNA, 25 bp, SARS Virus
aacacttgtgaagatatcagaattg

SEQ ID NO: 218788 - DNA, 25 bp, SARS Virus
acacttgtgaaagtatcagaattgg

SEQ ID NO: 218789 - DNA, 25 bp, SARS Virus
cacttgtgaaaagatcagaattgga

SEQ ID NO: 218790 - DNA, 25 bp, SARS Virus
acttgtgaaaatgtcagaattggag

SEQ ID NO: 218791 - DNA, 25 bp, SARS Virus
cttgtgaaaatagcagaattggagg

SEQ ID NO: 218792 - DNA, 25 bp, SARS Virus
ttgtgaaaatatgagaattggaggg

SEQ ID NO: 218793 - DNA, 25 bp, SARS Virus
tgtgaaaatatcggaattggagggc

SEQ ID NO: 218794 - DNA, 25 bp, SARS Virus
gtgaaaatatcagaattggagggcg

SEQ ID NO: 218795 - DNA, 25 bp, SARS Virus
tgaaaatatcaggattggagggcgt

SEQ ID NO: 218796 - DNA, 25 bp, SARS Virus
gaaaatatcagagttggagggcgtc

SEQ ID NO: 218797 - DNA, 25 bp, SARS Virus
aaaatatcagaagtggagggcgtcc

SEQ ID NO: 218798 - DNA, 25 bp, SARS Virus
aaatatcagaatgggagggcgtccc

SEQ ID NO: 218799 - DNA, 25 bp, SARS Virus
aatatcagaattggagggcgtccct

SEQ ID NO: 218800 - DNA, 25 bp, SARS Virus
atatcagaattggagggcgtcccta

SEQ ID NO: 218801 - DNA, 25 bp, SARS Virus
tatcagaattggggggcgtccctat

SEQ ID NO: 218802 - DNA, 25 bp, SARS Virus
atcagaattggagggcgtccctatt

SEQ ID NO: 218803 - DNA, 25 bp, SARS Virus
tcagaattggagggcgtccctattc

SEQ ID NO: 218804 - DNA, 25 bp, SARS Virus
cagaattggagggcgtccctattct

SEQ ID NO: 218805 - DNA, 25 bp, SARS Virus
agaattggagggggtccctattctc

SEQ ID NO: 218806 - DNA, 25 bp, SARS Virus
gaattggagggcgtccctattctct

SEQ ID NO: 218807 - DNA, 25 bp, SARS Virus
aattggagggcggccctattctctg

SEQ ID NO: 218808 - DNA, 25 bp, SARS Virus
attggagggcgtgcctattctctga

SEQ ID NO: 218809 - DNA, 25 bp, SARS Virus
ttggagggcgtcgctattctctgag

SEQ ID NO: 218810 - DNA, 25 bp, SARS Virus
tggagggcgtccgtattctctgaga

SEQ ID NO: 218811 - DNA, 25 bp, SARS Virus
ggagggcgtcccgattctctgagaa

SEQ ID NO: 218812 - DNA, 25 bp, SARS Virus
gagggcgtccctgttctctgagaaa

SEQ ID NO: 218813 - DNA, 25 bp, SARS Virus
agggcgtccctagtctctgagaaat

SEQ ID NO: 218814 - DNA, 25 bp, SARS Virus
gggcgtccctatgctctgagaaatc

SEQ ID NO: 218815 - DNA, 25 bp, SARS Virus
ggcgtccctattgtctgagaaatca

SEQ ID NO: 218816 - DNA, 25 bp, SARS Virus
gcgtccctattcgctgagaaatcaa

SEQ ID NO: 218817 - DNA, 25 bp, SARS Virus
cgtccctattctgtgagaaatcaaa

SEQ ID NO: 218818 - DNA, 25 bp, SARS Virus
gtccctattctcggagaaatcaaac

SEQ ID NO: 218819 - DNA, 25 bp, SARS Virus
tccctattctctgagaaatcaaaca

SEQ ID NO: 218820 - DNA, 25 bp, SARS Virus
ccctattctctgggaaatcaaacag

SEQ ID NO: 218821 - DNA, 25 bp, SARS Virus
cctattctctgagaaatcaaacagt

SEQ ID NO: 218822 - DNA, 25 bp, SARS Virus
ctattctctgaggaatcaaacagtt

SEQ ID NO: 218823 - DNA, 25 bp, SARS Virus
tattctctgagagatcaaacagttc

SEQ ID NO: 218824 - DNA, 25 bp, SARS Virus
attctctgagaagtcaaacagttca

SEQ ID NO: 218825 - DNA, 25 bp, SARS Virus
ttctctgagaaagcaaacagttcac

SEQ ID NO: 218826 - DNA, 25 bp, SARS Virus
tctctgagaaatgaaacagttcact

SEQ ID NO: 218827 - DNA, 25 bp, SARS Virus
ctctgagaaatcgaacagttcactt

SEQ ID NO: 218828 - DNA, 25 bp, SARS Virus
tctgagaaatcagacagttcacttt

SEQ ID NO: 218829 - DNA, 25 bp, SARS Virus
ctgagaaatcaagcagttcactttc

SEQ ID NO: 218830 - DNA, 25 bp, SARS Virus
tgagaaatcaaagagttcactttct

SEQ ID NO: 218831 - DNA, 25 bp, SARS Virus
gagaaatcaaacggttcactttctt

SEQ ID NO: 218832 - DNA, 25 bp, SARS Virus
agaaatcaaacagttcactttcttg

SEQ ID NO: 218833 - DNA, 25 bp, SARS Virus
gaaatcaaacaggtcactttcttgg

SEQ ID NO: 218834 - DNA, 25 bp, SARS Virus
aaatcaaacagtgcactttcttgga

SEQ ID NO: 218835 - DNA, 25 bp, SARS Virus
aatcaaacagttgactttcttggag

SEQ ID NO: 218836 - DNA, 25 bp, SARS Virus
atcaaacagttcgctttcttggagt

SEQ ID NO: 218837 - DNA, 25 bp, SARS Virus
tcaaacagttcagtttcttggagtg

SEQ ID NO: 218838 - DNA, 25 bp, SARS Virus
caaacagttcacgttcttggagtgg

SEQ ID NO: 218839 - DNA, 25 bp, SARS Virus
aaacagttcactgtcttggagtggc

SEQ ID NO: 218840 - DNA, 25 bp, SARS Virus
aacagttcacttgcttggagtggca

SEQ ID NO: 218841 - DNA, 25 bp, SARS Virus
acagttcactttgttggagtggcag

SEQ ID NO: 218842 - DNA, 25 bp, SARS Virus
cagttcactttcgtggagtggcagt

SEQ ID NO: 218843 - DNA, 25 bp, SARS Virus
agttcactttctgggagtggcagtt

SEQ ID NO: 218844 - DNA, 25 bp, SARS Virus
gttcactttcttggagtggcagttc

SEQ ID NO: 218845 - DNA, 25 bp, SARS Virus
ttcactttcttggagtggcagttct

SEQ ID NO: 218846 - DNA, 25 bp, SARS Virus
tcactttcttggggtggcagttcta

SEQ ID NO: 218847 - DNA, 25 bp, SARS Virus
cactttcttggagtggcagttctac

SEQ ID NO: 218848 - DNA, 25 bp, SARS Virus
actttcttggaggggcagttctact

SEQ ID NO: 218849 - DNA, 25 bp, SARS Virus
ctttcttggagtggcagttctactt

SEQ ID NO: 218850 - DNA, 25 bp, SARS Virus
tttcttggagtggcagttctacttt

SEQ ID NO: 218851 - DNA, 25 bp, SARS Virus
ttcttggagtgggagttctactttg

SEQ ID NO: 218852 - DNA, 25 bp, SARS Virus
tcttggagtggcggttctactttga

SEQ ID NO: 218853 - DNA, 25 bp, SARS Virus
cttggagtggcagttctactttgag

SEQ ID NO: 218854 - DNA, 25 bp, SARS Virus
ttggagtggcaggtctactttgagc

SEQ ID NO: 218855 - DNA, 25 bp, SARS Virus
tggagtggcagtgctactttgagct

SEQ ID NO: 218856 - DNA, 25 bp, SARS Virus
ggagtggcagttgtactttgagctg

SEQ ID NO: 218857 - DNA, 25 bp, SARS Virus
gagtggcagttcgactttgagctgc

SEQ ID NO: 218858 - DNA, 25 bp, SARS Virus
agtggcagttctgctttgagctgcc

SEQ ID NO: 218859 - DNA, 25 bp, SARS Virus
gtggcagttctagtttgagctgccc

SEQ ID NO: 218860 - DNA, 25 bp, SARS Virus
tggcagttctacgttgagctgcccc

SEQ ID NO: 218861 - DNA, 25 bp, SARS Virus
ggcagttctactgtgagctgccccg

SEQ ID NO: 218862 - DNA, 25 bp, SARS Virus
gcagttctacttggagctgccccga

SEQ ID NO: 218863 - DNA, 25 bp, SARS Virus
cagttctactttgagctgccccgag

SEQ ID NO: 218864 - DNA, 25 bp, SARS Virus
agttctactttgggctgccccgaga

SEQ ID NO: 218865 - DNA, 25 bp, SARS Virus
gttctactttgagctgccccgagag

SEQ ID NO: 218866 - DNA, 25 bp, SARS Virus
ttctactttgaggtgccccgagagg

SEQ ID NO: 218867 - DNA, 25 bp, SARS Virus
tctactttgagcggccccgagaggt

SEQ ID NO: 218868 - DNA, 25 bp, SARS Virus
ctactttgagctgccccgagaggtc

SEQ ID NO: 218869 - DNA, 25 bp, SARS Virus
tactttgagctggcccgagaggtct

SEQ ID NO: 218870 - DNA, 25 bp, SARS Virus
actttgagctgcgccgagaggtctc

SEQ ID NO: 218871 - DNA, 25 bp, SARS Virus
ctttgagctgccgcgagaggtctca

SEQ ID NO: 218872 - DNA, 25 bp, SARS Virus
tttgagctgcccggagaggtctcac

SEQ ID NO: 218873 - DNA, 25 bp, SARS Virus
ttgagctgccccgagaggtctcaca

SEQ ID NO: 218874 - DNA, 25 bp, SARS Virus
tgagctgccccgggaggtctcacac

SEQ ID NO: 218875 - DNA, 25 bp, SARS Virus
gagctgccccgagaggtctcacacc

SEQ ID NO: 218876 - DNA, 25 bp, SARS Virus
agctgccccgaggggtctcacacca

SEQ ID NO: 218877 - DNA, 25 bp, SARS Virus
gctgccccgagaggtctcacaccat

SEQ ID NO: 218878 - DNA, 25 bp, SARS Virus
ctgccccgagaggtctcacaccatg

SEQ ID NO: 218879 - DNA, 25 bp, SARS Virus
tgccccgagagggctcacaccatgt

SEQ ID NO: 218880 - DNA, 25 bp, SARS Virus
gccccgagaggtgtcacaccatgtg

SEQ ID NO: 218881 - DNA, 25 bp, SARS Virus
ccccgagaggtcgcacaccatgtgt

SEQ ID NO: 218882 - DNA, 25 bp, SARS Virus
cccgagaggtctgacaccatgtgtt

SEQ ID NO: 218883 - DNA, 25 bp, SARS Virus
ccgagaggtctcgcaccatgtgtta

SEQ ID NO: 218884 - DNA, 25 bp, SARS Virus
cgagaggtctcagaccatgtgttaa

SEQ ID NO: 218885 - DNA, 25 bp, SARS Virus
gagaggtctcacgccatgtgttaaa

SEQ ID NO: 218886 - DNA, 25 bp, SARS Virus
agaggtctcacagcatgtgttaaaa

SEQ ID NO: 218887 - DNA, 25 bp, SARS Virus
gaggtctcacacgatgtgttaaaac

SEQ ID NO: 218888 - DNA, 25 bp, SARS Virus
aggtctcacaccgtgtgttaaaaca

SEQ ID NO: 218889 - DNA, 25 bp, SARS Virus
ggtctcacaccaggtgttaaaacag

SEQ ID NO: 218890 - DNA, 25 bp, SARS Virus
gtctcacaccatgtgttaaaacagt

SEQ ID NO: 218891 - DNA, 25 bp, SARS Virus
tctcacaccatgggttaaaacagtg

SEQ ID NO: 218892 - DNA, 25 bp, SARS Virus
ctcacaccatgtgttaaaacagtgg

SEQ ID NO: 218893 - DNA, 25 bp, SARS Virus
tcacaccatgtggtaaaacagtggt

SEQ ID NO: 218894 - DNA, 25 bp, SARS Virus
cacaccatgtgtgaaaacagtggtg

SEQ ID NO: 218895 - DNA, 25 bp, SARS Virus
acaccatgtgttgaaacagtggtgc

SEQ ID NO: 218896 - DNA, 25 bp, SARS Virus
caccatgtgttagaacagtggtgcg

SEQ ID NO: 218897 - DNA, 25 bp, SARS Virus
accatgtgttaagacagtggtgcga

SEQ ID NO: 218898 - DNA, 25 bp, SARS Virus
ccatgtgttaaagcagtggtgcgaa

SEQ ID NO: 218899 - DNA, 25 bp, SARS Virus
catgtgttaaaagagtggtgcgaat

SEQ ID NO: 218900 - DNA, 25 bp, SARS Virus
atgtgttaaaacggtggtgcgaatt

SEQ ID NO: 218901 - DNA, 25 bp, SARS Virus
tgtgttaaaacagtggtgcgaattc

SEQ ID NO: 218902 - DNA, 25 bp, SARS Virus
gtgttaaaacaggggtgcgaattct

SEQ ID NO: 218903 - DNA, 25 bp, SARS Virus
tgttaaaacagtggtgcgaattctt

SEQ ID NO: 218904 - DNA, 25 bp, SARS Virus
gttaaaacagtggtgcgaattcttt

SEQ ID NO: 218905 - DNA, 25 bp, SARS Virus
ttaaaacagtggggcgaattcttta

SEQ ID NO: 218906 - DNA, 25 bp, SARS Virus
taaaacagtggtgcgaattctttaa

SEQ ID NO: 218907 - DNA, 25 bp, SARS Virus
aaaacagtggtgggaattctttaag

SEQ ID NO: 218908 - DNA, 25 bp, SARS Virus
aaacagtggtgcgaattctttaagt

SEQ ID NO: 218909 - DNA, 25 bp, SARS Virus
aacagtggtgcggattctttaagtt

SEQ ID NO: 218910 - DNA, 25 bp, SARS Virus
acagtggtgcgagttctttaagttg

SEQ ID NO: 218911 - DNA, 25 bp, SARS Virus
cagtggtgcgaagtctttaagttgt

SEQ ID NO: 218912 - DNA, 25 bp, SARS Virus
agtggtgcgaatgctttaagttgtg

SEQ ID NO: 218913 - DNA, 25 bp, SARS Virus
gtggtgcgaattgtttaagttgtgg

SEQ ID NO: 218914 - DNA, 25 bp, SARS Virus
tggtgcgaattcgttaagttgtgga

SEQ ID NO: 218915 - DNA, 25 bp, SARS Virus
ggtgcgaattctgtaagttgtggat

SEQ ID NO: 218916 - DNA, 25 bp, SARS Virus
gtgcgaattcttgaagttgtggatt

SEQ ID NO: 218917 - DNA, 25 bp, SARS Virus
tgcgaattctttgagttgtggattg

SEQ ID NO: 218918 - DNA, 25 bp, SARS Virus
gcgaattctttaggttgtggattga

SEQ ID NO: 218919 - DNA, 25 bp, SARS Virus
cgaattctttaagttgtggattgag

SEQ ID NO: 218920 - DNA, 25 bp, SARS Virus
gaattctttaaggtgtggattgaga

SEQ ID NO: 218921 - DNA, 25 bp, SARS Virus
aattctttaagtggtggattgagac

SEQ ID NO: 218922 - DNA, 25 bp, SARS Virus
attctttaagttgtggattgagaca

SEQ ID NO: 218923 - DNA, 25 bp, SARS Virus
ttctttaagttggggattgagacat

SEQ ID NO: 218924 - DNA, 25 bp, SARS Virus
tctttaagttgtggattgagacatg

SEQ ID NO: 218925 - DNA, 25 bp, SARS Virus
ctttaagttgtggattgagacatgc

SEQ ID NO: 218926 - DNA, 25 bp, SARS Virus
tttaagttgtgggttgagacatgcg

SEQ ID NO: 218927 - DNA, 25 bp, SARS Virus
ttaagttgtggagtgagacatgcga

SEQ ID NO: 218928 - DNA, 25 bp, SARS Virus
taagttgtggatggagacatgcgac

SEQ ID NO: 218929 - DNA, 25 bp, SARS Virus
aagttgtggattgagacatgcgaca

SEQ ID NO: 218930 - DNA, 25 bp, SARS Virus
agttgtggattgggacatgcgacag

SEQ ID NO: 218931 - DNA, 25 bp, SARS Virus
gttgtggattgagacatgcgacagg

SEQ ID NO: 218932 - DNA, 25 bp, SARS Virus
ttgtggattgaggcatgcgacagga

SEQ ID NO: 218933 - DNA, 25 bp, SARS Virus
tgtggattgagagatgcgacaggac

SEQ ID NO: 218934 - DNA, 25 bp, SARS Virus
gtggattgagacgtgcgacaggact

SEQ ID NO: 218935 - DNA, 25 bp, SARS Virus
tggattgagacaggcgacaggactt

SEQ ID NO: 218936 - DNA, 25 bp, SARS Virus
ggattgagacatgcgacaggactta

SEQ ID NO: 218937 - DNA, 25 bp, SARS Virus
gattgagacatgggacaggacttat

SEQ ID NO: 218938 - DNA, 25 bp, SARS Virus
attgagacatgcgacaggacttatc

SEQ ID NO: 218939 - DNA, 25 bp, SARS Virus
ttgagacatgcggcaggacttatcc

SEQ ID NO: 218940 - DNA, 25 bp, SARS Virus
tgagacatgcgagaggacttatcct

SEQ ID NO: 218941 - DNA, 25 bp, SARS Virus
gagacatgcgacgggacttatcctg

SEQ ID NO: 218942 - DNA, 25 bp, SARS Virus
agacatgcgacaggacttatcctgg

SEQ ID NO: 218943 - DNA, 25 bp, SARS Virus
gacatgcgacaggacttatcctggt

SEQ ID NO: 218944 - DNA, 25 bp, SARS Virus
acatgcgacagggcttatcctggtt

SEQ ID NO: 218945 - DNA, 25 bp, SARS Virus
catgcgacaggagttatcctggtta

SEQ ID NO: 218946 - DNA, 25 bp, SARS Virus
atgcgacaggacgtatcctggttag

SEQ ID NO: 218947 - DNA, 25 bp, SARS Virus
tgcgacaggactgatcctggttaga

SEQ ID NO: 218948 - DNA, 25 bp, SARS Virus
gcgacaggacttgtcctggttagag

SEQ ID NO: 218949 - DNA, 25 bp, SARS Virus
cgacaggacttagcctggttagaga

SEQ ID NO: 218950 - DNA, 25 bp, SARS Virus
gacaggacttatgctggttagagac

SEQ ID NO: 218951 - DNA, 25 bp, SARS Virus
acaggacttatcgtggttagagaca

SEQ ID NO: 218952 - DNA, 25 bp, SARS Virus
caggacttatccgggttagagacat

SEQ ID NO: 218953 - DNA, 25 bp, SARS Virus
aggacttatcctggttagagacatt

SEQ ID NO: 218954 - DNA, 25 bp, SARS Virus
ggacttatcctggttagagacattc

SEQ ID NO: 218955 - DNA, 25 bp, SARS Virus
gacttatcctgggtagagacattct

SEQ ID NO: 218956 - DNA, 25 bp, SARS Virus
acttatcctggtgagagacattctc

SEQ ID NO: 218957 - DNA, 25 bp, SARS Virus
cttatcctggttggagacattctcg

SEQ ID NO: 218958 - DNA, 25 bp, SARS Virus
ttatcctggttagagacattctcgg

SEQ ID NO: 218959 - DNA, 25 bp, SARS Virus
tatcctggttagggacattctcggt

SEQ ID NO: 218960 - DNA, 25 bp, SARS Virus
atcctggttagagacattctcggtc

SEQ ID NO: 218961 - DNA, 25 bp, SARS Virus
tcctggttagaggcattctcggtcg

SEQ ID NO: 218962 - DNA, 25 bp, SARS Virus
cctggttagagagattctcggtcgg

SEQ ID NO: 218963 - DNA, 25 bp, SARS Virus
ctggttagagacgttctcggtcggt

SEQ ID NO: 218964 - DNA, 25 bp, SARS Virus
tggttagagacagtctcggtcggtt

SEQ ID NO: 218965 - DNA, 25 bp, SARS Virus
ggttagagacatgctcggtcggttt

SEQ ID NO: 218966 - DNA, 25 bp, SARS Virus
gttagagacattgtcggtcggtttc

SEQ ID NO: 218967 - DNA, 25 bp, SARS Virus
ttagagacattcgcggtcggtttct

SEQ ID NO: 218968 - DNA, 25 bp, SARS Virus
tagagacattctgggtcggtttctt

SEQ ID NO: 218969 - DNA, 25 bp, SARS Virus
agagacattctcggtcggtttcttt

SEQ ID NO: 218970 - DNA, 25 bp, SARS Virus
gagacattctcggtcggtttctttg

SEQ ID NO: 218971 - DNA, 25 bp, SARS Virus
agacattctcgggcggtttctttga

SEQ ID NO: 218972 - DNA, 25 bp, SARS Virus
gacattctcggtgggtttctttgac

SEQ ID NO: 218973 - DNA, 25 bp, SARS Virus
acattctcggtcggtttctttgaca

SEQ ID NO: 218974 - DNA, 25 bp, SARS Virus
cattctcggtcggtttctttgacaa

SEQ ID NO: 218975 - DNA, 25 bp, SARS Virus
attctcggtcgggttctttgacaaa

SEQ ID NO: 218976 - DNA, 25 bp, SARS Virus
ttctcggtcggtgtctttgacaaag

SEQ ID NO: 218977 - DNA, 25 bp, SARS Virus
tctcggtcggttgctttgacaaaga

SEQ ID NO: 218978 - DNA, 25 bp, SARS Virus
ctcggtcggtttgtttgacaaagat

SEQ ID NO: 218979 - DNA, 25 bp, SARS Virus
tcggtcggtttcgttgacaaagatg

SEQ ID NO: 218980 - DNA, 25 bp, SARS Virus
cggtcggtttctgtgacaaagatgt

SEQ ID NO: 218981 - DNA, 25 bp, SARS Virus
ggtcggtttcttggacaaagatgtt

SEQ ID NO: 218982 - DNA, 25 bp, SARS Virus
gtcggtttctttgacaaagatgttt

SEQ ID NO: 218983 - DNA, 25 bp, SARS Virus
tcggtttctttggcaaagatgtttc

SEQ ID NO: 218984 - DNA, 25 bp, SARS Virus
cggtttctttgagaaagatgtttca

SEQ ID NO: 218985 - DNA, 25 bp, SARS Virus
ggtttctttgacgaagatgtttcac

SEQ ID NO: 218986 - DNA, 25 bp, SARS Virus
gtttctttgacagagatgtttcacg

SEQ ID NO: 218987 - DNA, 25 bp, SARS Virus
tttctttgacaaggatgtttcacga

SEQ ID NO: 218988 - DNA, 25 bp, SARS Virus
ttctttgacaaagatgtttcacgag

SEQ ID NO: 218989 - DNA, 25 bp, SARS Virus
tctttgacaaaggtgtttcacgagg

SEQ ID NO: 218990 - DNA, 25 bp, SARS Virus
ctttgacaaagaggtttcacgagga

SEQ ID NO: 218991 - DNA, 25 bp, SARS Virus
tttgacaaagatgtttcacgaggag

SEQ ID NO: 218992 - DNA, 25 bp, SARS Virus
ttgacaaagatggttcacgaggagt

SEQ ID NO: 218993 - DNA, 25 bp, SARS Virus
tgacaaagatgtgtcacgaggagtc

SEQ ID NO: 218994 - DNA, 25 bp, SARS Virus
gacaaagatgttgcacgaggagtct

SEQ ID NO: 218995 - DNA, 25 bp, SARS Virus
acaaagatgtttgacgaggagtcta

SEQ ID NO: 218996 - DNA, 25 bp, SARS Virus
caaagatgtttcgcgaggagtctac

SEQ ID NO: 218997 - DNA, 25 bp, SARS Virus
aaagatgtttcaggaggagtctaca

SEQ ID NO: 218998 - DNA, 25 bp, SARS Virus
aagatgtttcacgaggagtctacag

SEQ ID NO: 218999 - DNA, 25 bp, SARS Virus
agatgtttcacggggagtctacaga

SEQ ID NO: 219000 - DNA, 25 bp, SARS Virus
gatgtttcacgaggagtctacagaa

SEQ ID NO: 219001 - DNA, 25 bp, SARS Virus
atgtttcacgaggagtctacagaaa

SEQ ID NO: 219002 - DNA, 25 bp, SARS Virus
tgtttcacgaggggtctacagaaac

SEQ ID NO: 219003 - DNA, 25 bp, SARS Virus
gtttcacgaggagtctacagaaact

SEQ ID NO: 219004 - DNA, 25 bp, SARS Virus
tttcacgaggaggctacagaaacta

SEQ ID NO: 219005 - DNA, 25 bp, SARS Virus
ttcacgaggagtgtacagaaactac

SEQ ID NO: 219006 - DNA, 25 bp, SARS Virus
tcacgaggagtcgacagaaactact

SEQ ID NO: 219007 - DNA, 25 bp, SARS Virus
cacgaggagtctgcagaaactactg

SEQ ID NO: 219008 - DNA, 25 bp, SARS Virus
acgaggagtctagagaaactactgc

SEQ ID NO: 219009 - DNA, 25 bp, SARS Virus
cgaggagtctacggaaactactgct

SEQ ID NO: 219010 - DNA, 25 bp, SARS Virus
gaggagtctacagaaactactgctt

SEQ ID NO: 219011 - DNA, 25 bp, SARS Virus
aggagtctacaggaactactgcttc

SEQ ID NO: 219012 - DNA, 25 bp, SARS Virus
ggagtctacagagactactgcttca

SEQ ID NO: 219013 - DNA, 25 bp, SARS Virus
gagtctacagaagctactgcttcac

SEQ ID NO: 219014 - DNA, 25 bp, SARS Virus
agtctacagaaagtactgcttcact

SEQ ID NO: 219015 - DNA, 25 bp, SARS Virus
gtctacagaaacgactgcttcactc

SEQ ID NO: 219016 - DNA, 25 bp, SARS Virus
tctacagaaactgctgcttcactcc

SEQ ID NO: 219017 - DNA, 25 bp, SARS Virus
ctacagaaactagtgcttcactcca

SEQ ID NO: 219018 - DNA, 25 bp, SARS Virus
tacagaaactacggcttcactccat

SEQ ID NO: 219019 - DNA, 25 bp, SARS Virus
acagaaactactgcttcactccata

SEQ ID NO: 219020 - DNA, 25 bp, SARS Virus
cagaaactactggttcactccatag

SEQ ID NO: 219021 - DNA, 25 bp, SARS Virus
agaaactactgcgtcactccatagg

SEQ ID NO: 219022 - DNA, 25 bp, SARS Virus
gaaactactgctgcactccataggt

SEQ ID NO: 219023 - DNA, 25 bp, SARS Virus
aaactactgcttgactccataggta

SEQ ID NO: 219024 - DNA, 25 bp, SARS Virus
aactactgcttcgctccataggtaa

SEQ ID NO: 219025 - DNA, 25 bp, SARS Virus
actactgcttcagtccataggtaat

SEQ ID NO: 219026 - DNA, 25 bp, SARS Virus
ctactgcttcacgccataggtaata

SEQ ID NO: 219027 - DNA, 25 bp, SARS Virus
tactgcttcactgcataggtaatat

SEQ ID NO: 219028 - DNA, 25 bp, SARS Virus
actgcttcactcgataggtaatata

SEQ ID NO: 219029 - DNA, 25 bp, SARS Virus
ctgcttcactccgtaggtaatatac

SEQ ID NO: 219030 - DNA, 25 bp, SARS Virus
tgcttcactccagaggtaatataca

SEQ ID NO: 219031 - DNA, 25 bp, SARS Virus
gcttcactccatgggtaatatacat

SEQ ID NO: 219032 - DNA, 25 bp, SARS Virus
cttcactccataggtaatatacatc

SEQ ID NO: 219033 - DNA, 25 bp, SARS Virus
ttcactccataggtaatatacatca

SEQ ID NO: 219034 - DNA, 25 bp, SARS Virus
tcactccatagggaatatacatcat

SEQ ID NO: 219035 - DNA, 25 bp, SARS Virus
cactccataggtgatatacatcatt

SEQ ID NO: 219036 - DNA, 25 bp, SARS Virus
actccataggtagtatacatcattg

SEQ ID NO: 219037 - DNA, 25 bp, SARS Virus
ctccataggtaagatacatcattgt

SEQ ID NO: 219038 - DNA, 25 bp, SARS Virus
tccataggtaatgtacatcattgtc

SEQ ID NO: 219039 - DNA, 25 bp, SARS Virus
ccataggtaatagacatcattgtcg

SEQ ID NO: 219040 - DNA, 25 bp, SARS Virus
cataggtaatatgcatcattgtcgt

SEQ ID NO: 219041 - DNA, 25 bp, SARS Virus
ataggtaatatagatcattgtcgta

SEQ ID NO: 219042 - DNA, 25 bp, SARS Virus
taggtaatatacgtcattgtcgtag

SEQ ID NO: 219043 - DNA, 25 bp, SARS Virus
aggtaatatacagcattgtcgtaga

SEQ ID NO: 219044 - DNA, 25 bp, SARS Virus
ggtaatatacatgattgtcgtagac

SEQ ID NO: 219045 - DNA, 25 bp, SARS Virus
gtaatatacatcgttgtcgtagacc

SEQ ID NO: 219046 - DNA, 25 bp, SARS Virus
taatatacatcagtgtcgtagacca

SEQ ID NO: 219047 - DNA, 25 bp, SARS Virus
aatatacatcatggtcgtagaccac

SEQ ID NO: 219048 - DNA, 25 bp, SARS Virus
atatacatcattgtcgtagaccact

SEQ ID NO: 219049 - DNA, 25 bp, SARS Virus
tatacatcattggcgtagaccacta

SEQ ID NO: 219050 - DNA, 25 bp, SARS Virus
atacatcattgtggtagaccactac

SEQ ID NO: 219051 - DNA, 25 bp, SARS Virus
tacatcattgtcgtagaccactact

SEQ ID NO: 219052 - DNA, 25 bp, SARS Virus
acatcattgtcggagaccactacta

SEQ ID NO: 219053 - DNA, 25 bp, SARS Virus
catcattgtcgtggaccactactat

SEQ ID NO: 219054 - DNA, 25 bp, SARS Virus
atcattgtcgtagaccactactatg

SEQ ID NO: 219055 - DNA, 25 bp, SARS Virus
tcattgtcgtaggccactactatga

SEQ ID NO: 219056 - DNA, 25 bp, SARS Virus
cattgtcgtagagcactactatgac

SEQ ID NO: 219057 - DNA, 25 bp, SARS Virus
attgtcgtagacgactactatgact

SEQ ID NO: 219058 - DNA, 25 bp, SARS Virus
ttgtcgtagaccgctactatgactg

SEQ ID NO: 219059 - DNA, 25 bp, SARS Virus
tgtcgtagaccagtactatgactgt

SEQ ID NO: 219060 - DNA, 25 bp, SARS Virus
gtcgtagaccacgactatgactgtg

SEQ ID NO: 219061 - DNA, 25 bp, SARS Virus
tcgtagaccactgctatgactgtga

SEQ ID NO: 219062 - DNA, 25 bp, SARS Virus
cgtagaccactagtatgactgtgat

SEQ ID NO: 219063 - DNA, 25 bp, SARS Virus
gtagaccactacgatgactgtgatg

SEQ ID NO: 219064 - DNA, 25 bp, SARS Virus
tagaccactactgtgactgtgatgc

SEQ ID NO: 219065 - DNA, 25 bp, SARS Virus
agaccactactaggactgtgatgcc

SEQ ID NO: 219066 - DNA, 25 bp, SARS Virus
gaccactactatgactgtgatgccg

SEQ ID NO: 219067 - DNA, 25 bp, SARS Virus
accactactatggctgtgatgccgt

SEQ ID NO: 219068 - DNA, 25 bp, SARS Virus
ccactactatgagtgtgatgccgtc

SEQ ID NO: 219069 - DNA, 25 bp, SARS Virus
cactactatgacggtgatgccgtcc

SEQ ID NO: 219070 - DNA, 25 bp, SARS Virus
actactatgactgtgatgccgtcct

SEQ ID NO: 219071 - DNA, 25 bp, SARS Virus
ctactatgactgggatgccgtcctc

SEQ ID NO: 219072 - DNA, 25 bp, SARS Virus
tactatgactgtgatgccgtcctcg

SEQ ID NO: 219073 - DNA, 25 bp, SARS Virus
actatgactgtggtgccgtcctcga

SEQ ID NO: 219074 - DNA, 25 bp, SARS Virus
ctatgactgtgaggccgtcctcgaa

SEQ ID NO: 219075 - DNA, 25 bp, SARS Virus
tatgactgtgatgccgtcctcgaaa

SEQ ID NO: 219076 - DNA, 25 bp, SARS Virus
atgactgtgatggcgtcctcgaaat

SEQ ID NO: 219077 - DNA, 25 bp, SARS Virus
tgactgtgatgcggtcctcgaaatt

SEQ ID NO: 219078 - DNA, 25 bp, SARS Virus
gactgtgatgccgtcctcgaaattc

SEQ ID NO: 219079 - DNA, 25 bp, SARS Virus
actgtgatgccggcctcgaaattct

SEQ ID NO: 219080 - DNA, 25 bp, SARS Virus
ctgtgatgccgtgctcgaaattctc

SEQ ID NO: 219081 - DNA, 25 bp, SARS Virus
tgtgatgccgtcgtcgaaattctct

SEQ ID NO: 219082 - DNA, 25 bp, SARS Virus
gtgatgccgtccgcgaaattctctt

SEQ ID NO: 219083 - DNA, 25 bp, SARS Virus
tgatgccgtcctggaaattctcttg

SEQ ID NO: 219084 - DNA, 25 bp, SARS Virus
gatgccgtcctcgaaattctcttgc

SEQ ID NO: 219085 - DNA, 25 bp, SARS Virus
atgccgtcctcggaattctcttgcg

SEQ ID NO: 219086 - DNA, 25 bp, SARS Virus
tgccgtcctcgagattctcttgcgt

SEQ ID NO: 219087 - DNA, 25 bp, SARS Virus
gccgtcctcgaagttctcttgcgta

SEQ ID NO: 219088 - DNA, 25 bp, SARS Virus
ccgtcctcgaaagtctcttgcgtat

SEQ ID NO: 219089 - DNA, 25 bp, SARS Virus
cgtcctcgaaatgctcttgcgtatg

SEQ ID NO: 219090 - DNA, 25 bp, SARS Virus
gtcctcgaaattgtcttgcgtatgt

SEQ ID NO: 219091 - DNA, 25 bp, SARS Virus
tcctcgaaattcgcttgcgtatgtc

SEQ ID NO: 219092 - DNA, 25 bp, SARS Virus
cctcgaaattctgttgcgtatgtcg

SEQ ID NO: 219093 - DNA, 25 bp, SARS Virus
ctcgaaattctcgtgcgtatgtcgc

SEQ ID NO: 219094 - DNA, 25 bp, SARS Virus
tcgaaattctctggcgtatgtcgcg

SEQ ID NO: 219095 - DNA, 25 bp, SARS Virus
cgaaattctcttgcgtatgtcgcgc

SEQ ID NO: 219096 - DNA, 25 bp, SARS Virus
gaaattctcttgggtatgtcgcgcg

SEQ ID NO: 219097 - DNA, 25 bp, SARS Virus
aaattctcttgcgtatgtcgcgcgt

SEQ ID NO: 219098 - DNA, 25 bp, SARS Virus
aattctcttgcggatgtcgcgcgtc

SEQ ID NO: 219099 - DNA, 25 bp, SARS Virus
attctcttgcgtgtgtcgcgcgtcg

SEQ ID NO: 219100 - DNA, 25 bp, SARS Virus
ttctcttgcgtaggtcgcgcgtcgg

SEQ ID NO: 219101 - DNA, 25 bp, SARS Virus
tctcttgcgtatgtcgcgcgtcgga

SEQ ID NO: 219102 - DNA, 25 bp, SARS Virus
ctcttgcgtatggcgcgcgtcggag

SEQ ID NO: 219103 - DNA, 25 bp, SARS Virus
tcttgcgtatgtggcgcgtcggaga

SEQ ID NO: 219104 - DNA, 25 bp, SARS Virus
cttgcgtatgtcgcgcgtcggagaa

SEQ ID NO: 219105 - DNA, 25 bp, SARS Virus
ttgcgtatgtcgggcgtcggagaag

SEQ ID NO: 219106 - DNA, 25 bp, SARS Virus
tgcgtatgtcgcgcgtcggagaagt

SEQ ID NO: 219107 - DNA, 25 bp, SARS Virus
gcgtatgtcgcgggtcggagaagtt

SEQ ID NO: 219108 - DNA, 25 bp, SARS Virus
cgtatgtcgcgcgtcggagaagttc

SEQ ID NO: 219109 - DNA, 25 bp, SARS Virus
gtatgtcgcgcggcggagaagttct

SEQ ID NO: 219110 - DNA, 25 bp, SARS Virus
tatgtcgcgcgtgggagaagttcta

SEQ ID NO: 219111 - DNA, 25 bp, SARS Virus
atgtcgcgcgtcggagaagttctaa

SEQ ID NO: 219112 - DNA, 25 bp, SARS Virus
tgtcgcgcgtcggagaagttctaat

SEQ ID NO: 219113 - DNA, 25 bp, SARS Virus
gtcgcgcgtcggggaagttctaatt

SEQ ID NO: 219114 - DNA, 25 bp, SARS Virus
tcgcgcgtcggagaagttctaattt

SEQ ID NO: 219115 - DNA, 25 bp, SARS Virus
cgcgcgtcggaggagttctaatttt

SEQ ID NO: 219116 - DNA, 25 bp, SARS Virus
gcgcgtcggagaggttctaattttg

SEQ ID NO: 219117 - DNA, 25 bp, SARS Virus
cgcgtcggagaagttctaattttgg

SEQ ID NO: 219118 - DNA, 25 bp, SARS Virus
gcgtcggagaaggtctaattttggt

SEQ ID NO: 219119 - DNA, 25 bp, SARS Virus
cgtcggagaagtgctaattttggta

SEQ ID NO: 219120 - DNA, 25 bp, SARS Virus
gtcggagaagttgtaattttggtac

SEQ ID NO: 219121 - DNA, 25 bp, SARS Virus
tcggagaagttcgaattttggtaca

SEQ ID NO: 219122 - DNA, 25 bp, SARS Virus
cggagaagttctgattttggtacac

SEQ ID NO: 219123 - DNA, 25 bp, SARS Virus
ggagaagttctagttttggtacaca

SEQ ID NO: 219124 - DNA, 25 bp, SARS Virus
gagaagttctaagtttggtacacag

SEQ ID NO: 219125 - DNA, 25 bp, SARS Virus
agaagttctaatgttggtacacagt

SEQ ID NO: 219126 - DNA, 25 bp, SARS Virus
gaagttctaattgtggtacacagtg

SEQ ID NO: 219127 - DNA, 25 bp, SARS Virus
aagttctaatttgggtacacagtgt

SEQ ID NO: 219128 - DNA, 25 bp, SARS Virus
agttctaattttggtacacagtgta

SEQ ID NO: 219129 - DNA, 25 bp, SARS Virus
gttctaattttggtacacagtgtat

SEQ ID NO: 219130 - DNA, 25 bp, SARS Virus
ttctaattttgggacacagtgtatt

SEQ ID NO: 219131 - DNA, 25 bp, SARS Virus
tctaattttggtgcacagtgtattg

SEQ ID NO: 219132 - DNA, 25 bp, SARS Virus
ctaattttggtagacagtgtattgg

SEQ ID NO: 219133 - DNA, 25 bp, SARS Virus
taattttggtacgcagtgtattggt

SEQ ID NO: 219134 - DNA, 25 bp, SARS Virus
aattttggtacagagtgtattggtt

SEQ ID NO: 219135 - DNA, 25 bp, SARS Virus
attttggtacacggtgtattggtta

SEQ ID NO: 219136 - DNA, 25 bp, SARS Virus
ttttggtacacagtgtattggttaa

SEQ ID NO: 219137 - DNA, 25 bp, SARS Virus
tttggtacacagggtattggttaac

SEQ ID NO: 219138 - DNA, 25 bp, SARS Virus
ttggtacacagtgtattggttaacc

SEQ ID NO: 219139 - DNA, 25 bp, SARS Virus
tggtacacagtggattggttaaccg

SEQ ID NO: 219140 - DNA, 25 bp, SARS Virus
ggtacacagtgtgttggttaaccgt

SEQ ID NO: 219141 - DNA, 25 bp, SARS Virus
gtacacagtgtagtggttaaccgta

SEQ ID NO: 219142 - DNA, 25 bp, SARS Virus
tacacagtgtatgggttaaccgtaa

SEQ ID NO: 219143 - DNA, 25 bp, SARS Virus
acacagtgtattggttaaccgtaac

SEQ ID NO: 219144 - DNA, 25 bp, SARS Virus
cacagtgtattggttaaccgtaaca

SEQ ID NO: 219145 - DNA, 25 bp, SARS Virus
aatgggagtacttaatgtactccaa

SEQ ID NO: 219146 - DNA, 25 bp, SARS Virus
atgggagtactatatgtactccaaa

SEQ ID NO: 219147 - DNA, 25 bp, SARS Virus
tgggagtactaattgtactccaaat

SEQ ID NO: 219148 - DNA, 25 bp, SARS Virus
gggagtactaaatgtactccaaatt

SEQ ID NO: 219149 - DNA, 25 bp, SARS Virus
ggagtactaaatttactccaaatta

SEQ ID NO: 219150 - DNA, 25 bp, SARS Virus
gagtactaaatgtactccaaattaa

SEQ ID NO: 219151 - DNA, 25 bp, SARS Virus
agtactaaatgttctccaaattaaa

SEQ ID NO: 219152 - DNA, 25 bp, SARS Virus
gtactaaatgtattccaaattaaaa

SEQ ID NO: 219153 - DNA, 25 bp, SARS Virus
tactaaatgtactccaaattaaaaa

SEQ ID NO: 219154 - DNA, 25 bp, SARS Virus
actaaatgtacttcaaattaaaaac

SEQ ID NO: 219155 - DNA, 25 bp, SARS Virus
ctaaatgtactctaaattaaaaaca

SEQ ID NO: 219156 - DNA, 25 bp, SARS Virus
taaatgtactcctaattaaaaacat

SEQ ID NO: 219157 - DNA, 25 bp, SARS Virus
aaatgtactccatattaaaaacatt

SEQ ID NO: 219158 - DNA, 25 bp, SARS Virus
aatgtactccaatttaaaaacattg

SEQ ID NO: 219159 - DNA, 25 bp, SARS Virus
atgtactccaaattaaaaacattgt

SEQ ID NO: 219160 - DNA, 25 bp, SARS Virus
tgtactccaaattaaaaacattgta

SEQ ID NO: 219161 - DNA, 25 bp, SARS Virus
gtactccaaatttaaaacattgtag

SEQ ID NO: 219162 - DNA, 25 bp, SARS Virus
tactccaaattataaacattgtagt

SEQ ID NO: 219163 - DNA, 25 bp, SARS Virus
actccaaattaataacattgtagtc

SEQ ID NO: 219164 - DNA, 25 bp, SARS Virus
ctccaaattaaatacattgtagtcg

SEQ ID NO: 219165 - DNA, 25 bp, SARS Virus
tccaaattaaaatcattgtagtcgt

SEQ ID NO: 219166 - DNA, 25 bp, SARS Virus
ccaaattaaaaatattgtagtcgtg

SEQ ID NO: 219167 - DNA, 25 bp, SARS Virus
caaattaaaaactttgtagtcgtgg

SEQ ID NO: 219168 - DNA, 25 bp, SARS Virus
aaattaaaaacattgtagtcgtggt

SEQ ID NO: 219169 - DNA, 25 bp, SARS Virus
aattaaaaacattgtagtcgtggta

SEQ ID NO: 219170 - DNA, 25 bp, SARS Virus
attaaaaacattttagtcgtggtag

SEQ ID NO: 219171 - DNA, 25 bp, SARS Virus
ttaaaaacattgtagtcgtggtagg

SEQ ID NO: 219172 - DNA, 25 bp, SARS Virus
taaaaacattgttgtcgtggtaggt

SEQ ID NO: 219173 - DNA, 25 bp, SARS Virus
aaaaacattgtattcgtggtaggtt

SEQ ID NO: 219174 - DNA, 25 bp, SARS Virus
aaaacattgtagtcgtggtaggttc

SEQ ID NO: 219175 - DNA, 25 bp, SARS Virus
aaacattgtagttgtggtaggttca

SEQ ID NO: 219176 - DNA, 25 bp, SARS Virus
aacattgtagtcttggtaggttcat

SEQ ID NO: 219177 - DNA, 25 bp, SARS Virus
acattgtagtcgtggtaggttcata

SEQ ID NO: 219178 - DNA, 25 bp, SARS Virus
cattgtagtcgttgtaggttcatac

SEQ ID NO: 219179 - DNA, 25 bp, SARS Virus
attgtagtcgtgttaggttcataca

SEQ ID NO: 219180 - DNA, 25 bp, SARS Virus
ttgtagtcgtggtaggttcatacaa

SEQ ID NO: 219181 - DNA, 25 bp, SARS Virus
tgtagtcgtggttggttcatacaac

SEQ ID NO: 219182 - DNA, 25 bp, SARS Virus
gtagtcgtggtatgttcatacaacc

SEQ ID NO: 219183 - DNA, 25 bp, SARS Virus
tagtcgtggtagtttcatacaacct

SEQ ID NO: 219184 - DNA, 25 bp, SARS Virus
agtcgtggtaggttcatacaacctg

SEQ ID NO: 219185 - DNA, 25 bp, SARS Virus
gtcgtggtaggttcatacaacctgg

SEQ ID NO: 219186 - DNA, 25 bp, SARS Virus
tcgtggtaggtttatacaacctggt

SEQ ID NO: 219187 - DNA, 25 bp, SARS Virus
cgtggtaggttcttacaacctggtt

SEQ ID NO: 219188 - DNA, 25 bp, SARS Virus
gtggtaggttcatacaacctggttt

SEQ ID NO: 219189 - DNA, 25 bp, SARS Virus
tggtaggttcattcaacctggtttg

SEQ ID NO: 219190 - DNA, 25 bp, SARS Virus
ggtaggttcatataacctggtttga

SEQ ID NO: 219191 - DNA, 25 bp, SARS Virus
gtaggttcatactacctggtttgac

SEQ ID NO: 219192 - DNA, 25 bp, SARS Virus
taggttcatacatcctggtttgacg

SEQ ID NO: 219193 - DNA, 25 bp, SARS Virus
aggttcatacaatctggtttgacga

SEQ ID NO: 219194 - DNA, 25 bp, SARS Virus
ggttcatacaacttggtttgacgac

SEQ ID NO: 219195 - DNA, 25 bp, SARS Virus
gttcatacaacctggtttgacgaca

SEQ ID NO: 219196 - DNA, 25 bp, SARS Virus
ttcatacaaccttgtttgacgacag

SEQ ID NO: 219197 - DNA, 25 bp, SARS Virus
tcatacaacctgttttgacgacagg

SEQ ID NO: 219198 - DNA, 25 bp, SARS Virus
catacaacctggtttgacgacaggt

SEQ ID NO: 219199 - DNA, 25 bp, SARS Virus
atacaacctggtttgacgacaggta

SEQ ID NO: 219200 - DNA, 25 bp, SARS Virus
tacaacctggtttgacgacaggtat

SEQ ID NO: 219201 - DNA, 25 bp, SARS Virus
acaacctggttttacgacaggtata

SEQ ID NO: 219202 - DNA, 25 bp, SARS Virus
caacctggtttgtcgacaggtatac

SEQ ID NO: 219203 - DNA, 25 bp, SARS Virus
aacctggtttgatgacaggtataca

SEQ ID NO: 219204 - DNA, 25 bp, SARS Virus
acctggtttgactacaggtatacag

SEQ ID NO: 219205 - DNA, 25 bp, SARS Virus
cctggtttgacgtcaggtatacagt

SEQ ID NO: 219206 - DNA, 25 bp, SARS Virus
ctggtttgacgataggtatacagta

SEQ ID NO: 219207 - DNA, 25 bp, SARS Virus
tggtttgacgactggtatacagtat

SEQ ID NO: 219208 - DNA, 25 bp, SARS Virus
ggtttgacgacatgtatacagtatc

SEQ ID NO: 219209 - DNA, 25 bp, SARS Virus
gtttgacgacagttatacagtatct

SEQ ID NO: 219210 - DNA, 25 bp, SARS Virus
tttgacgacaggtatacagtatctg

SEQ ID NO: 219211 - DNA, 25 bp, SARS Virus
ttgacgacaggtttacagtatctgt

SEQ ID NO: 219212 - DNA, 25 bp, SARS Virus
tgacgacaggtatacagtatctgta

SEQ ID NO: 219213 - DNA, 25 bp, SARS Virus
gacgacaggtattcagtatctgtat

SEQ ID NO: 219214 - DNA, 25 bp, SARS Virus
acgacaggtatatagtatctgtata

SEQ ID NO: 219215 - DNA, 25 bp, SARS Virus
cgacaggtatactgtatctgtatag

SEQ ID NO: 219216 - DNA, 25 bp, SARS Virus
gacaggtatacattatctgtatagg

SEQ ID NO: 219217 - DNA, 25 bp, SARS Virus
acaggtatacagtatctgtataggt

SEQ ID NO: 219218 - DNA, 25 bp, SARS Virus
caggtatacagtttctgtataggtg

SEQ ID NO: 219219 - DNA, 25 bp, SARS Virus
aggtatacagtatctgtataggtgt

SEQ ID NO: 219220 - DNA, 25 bp, SARS Virus
ggtatacagtatttgtataggtgtt

SEQ ID NO: 219221 - DNA, 25 bp, SARS Virus
gtatacagtatctgtataggtgttc

SEQ ID NO: 219222 - DNA, 25 bp, SARS Virus
tatacagtatctttataggtgttcg

SEQ ID NO: 219223 - DNA, 25 bp, SARS Virus
atacagtatctgtataggtgttcga

SEQ ID NO: 219224 - DNA, 25 bp, SARS Virus
tacagtatctgtttaggtgttcgac

SEQ ID NO: 219225 - DNA, 25 bp, SARS Virus
acagtatctgtataggtgttcgaca

SEQ ID NO: 219226 - DNA, 25 bp, SARS Virus
cagtatctgtattggtgttcgacac

SEQ ID NO: 219227 - DNA, 25 bp, SARS Virus
agtatctgtatatgtgttcgacaca

SEQ ID NO: 219228 - DNA, 25 bp, SARS Virus
gtatctgtatagttgttcgacacac

SEQ ID NO: 219229 - DNA, 25 bp, SARS Virus
tatctgtataggtgttcgacacaca

SEQ ID NO: 219230 - DNA, 25 bp, SARS Virus
atctgtataggttttcgacacacac

SEQ ID NO: 219231 - DNA, 25 bp, SARS Virus
tctgtataggtgttcgacacacacc

SEQ ID NO: 219232 - DNA, 25 bp, SARS Virus
ctgtataggtgttcgacacacacct

SEQ ID NO: 219233 - DNA, 25 bp, SARS Virus
tgtataggtgtttgacacacacctc

SEQ ID NO: 219234 - DNA, 25 bp, SARS Virus
gtataggtgttctacacacacctct

SEQ ID NO: 219235 - DNA, 25 bp, SARS Virus
tataggtgttcgtcacacacctcta

SEQ ID NO: 219236 - DNA, 25 bp, SARS Virus
ataggtgttcgatacacacctctaa

SEQ ID NO: 219237 - DNA, 25 bp, SARS Virus
taggtgttcgactcacacctctaat

SEQ ID NO: 219238 - DNA, 25 bp, SARS Virus
aggtgttcgacatacacctctaatc

SEQ ID NO: 219239 - DNA, 25 bp, SARS Virus
ggtgttcgacactcacctctaatca

SEQ ID NO: 219240 - DNA, 25 bp, SARS Virus
gtgttcgacacatacctctaatcac

SEQ ID NO: 219241 - DNA, 25 bp, SARS Virus
tgttcgacacactcctctaatcaca

SEQ ID NO: 219242 - DNA, 25 bp, SARS Virus
gttcgacacacatctctaatcacaa

SEQ ID NO: 219243 - DNA, 25 bp, SARS Virus
ttcgacacacacttctaatcacaac

SEQ ID NO: 219244 - DNA, 25 bp, SARS Virus
tcgacacacacctctaatcacaaca

SEQ ID NO: 219245 - DNA, 25 bp, SARS Virus
cgacacacacctttaatcacaacag

SEQ ID NO: 219246 - DNA, 25 bp, SARS Virus
gacacacacctctaatcacaacagg

SEQ ID NO: 219247 - DNA, 25 bp, SARS Virus
acacacacctcttatcacaacaggt

SEQ ID NO: 219248 - DNA, 25 bp, SARS Virus
cacacacctctattcacaacaggtg

SEQ ID NO: 219249 - DNA, 25 bp, SARS Virus
acacacctctaatcacaacaggtgt

SEQ ID NO: 219250 - DNA, 25 bp, SARS Virus
cacacctctaattacaacaggtgtc

SEQ ID NO: 219251 - DNA, 25 bp, SARS Virus
acacctctaatctcaacaggtgtca

SEQ ID NO: 219252 - DNA, 25 bp, SARS Virus
cacctctaatcataacaggtgtcaa

SEQ ID NO: 219253 - DNA, 25 bp, SARS Virus
acctctaatcactacaggtgtcaac

SEQ ID NO: 219254 - DNA, 25 bp, SARS Virus
cctctaatcacatcaggtgtcaaca

SEQ ID NO: 219255 - DNA, 25 bp, SARS Virus
ctctaatcacaataggtgtcaacac

SEQ ID NO: 219256 - DNA, 25 bp, SARS Virus
tctaatcacaactggtgtcaacact

SEQ ID NO: 219257 - DNA, 25 bp, SARS Virus
ctaatcacaacatgtgtcaacactt

SEQ ID NO: 219258 - DNA, 25 bp, SARS Virus
taatcacaacagttgtcaacacttg

SEQ ID NO: 219259 - DNA, 25 bp, SARS Virus
aatcacaacaggtgtcaacacttgt

SEQ ID NO: 219260 - DNA, 25 bp, SARS Virus
atcacaacaggtttcaacacttgtg

SEQ ID NO: 219261 - DNA, 25 bp, SARS Virus
tcacaacaggtgtcaacacttgtga

SEQ ID NO: 219262 - DNA, 25 bp, SARS Virus
cacaacaggtgttaacacttgtgaa

SEQ ID NO: 219263 - DNA, 25 bp, SARS Virus
acaacaggtgtctacacttgtgaaa

SEQ ID NO: 219264 - DNA, 25 bp, SARS Virus
caacaggtgtcatcacttgtgaaaa

SEQ ID NO: 219265 - DNA, 25 bp, SARS Virus
aacaggtgtcaatacttgtgaaaat

SEQ ID NO: 219266 - DNA, 25 bp, SARS Virus
acaggtgtcaactcttgtgaaaata

SEQ ID NO: 219267 - DNA, 25 bp, SARS Virus
caggtgtcaacatttgtgaaaatat

SEQ ID NO: 219268 - DNA, 25 bp, SARS Virus
aggtgtcaacacttgtgaaaatatc

SEQ ID NO: 219269 - DNA, 25 bp, SARS Virus
ggtgtcaacacttgtgaaaatatca

SEQ ID NO: 219270 - DNA, 25 bp, SARS Virus
gtgtcaacacttttgaaaatatcag

SEQ ID NO: 219271 - DNA, 25 bp, SARS Virus
tgtcaacacttgtgaaaatatcaga

SEQ ID NO: 219272 - DNA, 25 bp, SARS Virus
gtcaacacttgttaaaatatcagaa

SEQ ID NO: 219273 - DNA, 25 bp, SARS Virus
tcaacacttgtgtaaatatcagaat

SEQ ID NO: 219274 - DNA, 25 bp, SARS Virus
caacacttgtgataatatcagaatt

SEQ ID NO: 219275 - DNA, 25 bp, SARS Virus
aacacttgtgaatatatcagaattg

SEQ ID NO: 219276 - DNA, 25 bp, SARS Virus
acacttgtgaaattatcagaattgg

SEQ ID NO: 219277 - DNA, 25 bp, SARS Virus
cacttgtgaaaatatcagaattgga

SEQ ID NO: 219278 - DNA, 25 bp, SARS Virus
acttgtgaaaatttcagaattggag

SEQ ID NO: 219279 - DNA, 25 bp, SARS Virus
cttgtgaaaatatcagaattggagg

SEQ ID NO: 219280 - DNA, 25 bp, SARS Virus
ttgtgaaaatattagaattggaggg

SEQ ID NO: 219281 - DNA, 25 bp, SARS Virus
tgtgaaaatatctgaattggagggc

SEQ ID NO: 219282 - DNA, 25 bp, SARS Virus
gtgaaaatatcataattggagggcg

SEQ ID NO: 219283 - DNA, 25 bp, SARS Virus
tgaaaatatcagtattggagggcgt

SEQ ID NO: 219284 - DNA, 25 bp, SARS Virus
gaaaatatcagatttggagggcgtc

SEQ ID NO: 219285 - DNA, 25 bp, SARS Virus
aaaatatcagaattggagggcgtcc

SEQ ID NO: 219286 - DNA, 25 bp, SARS Virus
aaatatcagaattggagggcgtccc

SEQ ID NO: 219287 - DNA, 25 bp, SARS Virus
aatatcagaatttgagggcgtccct

SEQ ID NO: 219288 - DNA, 25 bp, SARS Virus
atatcagaattgtagggcgtcccta

SEQ ID NO: 219289 - DNA, 25 bp, SARS Virus
tatcagaattggtgggcgtccctat

SEQ ID NO: 219290 - DNA, 25 bp, SARS Virus
atcagaattggatggcgtccctatt

SEQ ID NO: 219291 - DNA, 25 bp, SARS Virus
tcagaattggagtgcgtccctattc

SEQ ID NO: 219292 - DNA, 25 bp, SARS Virus
cagaattggaggtcgtccctattct

SEQ ID NO: 219293 - DNA, 25 bp, SARS Virus
agaattggagggtgtccctattctc

SEQ ID NO: 219294 - DNA, 25 bp, SARS Virus
gaattggagggcttccctattctct

SEQ ID NO: 219295 - DNA, 25 bp, SARS Virus
aattggagggcgtccctattctctg

SEQ ID NO: 219296 - DNA, 25 bp, SARS Virus
attggagggcgttcctattctctga

SEQ ID NO: 219297 - DNA, 25 bp, SARS Virus
ttggagggcgtctctattctctgag

SEQ ID NO: 219298 - DNA, 25 bp, SARS Virus
tggagggcgtccttattctctgaga

SEQ ID NO: 219299 - DNA, 25 bp, SARS Virus
ggagggcgtccctattctctgagaa

SEQ ID NO: 219300 - DNA, 25 bp, SARS Virus
gagggcgtcccttttctctgagaaa

SEQ ID NO: 219301 - DNA, 25 bp, SARS Virus
agggcgtccctattctctgagaaat

SEQ ID NO: 219302 - DNA, 25 bp, SARS Virus
gggcgtccctattctctgagaaatc

SEQ ID NO: 219303 - DNA, 25 bp, SARS Virus
ggcgtccctattttctgagaaatca

SEQ ID NO: 219304 - DNA, 25 bp, SARS Virus
gcgtccctattctctgagaaatcaa

SEQ ID NO: 219305 - DNA, 25 bp, SARS Virus
cgtccctattctttgagaaatcaaa

SEQ ID NO: 219306 - DNA, 25 bp, SARS Virus
gtccctattctctgagaaatcaaac

SEQ ID NO: 219307 - DNA, 25 bp, SARS Virus
tccctattctcttagaaatcaaaca

SEQ ID NO: 219308 - DNA, 25 bp, SARS Virus
ccctattctctgtgaaatcaaacag

SEQ ID NO: 219309 - DNA, 25 bp, SARS Virus
cctattctctgataaatcaaacagt

SEQ ID NO: 219310 - DNA, 25 bp, SARS Virus
ctattctctgagtaatcaaacagtt

SEQ ID NO: 219311 - DNA, 25 bp, SARS Virus
tattctctgagatatcaaacagttc

SEQ ID NO: 219312 - DNA, 25 bp, SARS Virus
attctctgagaattcaaacagttca

SEQ ID NO: 219313 - DNA, 25 bp, SARS Virus
ttctctgagaaatcaaacagttcac

SEQ ID NO: 219314 - DNA, 25 bp, SARS Virus
tctctgagaaattaaacagttcact

SEQ ID NO: 219315 - DNA, 25 bp, SARS Virus
ctctgagaaatctaacagttcactt

SEQ ID NO: 219316 - DNA, 25 bp, SARS Virus
tctgagaaatcatacagttcacttt

SEQ ID NO: 219317 - DNA, 25 bp, SARS Virus
ctgagaaatcaatcagttcactttc

SEQ ID NO: 219318 - DNA, 25 bp, SARS Virus
tgagaaatcaaatagttcactttct

SEQ ID NO: 219319 - DNA, 25 bp, SARS Virus
gagaaatcaaactgttcactttctt

SEQ ID NO: 219320 - DNA, 25 bp, SARS Virus
agaaatcaaacatttcactttcttg

SEQ ID NO: 219321 - DNA, 25 bp, SARS Virus
gaaatcaaacagttcactttcttgg

SEQ ID NO: 219322 - DNA, 25 bp, SARS Virus
aaatcaaacagttcactttcttgga

SEQ ID NO: 219323 - DNA, 25 bp, SARS Virus
aatcaaacagtttactttcttggag

SEQ ID NO: 219324 - DNA, 25 bp, SARS Virus
atcaaacagttctctttcttggagt

SEQ ID NO: 219325 - DNA, 25 bp, SARS Virus
tcaaacagttcattttcttggagtg

SEQ ID NO: 219326 - DNA, 25 bp, SARS Virus
caaacagttcactttcttggagtgg

SEQ ID NO: 219327 - DNA, 25 bp, SARS Virus
aaacagttcactttcttggagtggc

SEQ ID NO: 219328 - DNA, 25 bp, SARS Virus
aacagttcactttcttggagtggca

SEQ ID NO: 219329 - DNA, 25 bp, SARS Virus
acagttcacttttttggagtggcag

SEQ ID NO: 219330 - DNA, 25 bp, SARS Virus
cagttcactttcttggagtggcagt

SEQ ID NO: 219331 - DNA, 25 bp, SARS Virus
agttcactttcttggagtggcagtt

SEQ ID NO: 219332 - DNA, 25 bp, SARS Virus
gttcactttctttgagtggcagttc

SEQ ID NO: 219333 - DNA, 25 bp, SARS Virus
ttcactttcttgtagtggcagttct

SEQ ID NO: 219334 - DNA, 25 bp, SARS Virus
tcactttcttggtgtggcagttcta

SEQ ID NO: 219335 - DNA, 25 bp, SARS Virus
cactttcttggattggcagttctac

SEQ ID NO: 219336 - DNA, 25 bp, SARS Virus
actttcttggagtggcagttctact

SEQ ID NO: 219337 - DNA, 25 bp, SARS Virus
ctttcttggagttgcagttctactt

SEQ ID NO: 219338 - DNA, 25 bp, SARS Virus
tttcttggagtgtcagttctacttt

SEQ ID NO: 219339 - DNA, 25 bp, SARS Virus
ttcttggagtggtagttctactttg

SEQ ID NO: 219340 - DNA, 25 bp, SARS Virus
tcttggagtggctgttctactttga

SEQ ID NO: 219341 - DNA, 25 bp, SARS Virus
cttggagtggcatttctactttgag

SEQ ID NO: 219342 - DNA, 25 bp, SARS Virus
ttggagtggcagttctactttgagc

SEQ ID NO: 219343 - DNA, 25 bp, SARS Virus
tggagtggcagttctactttgagct

SEQ ID NO: 219344 - DNA, 25 bp, SARS Virus
ggagtggcagttttactttgagctg

SEQ ID NO: 219345 - DNA, 25 bp, SARS Virus
gagtggcagttctactttgagctgc

SEQ ID NO: 219346 - DNA, 25 bp, SARS Virus
agtggcagttcttctttgagctgcc

SEQ ID NO: 219347 - DNA, 25 bp, SARS Virus
gtggcagttctattttgagctgccc

SEQ ID NO: 219348 - DNA, 25 bp, SARS Virus
tggcagttctactttgagctgcccc

SEQ ID NO: 219349 - DNA, 25 bp, SARS Virus
ggcagttctactttgagctgccccg

SEQ ID NO: 219350 - DNA, 25 bp, SARS Virus
gcagttctactttgagctgccccga

SEQ ID NO: 219351 - DNA, 25 bp, SARS Virus
cagttctacttttagctgccccgag

SEQ ID NO: 219352 - DNA, 25 bp, SARS Virus
agttctactttgtgctgccccgaga

SEQ ID NO: 219353 - DNA, 25 bp, SARS Virus
gttctactttgatctgccccgagag

SEQ ID NO: 219354 - DNA, 25 bp, SARS Virus
ttctactttgagttgccccgagagg

SEQ ID NO: 219355 - DNA, 25 bp, SARS Virus
tctactttgagctgccccgagaggt

SEQ ID NO: 219356 - DNA, 25 bp, SARS Virus
ctactttgagcttccccgagaggtc

SEQ ID NO: 219357 - DNA, 25 bp, SARS Virus
tactttgagctgtcccgagaggtct

SEQ ID NO: 219358 - DNA, 25 bp, SARS Virus
actttgagctgctccgagaggtctc

SEQ ID NO: 219359 - DNA, 25 bp, SARS Virus
ctttgagctgcctcgagaggtctca

SEQ ID NO: 219360 - DNA, 25 bp, SARS Virus
tttgagctgccctgagaggtctcac

SEQ ID NO: 219361 - DNA, 25 bp, SARS Virus
ttgagctgcccctagaggtctcaca

SEQ ID NO: 219362 - DNA, 25 bp, SARS Virus
tgagctgccccgtgaggtctcacac

SEQ ID NO: 219363 - DNA, 25 bp, SARS Virus
gagctgccccgataggtctcacacc

SEQ ID NO: 219364 - DNA, 25 bp, SARS Virus
agctgccccgagtggtctcacacca

SEQ ID NO: 219365 - DNA, 25 bp, SARS Virus
gctgccccgagatgtctcacaccat

SEQ ID NO: 219366 - DNA, 25 bp, SARS Virus
ctgccccgagagttctcacaccatg

SEQ ID NO: 219367 - DNA, 25 bp, SARS Virus
tgccccgagaggtctcacaccatgt

SEQ ID NO: 219368 - DNA, 25 bp, SARS Virus
gccccgagaggtttcacaccatgtg

SEQ ID NO: 219369 - DNA, 25 bp, SARS Virus
ccccgagaggtctcacaccatgtgt

SEQ ID NO: 219370 - DNA, 25 bp, SARS Virus
cccgagaggtcttacaccatgtgtt

SEQ ID NO: 219371 - DNA, 25 bp, SARS Virus
ccgagaggtctctcaccatgtgtta

SEQ ID NO: 219372 - DNA, 25 bp, SARS Virus
cgagaggtctcataccatgtgttaa

SEQ ID NO: 219373 - DNA, 25 bp, SARS Virus
gagaggtctcactccatgtgttaaa

SEQ ID NO: 219374 - DNA, 25 bp, SARS Virus
agaggtctcacatcatgtgttaaaa

SEQ ID NO: 219375 - DNA, 25 bp, SARS Virus
gaggtctcacactatgtgttaaaac

SEQ ID NO: 219376 - DNA, 25 bp, SARS Virus
aggtctcacaccttgtgttaaaaca

SEQ ID NO: 219377 - DNA, 25 bp, SARS Virus
ggtctcacaccatgtgttaaaacag

SEQ ID NO: 219378 - DNA, 25 bp, SARS Virus
gtctcacaccatttgttaaaacagt

SEQ ID NO: 219379 - DNA, 25 bp, SARS Virus
tctcacaccatgtgttaaaacagtg

SEQ ID NO: 219380 - DNA, 25 bp, SARS Virus
ctcacaccatgttttaaaacagtgg

SEQ ID NO: 219381 - DNA, 25 bp, SARS Virus
tcacaccatgtgttaaaacagtggt

SEQ ID NO: 219382 - DNA, 25 bp, SARS Virus
cacaccatgtgttaaaacagtggtg

SEQ ID NO: 219383 - DNA, 25 bp, SARS Virus
acaccatgtgtttaaacagtggtgc

SEQ ID NO: 219384 - DNA, 25 bp, SARS Virus
caccatgtgttataacagtggtgcg

SEQ ID NO: 219385 - DNA, 25 bp, SARS Virus
accatgtgttaatacagtggtgcga

SEQ ID NO: 219386 - DNA, 25 bp, SARS Virus
ccatgtgttaaatcagtggtgcgaa

SEQ ID NO: 219387 - DNA, 25 bp, SARS Virus
catgtgttaaaatagtggtgcgaat

SEQ ID NO: 219388 - DNA, 25 bp, SARS Virus
atgtgttaaaactgtggtgcgaatt

SEQ ID NO: 219389 - DNA, 25 bp, SARS Virus
tgtgttaaaacattggtgcgaattc

SEQ ID NO: 219390 - DNA, 25 bp, SARS Virus
gtgttaaaacagtggtgcgaattct

SEQ ID NO: 219391 - DNA, 25 bp, SARS Virus
tgttaaaacagttgtgcgaattctt

SEQ ID NO: 219392 - DNA, 25 bp, SARS Virus
gttaaaacagtgttgcgaattcttt

SEQ ID NO: 219393 - DNA, 25 bp, SARS Virus
ttaaaacagtggtgcgaattcttta

SEQ ID NO: 219394 - DNA, 25 bp, SARS Virus
taaaacagtggttcgaattctttaa

SEQ ID NO: 219395 - DNA, 25 bp, SARS Virus
aaaacagtggtgtgaattctttaag

SEQ ID NO: 219396 - DNA, 25 bp, SARS Virus
aaacagtggtgctaattctttaagt

SEQ ID NO: 219397 - DNA, 25 bp, SARS Virus
aacagtggtgcgtattctttaagtt

SEQ ID NO: 219398 - DNA, 25 bp, SARS Virus
acagtggtgcgatttctttaagttg

SEQ ID NO: 219399 - DNA, 25 bp, SARS Virus
cagtggtgcgaattctttaagttgt

SEQ ID NO: 219400 - DNA, 25 bp, SARS Virus
agtggtgcgaattctttaagttgtg

SEQ ID NO: 219401 - DNA, 25 bp, SARS Virus
gtggtgcgaattttttaagttgtgg

SEQ ID NO: 219402 - DNA, 25 bp, SARS Virus
tggtgcgaattctttaagttgtgga

SEQ ID NO: 219403 - DNA, 25 bp, SARS Virus
ggtgcgaattctttaagttgtggat

SEQ ID NO: 219404 - DNA, 25 bp, SARS Virus
gtgcgaattctttaagttgtggatt

SEQ ID NO: 219405 - DNA, 25 bp, SARS Virus
tgcgaattcttttagttgtggattg

SEQ ID NO: 219406 - DNA, 25 bp, SARS Virus
gcgaattctttatgttgtggattga

SEQ ID NO: 219407 - DNA, 25 bp, SARS Virus
cgaattctttaatttgtggattgag

SEQ ID NO: 219408 - DNA, 25 bp, SARS Virus
gaattctttaagttgtggattgaga

SEQ ID NO: 219409 - DNA, 25 bp, SARS Virus
aattctttaagttgtggattgagac

SEQ ID NO: 219410 - DNA, 25 bp, SARS Virus
attctttaagttttggattgagaca

SEQ ID NO: 219411 - DNA, 25 bp, SARS Virus
ttctttaagttgtggattgagacat

SEQ ID NO: 219412 - DNA, 25 bp, SARS Virus
tctttaagttgttgattgagacatg

SEQ ID NO: 219413 - DNA, 25 bp, SARS Virus
ctttaagttgtgtattgagacatgc

SEQ ID NO: 219414 - DNA, 25 bp, SARS Virus
tttaagttgtggtttgagacatgcg

SEQ ID NO: 219415 - DNA, 25 bp, SARS Virus
ttaagttgtggattgagacatgcga

SEQ ID NO: 219416 - DNA, 25 bp, SARS Virus
taagttgtggattgagacatgcgac

SEQ ID NO: 219417 - DNA, 25 bp, SARS Virus
aagttgtggatttagacatgcgaca

SEQ ID NO: 219418 - DNA, 25 bp, SARS Virus
agttgtggattgtgacatgcgacag

SEQ ID NO: 219419 - DNA, 25 bp, SARS Virus
gttgtggattgatacatgcgacagg

SEQ ID NO: 219420 - DNA, 25 bp, SARS Virus
ttgtggattgagtcatgcgacagga

SEQ ID NO: 219421 - DNA, 25 bp, SARS Virus
tgtggattgagatatgcgacaggac

SEQ ID NO: 219422 - DNA, 25 bp, SARS Virus
gtggattgagacttgcgacaggact

SEQ ID NO: 219423 - DNA, 25 bp, SARS Virus
tggattgagacatgcgacaggactt

SEQ ID NO: 219424 - DNA, 25 bp, SARS Virus
ggattgagacattcgacaggactta

SEQ ID NO: 219425 - DNA, 25 bp, SARS Virus
gattgagacatgtgacaggacttat

SEQ ID NO: 219426 - DNA, 25 bp, SARS Virus
attgagacatgctacaggacttatc

SEQ ID NO: 219427 - DNA, 25 bp, SARS Virus
ttgagacatgcgtcaggacttatcc

SEQ ID NO: 219428 - DNA, 25 bp, SARS Virus
tgagacatgcgataggacttatcct

SEQ ID NO: 219429 - DNA, 25 bp, SARS Virus
gagacatgcgactggacttatcctg

SEQ ID NO: 219430 - DNA, 25 bp, SARS Virus
agacatgcgacatgacttatcctgg

SEQ ID NO: 219431 - DNA, 25 bp, SARS Virus
gacatgcgacagtacttatcctggt

SEQ ID NO: 219432 - DNA, 25 bp, SARS Virus
acatgcgacaggtcttatcctggtt

SEQ ID NO: 219433 - DNA, 25 bp, SARS Virus
catgcgacaggatttatcctggtta

SEQ ID NO: 219434 - DNA, 25 bp, SARS Virus
atgcgacaggacttatcctggttag

SEQ ID NO: 219435 - DNA, 25 bp, SARS Virus
tgcgacaggacttatcctggttaga

SEQ ID NO: 219436 - DNA, 25 bp, SARS Virus
gcgacaggacttttcctggttagag

SEQ ID NO: 219437 - DNA, 25 bp, SARS Virus
cgacaggacttatcctggttagaga

SEQ ID NO: 219438 - DNA, 25 bp, SARS Virus
gacaggacttattctggttagagac

SEQ ID NO: 219439 - DNA, 25 bp, SARS Virus
acaggacttatcttggttagagaca

SEQ ID NO: 219440 - DNA, 25 bp, SARS Virus
caggacttatcctggttagagacat

SEQ ID NO: 219441 - DNA, 25 bp, SARS Virus
aggacttatccttgttagagacatt

SEQ ID NO: 219442 - DNA, 25 bp, SARS Virus
ggacttatcctgtttagagacattc

SEQ ID NO: 219443 - DNA, 25 bp, SARS Virus
gacttatcctggttagagacattct

SEQ ID NO: 219444 - DNA, 25 bp, SARS Virus
acttatcctggttagagacattctc

SEQ ID NO: 219445 - DNA, 25 bp, SARS Virus
cttatcctggtttgagacattctcg

SEQ ID NO: 219446 - DNA, 25 bp, SARS Virus
ttatcctggttatagacattctcgg

SEQ ID NO: 219447 - DNA, 25 bp, SARS Virus
tatcctggttagtgacattctcggt

SEQ ID NO: 219448 - DNA, 25 bp, SARS Virus
atcctggttagatacattctcggtc

SEQ ID NO: 219449 - DNA, 25 bp, SARS Virus
tcctggttagagtcattctcggtcg

SEQ ID NO: 219450 - DNA, 25 bp, SARS Virus
cctggttagagatattctcggtcgg

SEQ ID NO: 219451 - DNA, 25 bp, SARS Virus
ctggttagagactttctcggtcggt

SEQ ID NO: 219452 - DNA, 25 bp, SARS Virus
tggttagagacattctcggtcggtt

SEQ ID NO: 219453 - DNA, 25 bp, SARS Virus
ggttagagacattctcggtcggttt

SEQ ID NO: 219454 - DNA, 25 bp, SARS Virus
gttagagacattttcggtcggtttc

SEQ ID NO: 219455 - DNA, 25 bp, SARS Virus
ttagagacattctcggtcggtttct

SEQ ID NO: 219456 - DNA, 25 bp, SARS Virus
tagagacattcttggtcggtttctt

SEQ ID NO: 219457 - DNA, 25 bp, SARS Virus
agagacattctctgtcggtttcttt

SEQ ID NO: 219458 - DNA, 25 bp, SARS Virus
gagacattctcgttcggtttctttg

SEQ ID NO: 219459 - DNA, 25 bp, SARS Virus
agacattctcggtcggtttctttga

SEQ ID NO: 219460 - DNA, 25 bp, SARS Virus
gacattctcggttggtttctttgac

SEQ ID NO: 219461 - DNA, 25 bp, SARS Virus
acattctcggtctgtttctttgaca

SEQ ID NO: 219462 - DNA, 25 bp, SARS Virus
cattctcggtcgttttctttgacaa

SEQ ID NO: 219463 - DNA, 25 bp, SARS Virus
attctcggtcggtttctttgacaaa

SEQ ID NO: 219464 - DNA, 25 bp, SARS Virus
ttctcggtcggtttctttgacaaag

SEQ ID NO: 219465 - DNA, 25 bp, SARS Virus
tctcggtcggtttctttgacaaaga

SEQ ID NO: 219466 - DNA, 25 bp, SARS Virus
ctcggtcggtttttttgacaaagat

SEQ ID NO: 219467 - DNA, 25 bp, SARS Virus
tcggtcggtttctttgacaaagatg

SEQ ID NO: 219468 - DNA, 25 bp, SARS Virus
cggtcggtttctttgacaaagatgt

SEQ ID NO: 219469 - DNA, 25 bp, SARS Virus
ggtcggtttctttgacaaagatgtt

SEQ ID NO: 219470 - DNA, 25 bp, SARS Virus
gtcggtttcttttacaaagatgttt

SEQ ID NO: 219471 - DNA, 25 bp, SARS Virus
tcggtttctttgtcaaagatgtttc

SEQ ID NO: 219472 - DNA, 25 bp, SARS Virus
cggtttctttgataaagatgtttca

SEQ ID NO: 219473 - DNA, 25 bp, SARS Virus
ggtttctttgactaagatgtttcac

SEQ ID NO: 219474 - DNA, 25 bp, SARS Virus
gtttctttgacatagatgtttcacg

SEQ ID NO: 219475 - DNA, 25 bp, SARS Virus
tttctttgacaatgatgtttcacga

SEQ ID NO: 219476 - DNA, 25 bp, SARS Virus
ttctttgacaaatatgtttcacgag

SEQ ID NO: 219477 - DNA, 25 bp, SARS Virus
tctttgacaaagttgtttcacgagg

SEQ ID NO: 219478 - DNA, 25 bp, SARS Virus
ctttgacaaagatgtttcacgagga

SEQ ID NO: 219479 - DNA, 25 bp, SARS Virus
tttgacaaagatttttcacgaggag

SEQ ID NO: 219480 - DNA, 25 bp, SARS Virus
ttgacaaagatgtttcacgaggagt

SEQ ID NO: 219481 - DNA, 25 bp, SARS Virus
tgacaaagatgtttcacgaggagtc

SEQ ID NO: 219482 - DNA, 25 bp, SARS Virus
gacaaagatgtttcacgaggagtct

SEQ ID NO: 219483 - DNA, 25 bp, SARS Virus
acaaagatgttttacgaggagtcta

SEQ ID NO: 219484 - DNA, 25 bp, SARS Virus
caaagatgtttctcgaggagtctac

SEQ ID NO: 219485 - DNA, 25 bp, SARS Virus
aaagatgtttcatgaggagtctaca

SEQ ID NO: 219486 - DNA, 25 bp, SARS Virus
aagatgtttcactaggagtctacag

SEQ ID NO: 219487 - DNA, 25 bp, SARS Virus
agatgtttcacgtggagtctacaga

SEQ ID NO: 219488 - DNA, 25 bp, SARS Virus
gatgtttcacgatgagtctacagaa

SEQ ID NO: 219489 - DNA, 25 bp, SARS Virus
atgtttcacgagtagtctacagaaa

SEQ ID NO: 219490 - DNA, 25 bp, SARS Virus
tgtttcacgaggtgtctacagaaac

SEQ ID NO: 219491 - DNA, 25 bp, SARS Virus
gtttcacgaggattctacagaaact

SEQ ID NO: 219492 - DNA, 25 bp, SARS Virus
tttcacgaggagtctacagaaacta

SEQ ID NO: 219493 - DNA, 25 bp, SARS Virus
ttcacgaggagtttacagaaactac

SEQ ID NO: 219494 - DNA, 25 bp, SARS Virus
tcacgaggagtctacagaaactact

SEQ ID NO: 219495 - DNA, 25 bp, SARS Virus
cacgaggagtcttcagaaactactg

SEQ ID NO: 219496 - DNA, 25 bp, SARS Virus
acgaggagtctatagaaactactgc

SEQ ID NO: 219497 - DNA, 25 bp, SARS Virus
cgaggagtctactgaaactactgct

SEQ ID NO: 219498 - DNA, 25 bp, SARS Virus
gaggagtctacataaactactgctt

SEQ ID NO: 219499 - DNA, 25 bp, SARS Virus
aggagtctacagtaactactgcttc

SEQ ID NO: 219500 - DNA, 25 bp, SARS Virus
ggagtctacagatactactgcttca

SEQ ID NO: 219501 - DNA, 25 bp, SARS Virus
gagtctacagaatctactgcttcac

SEQ ID NO: 219502 - DNA, 25 bp, SARS Virus
agtctacagaaattactgcttcact

SEQ ID NO: 219503 - DNA, 25 bp, SARS Virus
gtctacagaaactactgcttcactc

SEQ ID NO: 219504 - DNA, 25 bp, SARS Virus
tctacagaaacttctgcttcactcc

SEQ ID NO: 219505 - DNA, 25 bp, SARS Virus
ctacagaaactattgcttcactcca

SEQ ID NO: 219506 - DNA, 25 bp, SARS Virus
tacagaaactactgcttcactccat

SEQ ID NO: 219507 - DNA, 25 bp, SARS Virus
acagaaactacttcttcactccata

SEQ ID NO: 219508 - DNA, 25 bp, SARS Virus
cagaaactactgtttcactccatag

SEQ ID NO: 219509 - DNA, 25 bp, SARS Virus
agaaactactgcttcactccatagg

SEQ ID NO: 219510 - DNA, 25 bp, SARS Virus
gaaactactgcttcactccataggt

SEQ ID NO: 219511 - DNA, 25 bp, SARS Virus
aaactactgctttactccataggta

SEQ ID NO: 219512 - DNA, 25 bp, SARS Virus
aactactgcttctctccataggtaa

SEQ ID NO: 219513 - DNA, 25 bp, SARS Virus
actactgcttcattccataggtaat

SEQ ID NO: 219514 - DNA, 25 bp, SARS Virus
ctactgcttcactccataggtaata

SEQ ID NO: 219515 - DNA, 25 bp, SARS Virus
tactgcttcacttcataggtaatat

SEQ ID NO: 219516 - DNA, 25 bp, SARS Virus
actgcttcactctataggtaatata

SEQ ID NO: 219517 - DNA, 25 bp, SARS Virus
ctgcttcactccttaggtaatatac

SEQ ID NO: 219518 - DNA, 25 bp, SARS Virus
tgcttcactccataggtaatataca

SEQ ID NO: 219519 - DNA, 25 bp, SARS Virus
gcttcactccattggtaatatacat

SEQ ID NO: 219520 - DNA, 25 bp, SARS Virus
cttcactccatatgtaatatacatc

SEQ ID NO: 219521 - DNA, 25 bp, SARS Virus
ttcactccatagttaatatacatca

SEQ ID NO: 219522 - DNA, 25 bp, SARS Virus
tcactccataggtaatatacatcat

SEQ ID NO: 219523 - DNA, 25 bp, SARS Virus
cactccataggttatatacatcatt

SEQ ID NO: 219524 - DNA, 25 bp, SARS Virus
actccataggtattatacatcattg

SEQ ID NO: 219525 - DNA, 25 bp, SARS Virus
ctccataggtaatatacatcattgt

SEQ ID NO: 219526 - DNA, 25 bp, SARS Virus
tccataggtaatttacatcattgtc

SEQ ID NO: 219527 - DNA, 25 bp, SARS Virus
ccataggtaatatacatcattgtcg

SEQ ID NO: 219528 - DNA, 25 bp, SARS Virus
cataggtaatattcatcattgtcgt

SEQ ID NO: 219529 - DNA, 25 bp, SARS Virus
ataggtaatatatatcattgtcgta

SEQ ID NO: 219530 - DNA, 25 bp, SARS Virus
taggtaatatacttcattgtcgtag

SEQ ID NO: 219531 - DNA, 25 bp, SARS Virus
aggtaatatacatcattgtcgtaga

SEQ ID NO: 219532 - DNA, 25 bp, SARS Virus
ggtaatatacattattgtcgtagac

SEQ ID NO: 219533 - DNA, 25 bp, SARS Virus
gtaatatacatctttgtcgtagacc

SEQ ID NO: 219534 - DNA, 25 bp, SARS Virus
taatatacatcattgtcgtagacca

SEQ ID NO: 219535 - DNA, 25 bp, SARS Virus
aatatacatcattgtcgtagaccac

SEQ ID NO: 219536 - DNA, 25 bp, SARS Virus
atatacatcattttcgtagaccact

SEQ ID NO: 219537 - DNA, 25 bp, SARS Virus
tatacatcattgtcgtagaccacta

SEQ ID NO: 219538 - DNA, 25 bp, SARS Virus
atacatcattgttgtagaccactac

SEQ ID NO: 219539 - DNA, 25 bp, SARS Virus
tacatcattgtcttagaccactact

SEQ ID NO: 219540 - DNA, 25 bp, SARS Virus
acatcattgtcgtagaccactacta

SEQ ID NO: 219541 - DNA, 25 bp, SARS Virus
catcattgtcgttgaccactactat

SEQ ID NO: 219542 - DNA, 25 bp, SARS Virus
atcattgtcgtataccactactatg

SEQ ID NO: 219543 - DNA, 25 bp, SARS Virus
tcattgtcgtagtccactactatga

SEQ ID NO: 219544 - DNA, 25 bp, SARS Virus
cattgtcgtagatcactactatgac

SEQ ID NO: 219545 - DNA, 25 bp, SARS Virus
attgtcgtagactactactatgact

SEQ ID NO: 219546 - DNA, 25 bp, SARS Virus
ttgtcgtagacctctactatgactg

SEQ ID NO: 219547 - DNA, 25 bp, SARS Virus
tgtcgtagaccattactatgactgt

SEQ ID NO: 219548 - DNA, 25 bp, SARS Virus
gtcgtagaccactactatgactgtg

SEQ ID NO: 219549 - DNA, 25 bp, SARS Virus
tcgtagaccacttctatgactgtga

SEQ ID NO: 219550 - DNA, 25 bp, SARS Virus
cgtagaccactattatgactgtgat

SEQ ID NO: 219551 - DNA, 25 bp, SARS Virus
gtagaccactactatgactgtgatg

SEQ ID NO: 219552 - DNA, 25 bp, SARS Virus
tagaccactactttgactgtgatgc

SEQ ID NO: 219553 - DNA, 25 bp, SARS Virus
agaccactactatgactgtgatgcc

SEQ ID NO: 219554 - DNA, 25 bp, SARS Virus
gaccactactattactgtgatgccg

SEQ ID NO: 219555 - DNA, 25 bp, SARS Virus
accactactatgtctgtgatgccgt

SEQ ID NO: 219556 - DNA, 25 bp, SARS Virus
ccactactatgattgtgatgccgtc

SEQ ID NO: 219557 - DNA, 25 bp, SARS Virus
cactactatgactgtgatgccgtcc

SEQ ID NO: 219558 - DNA, 25 bp, SARS Virus
actactatgactttgatgccgtcct

SEQ ID NO: 219559 - DNA, 25 bp, SARS Virus
ctactatgactgtgatgccgtcctc

SEQ ID NO: 219560 - DNA, 25 bp, SARS Virus
tactatgactgttatgccgtcctcg

SEQ ID NO: 219561 - DNA, 25 bp, SARS Virus
actatgactgtgttgccgtcctcga

SEQ ID NO: 219562 - DNA, 25 bp, SARS Virus
ctatgactgtgatgccgtcctcgaa

SEQ ID NO: 219563 - DNA, 25 bp, SARS Virus
tatgactgtgattccgtcctcgaaa

SEQ ID NO: 219564 - DNA, 25 bp, SARS Virus
atgactgtgatgtcgtcctcgaaat

SEQ ID NO: 219565 - DNA, 25 bp, SARS Virus
tgactgtgatgctgtcctcgaaatt

SEQ ID NO: 219566 - DNA, 25 bp, SARS Virus
gactgtgatgccttcctcgaaattc

SEQ ID NO: 219567 - DNA, 25 bp, SARS Virus
actgtgatgccgtcctcgaaattct

SEQ ID NO: 219568 - DNA, 25 bp, SARS Virus
ctgtgatgccgttctcgaaattctc

SEQ ID NO: 219569 - DNA, 25 bp, SARS Virus
tgtgatgccgtcttcgaaattctct

SEQ ID NO: 219570 - DNA, 25 bp, SARS Virus
gtgatgccgtcctcgaaattctctt

SEQ ID NO: 219571 - DNA, 25 bp, SARS Virus
tgatgccgtccttgaaattctcttg

SEQ ID NO: 219572 - DNA, 25 bp, SARS Virus
gatgccgtcctctaaattctcttgc

SEQ ID NO: 219573 - DNA, 25 bp, SARS Virus
atgccgtcctcgtaattctcttgcg

SEQ ID NO: 219574 - DNA, 25 bp, SARS Virus
tgccgtcctcgatattctcttgcgt

SEQ ID NO: 219575 - DNA, 25 bp, SARS Virus
gccgtcctcgaatttctcttgcgta

SEQ ID NO: 219576 - DNA, 25 bp, SARS Virus
ccgtcctcgaaattctcttgcgtat

SEQ ID NO: 219577 - DNA, 25 bp, SARS Virus
cgtcctcgaaattctcttgcgtatg

SEQ ID NO: 219578 - DNA, 25 bp, SARS Virus
gtcctcgaaattttcttgcgtatgt

SEQ ID NO: 219579 - DNA, 25 bp, SARS Virus
tcctcgaaattctcttgcgtatgtc

SEQ ID NO: 219580 - DNA, 25 bp, SARS Virus
cctcgaaattcttttgcgtatgtcg

SEQ ID NO: 219581 - DNA, 25 bp, SARS Virus
ctcgaaattctcttgcgtatgtcgc

SEQ ID NO: 219582 - DNA, 25 bp, SARS Virus
tcgaaattctcttgcgtatgtcgcg

SEQ ID NO: 219583 - DNA, 25 bp, SARS Virus
cgaaattctctttcgtatgtcgcgc

SEQ ID NO: 219584 - DNA, 25 bp, SARS Virus
gaaattctcttgtgtatgtcgcgcg

SEQ ID NO: 219585 - DNA, 25 bp, SARS Virus
aaattctcttgcttatgtcgcgcgt

SEQ ID NO: 219586 - DNA, 25 bp, SARS Virus
aattctcttgcgtatgtcgcgcgtc

SEQ ID NO: 219587 - DNA, 25 bp, SARS Virus
attctcttgcgtttgtcgcgcgtcg

SEQ ID NO: 219588 - DNA, 25 bp, SARS Virus
ttctcttgcgtatgtcgcgcgtcgg

SEQ ID NO: 219589 - DNA, 25 bp, SARS Virus
tctcttgcgtatttcgcgcgtcgga

SEQ ID NO: 219590 - DNA, 25 bp, SARS Virus
ctcttgcgtatgtcgcgcgtcggag

SEQ ID NO: 219591 - DNA, 25 bp, SARS Virus
tcttgcgtatgttgcgcgtcggaga

SEQ ID NO: 219592 - DNA, 25 bp, SARS Virus
cttgcgtatgtctcgcgtcggagaa

SEQ ID NO: 219593 - DNA, 25 bp, SARS Virus
ttgcgtatgtcgtgcgtcggagaag

SEQ ID NO: 219594 - DNA, 25 bp, SARS Virus
tgcgtatgtcgctcgtcggagaagt

SEQ ID NO: 219595 - DNA, 25 bp, SARS Virus
gcgtatgtcgcgtgtcggagaagtt

SEQ ID NO: 219596 - DNA, 25 bp, SARS Virus
cgtatgtcgcgcttcggagaagttc

SEQ ID NO: 219597 - DNA, 25 bp, SARS Virus
gtatgtcgcgcgtcggagaagttct

SEQ ID NO: 219598 - DNA, 25 bp, SARS Virus
tatgtcgcgcgttggagaagttcta

SEQ ID NO: 219599 - DNA, 25 bp, SARS Virus
atgtcgcgcgtctgagaagttctaa

SEQ ID NO: 219600 - DNA, 25 bp, SARS Virus
tgtcgcgcgtcgtagaagttctaat

SEQ ID NO: 219601 - DNA, 25 bp, SARS Virus
gtcgcgcgtcggtgaagttctaatt

SEQ ID NO: 219602 - DNA, 25 bp, SARS Virus
tcgcgcgtcggataagttctaattt

SEQ ID NO: 219603 - DNA, 25 bp, SARS Virus
cgcgcgtcggagtagttctaatttt

SEQ ID NO: 219604 - DNA, 25 bp, SARS Virus
gcgcgtcggagatgttctaattttg

SEQ ID NO: 219605 - DNA, 25 bp, SARS Virus
cgcgtcggagaatttctaattttgg

SEQ ID NO: 219606 - DNA, 25 bp, SARS Virus
gcgtcggagaagttctaattttggt

SEQ ID NO: 219607 - DNA, 25 bp, SARS Virus
cgtcggagaagttctaattttggta

SEQ ID NO: 219608 - DNA, 25 bp, SARS Virus
gtcggagaagttttaattttggtac

SEQ ID NO: 219609 - DNA, 25 bp, SARS Virus
tcggagaagttctaattttggtaca

SEQ ID NO: 219610 - DNA, 25 bp, SARS Virus
cggagaagttcttattttggtacac

SEQ ID NO: 219611 - DNA, 25 bp, SARS Virus
ggagaagttctatttttggtacaca

SEQ ID NO: 219612 - DNA, 25 bp, SARS Virus
gagaagttctaattttggtacacag

SEQ ID NO: 219613 - DNA, 25 bp, SARS Virus
agaagttctaattttggtacacagt

SEQ ID NO: 219614 - DNA, 25 bp, SARS Virus
gaagttctaattttggtacacagtg

SEQ ID NO: 219615 - DNA, 25 bp, SARS Virus
aagttctaattttggtacacagtgt

SEQ ID NO: 219616 - DNA, 25 bp, SARS Virus
agttctaatttttgtacacagtgta

SEQ ID NO: 219617 - DNA, 25 bp, SARS Virus
gttctaattttgttacacagtgtat

SEQ ID NO: 219618 - DNA, 25 bp, SARS Virus
ttctaattttggtacacagtgtatt

SEQ ID NO: 219619 - DNA, 25 bp, SARS Virus
tctaattttggttcacagtgtattg

SEQ ID NO: 219620 - DNA, 25 bp, SARS Virus
ctaattttggtatacagtgtattgg

SEQ ID NO: 219621 - DNA, 25 bp, SARS Virus
taattttggtactcagtgtattggt

SEQ ID NO: 219622 - DNA, 25 bp, SARS Virus
aattttggtacatagtgtattggtt

SEQ ID NO: 219623 - DNA, 25 bp, SARS Virus
attttggtacactgtgtattggtta

SEQ ID NO: 219624 - DNA, 25 bp, SARS Virus
ttttggtacacattgtattggttaa

SEQ ID NO: 219625 - DNA, 25 bp, SARS Virus
tttggtacacagtgtattggttaac

SEQ ID NO: 219626 - DNA, 25 bp, SARS Virus
ttggtacacagtttattggttaacc

SEQ ID NO: 219627 - DNA, 25 bp, SARS Virus
tggtacacagtgtattggttaaccg

SEQ ID NO: 219628 - DNA, 25 bp, SARS Virus
ggtacacagtgttttggttaaccgt

SEQ ID NO: 219629 - DNA, 25 bp, SARS Virus
gtacacagtgtattggttaaccgta

SEQ ID NO: 219630 - DNA, 25 bp, SARS Virus
tacacagtgtattggttaaccgtaa

SEQ ID NO: 219631 - DNA, 25 bp, SARS Virus
acacagtgtatttgttaaccgtaac

SEQ ID NO: 219632 - DNA, 25 bp, SARS Virus
cacagtgtattgtttaaccgtaaca

SEQ ID NO: 219633 - DNA, 25 bp, SARS Virus
acagtgtattggataaccgtaacac

SEQ ID NO: 219634 - DNA, 25 bp, SARS Virus
cagtgtattggtaaaccgtaacact

SEQ ID NO: 219635 - DNA, 25 bp, SARS Virus
agtgtattggttaaccgtaacactg

SEQ ID NO: 219636 - DNA, 25 bp, SARS Virus
gtgtattggttaaccgtaacactgt

SEQ ID NO: 219637 - DNA, 25 bp, SARS Virus
tgtattggttaaacgtaacactgtt

SEQ ID NO: 219638 - DNA, 25 bp, SARS Virus
gtattggttaacagtaacactgttc

SEQ ID NO: 219639 - DNA, 25 bp, SARS Virus
tattggttaaccataacactgttcg

SEQ ID NO: 219640 - DNA, 25 bp, SARS Virus
attggttaaccgaaacactgttcgc

SEQ ID NO: 219641 - DNA, 25 bp, SARS Virus
ttggttaaccgtaacactgttcgcc

SEQ ID NO: 219642 - DNA, 25 bp, SARS Virus
tggttaaccgtaacactgttcgccg

SEQ ID NO: 219643 - DNA, 25 bp, SARS Virus
ggttaaccgtaaaactgttcgccga

SEQ ID NO: 219644 - DNA, 25 bp, SARS Virus
gttaaccgtaacactgttcgccgag

SEQ ID NO: 219645 - DNA, 25 bp, SARS Virus
ttaaccgtaacaatgttcgccgagt

SEQ ID NO: 219646 - DNA, 25 bp, SARS Virus
taaccgtaacacagttcgccgagta

SEQ ID NO: 219647 - DNA, 25 bp, SARS Virus
aaccgtaacactattcgccgagtaa

SEQ ID NO: 219648 - DNA, 25 bp, SARS Virus
accgtaacactgatcgccgagtaaa

SEQ ID NO: 219649 - DNA, 25 bp, SARS Virus
ccgtaacactgtacgccgagtaaat

SEQ ID NO: 219650 - DNA, 25 bp, SARS Virus
cgtaacactgttagccgagtaaatc

SEQ ID NO: 219651 - DNA, 25 bp, SARS Virus
gtaacactgttcaccgagtaaatct

SEQ ID NO: 219652 - DNA, 25 bp, SARS Virus
taacactgttcgacgagtaaatctc

SEQ ID NO: 219653 - DNA, 25 bp, SARS Virus
aacactgttcgcagagtaaatctct

SEQ ID NO: 219654 - DNA, 25 bp, SARS Virus
acactgttcgccaagtaaatctctc

SEQ ID NO: 219655 - DNA, 25 bp, SARS Virus
cactgttcgccgagtaaatctctca

SEQ ID NO: 219656 - DNA, 25 bp, SARS Virus
actgttcgccgaataaatctctcaa

SEQ ID NO: 219657 - DNA, 25 bp, SARS Virus
ctgttcgccgagaaaatctctcaag

SEQ ID NO: 219658 - DNA, 25 bp, SARS Virus
tgttcgccgagtaaatctctcaagt

SEQ ID NO: 219659 - DNA, 25 bp, SARS Virus
gttcgccgagtaaatctctcaagtc

SEQ ID NO: 219660 - DNA, 25 bp, SARS Virus
ttcgccgagtaaatctctcaagtcg

SEQ ID NO: 219661 - DNA, 25 bp, SARS Virus
tcgccgagtaaaactctcaagtcga

SEQ ID NO: 219662 - DNA, 25 bp, SARS Virus
cgccgagtaaatatctcaagtcgaa

SEQ ID NO: 219663 - DNA, 25 bp, SARS Virus
gccgagtaaatcactcaagtcgaag

SEQ ID NO: 219664 - DNA, 25 bp, SARS Virus
ccgagtaaatctatcaagtcgaagc

SEQ ID NO: 219665 - DNA, 25 bp, SARS Virus
cgagtaaatctcacaagtcgaagca

SEQ ID NO: 219666 - DNA, 25 bp, SARS Virus
gagtaaatctctaaagtcgaagcat

SEQ ID NO: 219667 - DNA, 25 bp, SARS Virus
agtaaatctctcaagtcgaagcatt

SEQ ID NO: 219668 - DNA, 25 bp, SARS Virus
gtaaatctctcaagtcgaagcatta

SEQ ID NO: 219669 - DNA, 25 bp, SARS Virus
taaatctctcaaatcgaagcattat

SEQ ID NO: 219670 - DNA, 25 bp, SARS Virus
aaatctctcaagacgaagcattatt

SEQ ID NO: 219671 - DNA, 25 bp, SARS Virus
aatctctcaagtagaagcattatta

SEQ ID NO: 219672 - DNA, 25 bp, SARS Virus
atctctcaagtcaaagcattattat

SEQ ID NO: 219673 - DNA, 25 bp, SARS Virus
tctctcaagtcgaagcattattatc

SEQ ID NO: 219674 - DNA, 25 bp, SARS Virus
ctctcaagtcgaagcattattatct

SEQ ID NO: 219675 - DNA, 25 bp, SARS Virus
tctcaagtcgaaacattattatctt

SEQ ID NO: 219676 - DNA, 25 bp, SARS Virus
ctcaagtcgaagaattattatcttc

SEQ ID NO: 219677 - DNA, 25 bp, SARS Virus
tcaagtcgaagcattattatcttcg

SEQ ID NO: 219678 - DNA, 25 bp, SARS Virus
caagtcgaagcaatattatcttcga

SEQ ID NO: 219679 - DNA, 25 bp, SARS Virus
aagtcgaagcataattatcttcgat

SEQ ID NO: 219680 - DNA, 25 bp, SARS Virus
agtcgaagcattattatcttcgatg

SEQ ID NO: 219681 - DNA, 25 bp, SARS Virus
gtcgaagcattaatatcttcgatgt

SEQ ID NO: 219682 - DNA, 25 bp, SARS Virus
tcgaagcattataatcttcgatgtc

SEQ ID NO: 219683 - DNA, 25 bp, SARS Virus
cgaagcattattatcttcgatgtcc

SEQ ID NO: 219684 - DNA, 25 bp, SARS Virus
gaagcattattaacttcgatgtccg

SEQ ID NO: 219685 - DNA, 25 bp, SARS Virus
aagcattattatattcgatgtccga

SEQ ID NO: 219686 - DNA, 25 bp, SARS Virus
agcattattatcatcgatgtccgag

SEQ ID NO: 219687 - DNA, 25 bp, SARS Virus
gcattattatctacgatgtccgaga

SEQ ID NO: 219688 - DNA, 25 bp, SARS Virus
cattattatcttagatgtccgagaa

SEQ ID NO: 219689 - DNA, 25 bp, SARS Virus
attattatcttcaatgtccgagaaa

SEQ ID NO: 219690 - DNA, 25 bp, SARS Virus
ttattatcttcgatgtccgagaaat

SEQ ID NO: 219691 - DNA, 25 bp, SARS Virus
tattatcttcgaagtccgagaaatg

SEQ ID NO: 219692 - DNA, 25 bp, SARS Virus
attatcttcgatatccgagaaatga

SEQ ID NO: 219693 - DNA, 25 bp, SARS Virus
ttatcttcgatgaccgagaaatgat

SEQ ID NO: 219694 - DNA, 25 bp, SARS Virus
tatcttcgatgtacgagaaatgatc

SEQ ID NO: 219695 - DNA, 25 bp, SARS Virus
atcttcgatgtcagagaaatgatca

SEQ ID NO: 219696 - DNA, 25 bp, SARS Virus
tcttcgatgtccaagaaatgatcat

SEQ ID NO: 219697 - DNA, 25 bp, SARS Virus
cttcgatgtccgagaaatgatcata

SEQ ID NO: 219698 - DNA, 25 bp, SARS Virus
ttcgatgtccgaaaaatgatcatat

SEQ ID NO: 219699 - DNA, 25 bp, SARS Virus
tcgatgtccgagaaatgatcatatt

SEQ ID NO: 219700 - DNA, 25 bp, SARS Virus
cgatgtccgagaaatgatcatattt

SEQ ID NO: 219701 - DNA, 25 bp, SARS Virus
gatgtccgagaaatgatcatatttt

SEQ ID NO: 219702 - DNA, 25 bp, SARS Virus
atgtccgagaaaagatcatattttc

SEQ ID NO: 219703 - DNA, 25 bp, SARS Virus
tgtccgagaaataatcatattttct

SEQ ID NO: 219704 - DNA, 25 bp, SARS Virus
gtccgagaaatgatcatattttctt

SEQ ID NO: 219705 - DNA, 25 bp, SARS Virus
tccgagaaatgaacatattttcttc

SEQ ID NO: 219706 - DNA, 25 bp, SARS Virus
ccgagaaatgataatattttcttct

SEQ ID NO: 219707 - DNA, 25 bp, SARS Virus
cgagaaatgatcatattttcttctt

SEQ ID NO: 219708 - DNA, 25 bp, SARS Virus
gagaaatgatcaaattttcttctta

SEQ ID NO: 219709 - DNA, 25 bp, SARS Virus
agaaatgatcatattttcttcttag

SEQ ID NO: 219710 - DNA, 25 bp, SARS Virus
gaaatgatcataatttcttcttagc

SEQ ID NO: 219711 - DNA, 25 bp, SARS Virus
aaatgatcatatattcttcttagcc

SEQ ID NO: 219712 - DNA, 25 bp, SARS Virus
aatgatcatattatcttcttagcct

SEQ ID NO: 219713 - DNA, 25 bp, SARS Virus
atgatcatatttacttcttagcctg

SEQ ID NO: 219714 - DNA, 25 bp, SARS Virus
tgatcatattttattcttagcctgt

SEQ ID NO: 219715 - DNA, 25 bp, SARS Virus
gatcatattttcatcttagcctgtg

SEQ ID NO: 219716 - DNA, 25 bp, SARS Virus
atcatattttctacttagcctgtgg

SEQ ID NO: 219717 - DNA, 25 bp, SARS Virus
tcatattttcttattagcctgtggt

SEQ ID NO: 219718 - DNA, 25 bp, SARS Virus
catattttcttcatagcctgtggta

SEQ ID NO: 219719 - DNA, 25 bp, SARS Virus
atattttcttctaagcctgtggtat

SEQ ID NO: 219720 - DNA, 25 bp, SARS Virus
tattttcttcttagcctgtggtatc

SEQ ID NO: 219721 - DNA, 25 bp, SARS Virus
attttcttcttaacctgtggtatca

SEQ ID NO: 219722 - DNA, 25 bp, SARS Virus
ttttcttcttagactgtggtatcag

SEQ ID NO: 219723 - DNA, 25 bp, SARS Virus
tttcttcttagcatgtggtatcagt

SEQ ID NO: 219724 - DNA, 25 bp, SARS Virus
ttcttcttagccagtggtatcagtt

SEQ ID NO: 219725 - DNA, 25 bp, SARS Virus
tcttcttagcctatggtatcagttg

SEQ ID NO: 219726 - DNA, 25 bp, SARS Virus
cttcttagcctgaggtatcagttgc

SEQ ID NO: 219727 - DNA, 25 bp, SARS Virus
ttcttagcctgtagtatcagttgct

SEQ ID NO: 219728 - DNA, 25 bp, SARS Virus
tcttagcctgtgatatcagttgcta

SEQ ID NO: 219729 - DNA, 25 bp, SARS Virus
cttagcctgtggaatcagttgctac

SEQ ID NO: 219730 - DNA, 25 bp, SARS Virus
ttagcctgtggtatcagttgctacg

SEQ ID NO: 219731 - DNA, 25 bp, SARS Virus
tagcctgtggtaacagttgctacgg

SEQ ID NO: 219732 - DNA, 25 bp, SARS Virus
agcctgtggtataagttgctacggg

SEQ ID NO: 219733 - DNA, 25 bp, SARS Virus
gcctgtggtatcagttgctacggga

SEQ ID NO: 219734 - DNA, 25 bp, SARS Virus
cctgtggtatcaattgctacgggag

SEQ ID NO: 219735 - DNA, 25 bp, SARS Virus
ctgtggtatcagatgctacgggaga

SEQ ID NO: 219736 - DNA, 25 bp, SARS Virus
tgtggtatcagtagctacgggagaa

SEQ ID NO: 219737 - DNA, 25 bp, SARS Virus
gtggtatcagttactacgggagaac

SEQ ID NO: 219738 - DNA, 25 bp, SARS Virus
tggtatcagttgatacgggagaact

SEQ ID NO: 219739 - DNA, 25 bp, SARS Virus
ggtatcagttgcaacgggagaactt

SEQ ID NO: 219740 - DNA, 25 bp, SARS Virus
gtatcagttgctacgggagaactta

SEQ ID NO: 219741 - DNA, 25 bp, SARS Virus
tatcagttgctaagggagaacttaa

SEQ ID NO: 219742 - DNA, 25 bp, SARS Virus
atcagttgctacaggagaacttaaa

SEQ ID NO: 219743 - DNA, 25 bp, SARS Virus
tcagttgctacgagagaacttaaaa

SEQ ID NO: 219744 - DNA, 25 bp, SARS Virus
cagttgctacggaagaacttaaaat

SEQ ID NO: 219745 - DNA, 25 bp, SARS Virus
agttgctacgggagaacttaaaatt

SEQ ID NO: 219746 - DNA, 25 bp, SARS Virus
gttgctacgggaaaacttaaaatta

SEQ ID NO: 219747 - DNA, 25 bp, SARS Virus
ttgctacgggagaacttaaaattaa

SEQ ID NO: 219748 - DNA, 25 bp, SARS Virus
tgctacgggagaacttaaaattaag

SEQ ID NO: 219749 - DNA, 25 bp, SARS Virus
gctacgggagaaattaaaattaagg

SEQ ID NO: 219750 - DNA, 25 bp, SARS Virus
ctacgggagaacataaaattaagga

SEQ ID NO: 219751 - DNA, 25 bp, SARS Virus
tacgggagaactaaaaattaaggaa

SEQ ID NO: 219752 - DNA, 25 bp, SARS Virus
acgggagaacttaaaattaaggaaa

SEQ ID NO: 219753 - DNA, 25 bp, SARS Virus
cgggagaacttaaaattaaggaaat

SEQ ID NO: 219754 - DNA, 25 bp, SARS Virus
gggagaacttaaaattaaggaaata

SEQ ID NO: 219755 - DNA, 25 bp, SARS Virus
ggagaacttaaaattaaggaaatat

SEQ ID NO: 219756 - DNA, 25 bp, SARS Virus
gagaacttaaaaataaggaaatatg

SEQ ID NO: 219757 - DNA, 25 bp, SARS Virus
agaacttaaaataaaggaaatatga

SEQ ID NO: 219758 - DNA, 25 bp, SARS Virus
gaacttaaaattaaggaaatatgaa

SEQ ID NO: 219759 - DNA, 25 bp, SARS Virus
aacttaaaattaaggaaatatgaat

SEQ ID NO: 219760 - DNA, 25 bp, SARS Virus
acttaaaattaaagaaatatgaatg

SEQ ID NO: 219761 - DNA, 25 bp, SARS Virus
cttaaaattaagaaaatatgaatgc

SEQ ID NO: 219762 - DNA, 25 bp, SARS Virus
ttaaaattaaggaaatatgaatgca

SEQ ID NO: 219763 - DNA, 25 bp, SARS Virus
taaaattaaggaaatatgaatgcaa

SEQ ID NO: 219764 - DNA, 25 bp, SARS Virus
aaaattaaggaaatatgaatgcaac

SEQ ID NO: 219765 - DNA, 25 bp, SARS Virus
aaattaaggaaaaatgaatgcaacc

SEQ ID NO: 219766 - DNA, 25 bp, SARS Virus
aattaaggaaatatgaatgcaacct

SEQ ID NO: 219767 - DNA, 25 bp, SARS Virus
attaaggaaataagaatgcaaccta

SEQ ID NO: 219768 - DNA, 25 bp, SARS Virus
ttaaggaaatataaatgcaacctac

SEQ ID NO: 219769 - DNA, 25 bp, SARS Virus
taaggaaatatgaatgcaacctacc

SEQ ID NO: 219770 - DNA, 25 bp, SARS Virus
aaggaaatatgaatgcaacctacca

SEQ ID NO: 219771 - DNA, 25 bp, SARS Virus
aggaaatatgaaagcaacctaccaa

SEQ ID NO: 219772 - DNA, 25 bp, SARS Virus
ggaaatatgaatacaacctaccaac

SEQ ID NO: 219773 - DNA, 25 bp, SARS Virus
gaaatatgaatgaaacctaccaacg

SEQ ID NO: 219774 - DNA, 25 bp, SARS Virus
aaatatgaatgcaacctaccaacgg

SEQ ID NO: 219775 - DNA, 25 bp, SARS Virus
aatatgaatgcaacctaccaacggt

SEQ ID NO: 219776 - DNA, 25 bp, SARS Virus
atatgaatgcaaactaccaacggta

SEQ ID NO: 219777 - DNA, 25 bp, SARS Virus
tatgaatgcaacataccaacggtaa

SEQ ID NO: 219778 - DNA, 25 bp, SARS Virus
atgaatgcaaccaaccaacggtaat

SEQ ID NO: 219779 - DNA, 25 bp, SARS Virus
tgaatgcaacctaccaacggtaata

SEQ ID NO: 219780 - DNA, 25 bp, SARS Virus
gaatgcaacctaacaacggtaatac

SEQ ID NO: 219781 - DNA, 25 bp, SARS Virus
aatgcaacctacaaacggtaatacc

SEQ ID NO: 219782 - DNA, 25 bp, SARS Virus
atgcaacctaccaacggtaataccg

SEQ ID NO: 219783 - DNA, 25 bp, SARS Virus
tgcaacctaccaacggtaataccga

SEQ ID NO: 219784 - DNA, 25 bp, SARS Virus
gcaacctaccaaaggtaataccgag

SEQ ID NO: 219785 - DNA, 25 bp, SARS Virus
caacctaccaacagtaataccgaga

SEQ ID NO: 219786 - DNA, 25 bp, SARS Virus
aacctaccaacgataataccgagat

SEQ ID NO: 219787 - DNA, 25 bp, SARS Virus
acctaccaacggaaataccgagatt

SEQ ID NO: 219788 - DNA, 25 bp, SARS Virus
cctaccaacggtaataccgagattg

SEQ ID NO: 219789 - DNA, 25 bp, SARS Virus
ctaccaacggtaataccgagattgt

SEQ ID NO: 219790 - DNA, 25 bp, SARS Virus
taccaacggtaaaaccgagattgta

SEQ ID NO: 219791 - DNA, 25 bp, SARS Virus
accaacggtaataccgagattgtag

SEQ ID NO: 219792 - DNA, 25 bp, SARS Virus
ccaacggtaataacgagattgtagg

SEQ ID NO: 219793 - DNA, 25 bp, SARS Virus
caacggtaatacagagattgtaggt

SEQ ID NO: 219794 - DNA, 25 bp, SARS Virus
aacggtaataccaagattgtaggta

SEQ ID NO: 219795 - DNA, 25 bp, SARS Virus
acggtaataccgagattgtaggtac

SEQ ID NO: 219796 - DNA, 25 bp, SARS Virus
cggtaataccgaaattgtaggtacg

SEQ ID NO: 219797 - DNA, 25 bp, SARS Virus
ggtaataccgagattgtaggtacgt

SEQ ID NO: 219798 - DNA, 25 bp, SARS Virus
gtaataccgagaatgtaggtacgta

SEQ ID NO: 219799 - DNA, 25 bp, SARS Virus
taataccgagatagtaggtacgtat

SEQ ID NO: 219800 - DNA, 25 bp, SARS Virus
aataccgagattataggtacgtata

SEQ ID NO: 219801 - DNA, 25 bp, SARS Virus
ataccgagattgaaggtacgtatat

SEQ ID NO: 219802 - DNA, 25 bp, SARS Virus
taccgagattgtaggtacgtatatc

SEQ ID NO: 219803 - DNA, 25 bp, SARS Virus
accgagattgtaagtacgtatatcc

SEQ ID NO: 219804 - DNA, 25 bp, SARS Virus
ccgagattgtagatacgtatatccg

SEQ ID NO: 219805 - DNA, 25 bp, SARS Virus
cgagattgtaggaacgtatatccgt

SEQ ID NO: 219806 - DNA, 25 bp, SARS Virus
gagattgtaggtacgtatatccgta

SEQ ID NO: 219807 - DNA, 25 bp, SARS Virus
agattgtaggtaagtatatccgtaa

SEQ ID NO: 219808 - DNA, 25 bp, SARS Virus
gattgtaggtacatatatccgtaat

SEQ ID NO: 219809 - DNA, 25 bp, SARS Virus
attgtaggtacgaatatccgtaatt

SEQ ID NO: 219810 - DNA, 25 bp, SARS Virus
ttgtaggtacgtatatccgtaatta

SEQ ID NO: 219811 - DNA, 25 bp, SARS Virus
tgtaggtacgtaaatccgtaattaa

SEQ ID NO: 219812 - DNA, 25 bp, SARS Virus
gtaggtacgtatatccgtaattaaa

SEQ ID NO: 219813 - DNA, 25 bp, SARS Virus
taggtacgtataaccgtaattaaaa

SEQ ID NO: 219814 - DNA, 25 bp, SARS Virus
aggtacgtatatacgtaattaaaag

SEQ ID NO: 219815 - DNA, 25 bp, SARS Virus
ggtacgtatatcagtaattaaaaga

SEQ ID NO: 219816 - DNA, 25 bp, SARS Virus
gtacgtatatccataattaaaagaa

SEQ ID NO: 219817 - DNA, 25 bp, SARS Virus
tacgtatatccgaaattaaaagaac

SEQ ID NO: 219818 - DNA, 25 bp, SARS Virus
acgtatatccgtaattaaaagaaca

SEQ ID NO: 219819 - DNA, 25 bp, SARS Virus
cgtatatccgtaattaaaagaacag

SEQ ID NO: 219820 - DNA, 25 bp, SARS Virus
gtatatccgtaaataaaagaacaga

SEQ ID NO: 219821 - DNA, 25 bp, SARS Virus
tatatccgtaataaaaagaacagag

SEQ ID NO: 219822 - DNA, 25 bp, SARS Virus
atatccgtaattaaaagaacagaga

SEQ ID NO: 219823 - DNA, 25 bp, SARS Virus
tatccgtaattaaaagaacagagaa

SEQ ID NO: 219824 - DNA, 25 bp, SARS Virus
atccgtaattaaaagaacagagaag

SEQ ID NO: 219825 - DNA, 25 bp, SARS Virus
tccgtaattaaaagaacagagaagt

SEQ ID NO: 219826 - DNA, 25 bp, SARS Virus
ccgtaattaaaaaaacagagaagtc

SEQ ID NO: 219827 - DNA, 25 bp, SARS Virus
cgtaattaaaagaacagagaagtcg

SEQ ID NO: 219828 - DNA, 25 bp, SARS Virus
gtaattaaaagaacagagaagtcgt

SEQ ID NO: 219829 - DNA, 25 bp, SARS Virus
taattaaaagaaaagagaagtcgta

SEQ ID NO: 219830 - DNA, 25 bp, SARS Virus
aattaaaagaacagagaagtcgtac

SEQ ID NO: 219831 - DNA, 25 bp, SARS Virus
attaaaagaacaaagaagtcgtact

SEQ ID NO: 219832 - DNA, 25 bp, SARS Virus
ttaaaagaacagagaagtcgtactc

SEQ ID NO: 219833 - DNA, 25 bp, SARS Virus
taaaagaacagaaaagtcgtactcg

SEQ ID NO: 219834 - DNA, 25 bp, SARS Virus
aaaagaacagagaagtcgtactcgt

SEQ ID NO: 219835 - DNA, 25 bp, SARS Virus
aaagaacagagaagtcgtactcgtt

SEQ ID NO: 219836 - DNA, 25 bp, SARS Virus
aagaacagagaaatcgtactcgttc

SEQ ID NO: 219837 - DNA, 25 bp, SARS Virus
agaacagagaagacgtactcgttcg

SEQ ID NO: 219838 - DNA, 25 bp, SARS Virus
gaacagagaagtagtactcgttcgt

SEQ ID NO: 219839 - DNA, 25 bp, SARS Virus
aacagagaagtcatactcgttcgta

SEQ ID NO: 219840 - DNA, 25 bp, SARS Virus
acagagaagtcgaactcgttcgtaa

SEQ ID NO: 219841 - DNA, 25 bp, SARS Virus
cagagaagtcgtactcgttcgtaaa

SEQ ID NO: 219842 - DNA, 25 bp, SARS Virus
agagaagtcgtaatcgttcgtaaag

SEQ ID NO: 219843 - DNA, 25 bp, SARS Virus
gagaagtcgtacacgttcgtaaaga

SEQ ID NO: 219844 - DNA, 25 bp, SARS Virus
agaagtcgtactagttcgtaaagag

SEQ ID NO: 219845 - DNA, 25 bp, SARS Virus
gaagtcgtactcattcgtaaagaga

SEQ ID NO: 219846 - DNA, 25 bp, SARS Virus
aagtcgtactcgatcgtaaagagag

SEQ ID NO: 219847 - DNA, 25 bp, SARS Virus
agtcgtactcgtacgtaaagagagt

SEQ ID NO: 219848 - DNA, 25 bp, SARS Virus
gtcgtactcgttagtaaagagagtt

SEQ ID NO: 219849 - DNA, 25 bp, SARS Virus
tcgtactcgttcataaagagagttt

SEQ ID NO: 219850 - DNA, 25 bp, SARS Virus
cgtactcgttcgaaaagagagttta

SEQ ID NO: 219851 - DNA, 25 bp, SARS Virus
gtactcgttcgtaaagagagtttaa

SEQ ID NO: 219852 - DNA, 25 bp, SARS Virus
tactcgttcgtaaagagagtttaag

SEQ ID NO: 219853 - DNA, 25 bp, SARS Virus
actcgttcgtaaagagagtttaagg

SEQ ID NO: 219854 - DNA, 25 bp, SARS Virus
ctcgttcgtaaaaagagtttaaggt

SEQ ID NO: 219855 - DNA, 25 bp, SARS Virus
tcgttcgtaaagagagtttaaggtc

SEQ ID NO: 219856 - DNA, 25 bp, SARS Virus
cgttcgtaaagaaagtttaaggtcc

SEQ ID NO: 219857 - DNA, 25 bp, SARS Virus
gttcgtaaagagagtttaaggtcct

SEQ ID NO: 219858 - DNA, 25 bp, SARS Virus
ttcgtaaagagaatttaaggtccta

SEQ ID NO: 219859 - DNA, 25 bp, SARS Virus
tcgtaaagagagattaaggtcctat

SEQ ID NO: 219860 - DNA, 25 bp, SARS Virus
cgtaaagagagtataaggtcctatg

SEQ ID NO: 219861 - DNA, 25 bp, SARS Virus
gtaaagagagttaaaggtcctatgt

SEQ ID NO: 219862 - DNA, 25 bp, SARS Virus
taaagagagtttaaggtcctatgtc

SEQ ID NO: 219863 - DNA, 25 bp, SARS Virus
aaagagagtttaaggtcctatgtca

SEQ ID NO: 219864 - DNA, 25 bp, SARS Virus
aagagagtttaaagtcctatgtcaa

SEQ ID NO: 219865 - DNA, 25 bp, SARS Virus
agagagtttaagatcctatgtcaag

SEQ ID NO: 219866 - DNA, 25 bp, SARS Virus
gagagtttaaggacctatgtcaagg

SEQ ID NO: 219867 - DNA, 25 bp, SARS Virus
agagtttaaggtactatgtcaagga

SEQ ID NO: 219868 - DNA, 25 bp, SARS Virus
gagtttaaggtcatatgtcaaggat

SEQ ID NO: 219869 - DNA, 25 bp, SARS Virus
agtttaaggtccaatgtcaaggatc

SEQ ID NO: 219870 - DNA, 25 bp, SARS Virus
gtttaaggtcctatgtcaaggatct

SEQ ID NO: 219871 - DNA, 25 bp, SARS Virus
tttaaggtcctaagtcaaggatctt

SEQ ID NO: 219872 - DNA, 25 bp, SARS Virus
ttaaggtcctatatcaaggatctta

SEQ ID NO: 219873 - DNA, 25 bp, SARS Virus
taaggtcctatgacaaggatcttag

SEQ ID NO: 219874 - DNA, 25 bp, SARS Virus
aaggtcctatgtaaaggatcttaga

SEQ ID NO: 219875 - DNA, 25 bp, SARS Virus
aggtcctatgtcaaggatcttagag

SEQ ID NO: 219876 - DNA, 25 bp, SARS Virus
ggtcctatgtcaaggatcttagaga

SEQ ID NO: 219877 - DNA, 25 bp, SARS Virus
gtcctatgtcaaagatcttagagaa

SEQ ID NO: 219878 - DNA, 25 bp, SARS Virus
tcctatgtcaagaatcttagagaag

SEQ ID NO: 219879 - DNA, 25 bp, SARS Virus
cctatgtcaaggatcttagagaagg

SEQ ID NO: 219880 - DNA, 25 bp, SARS Virus
ctatgtcaaggaacttagagaagga

SEQ ID NO: 219881 - DNA, 25 bp, SARS Virus
tatgtcaaggatattagagaaggaa

SEQ ID NO: 219882 - DNA, 25 bp, SARS Virus
atgtcaaggatcatagagaaggaat

SEQ ID NO: 219883 - DNA, 25 bp, SARS Virus
tgtcaaggatctaagagaaggaatc

SEQ ID NO: 219884 - DNA, 25 bp, SARS Virus
gtcaaggatcttagagaaggaatcg

SEQ ID NO: 219885 - DNA, 25 bp, SARS Virus
tcaaggatcttaaagaaggaatcgt

SEQ ID NO: 219886 - DNA, 25 bp, SARS Virus
caaggatcttagagaaggaatcgta

SEQ ID NO: 219887 - DNA, 25 bp, SARS Virus
aaggatcttagaaaaggaatcgtaa

SEQ ID NO: 219888 - DNA, 25 bp, SARS Virus
aggatcttagagaaggaatcgtaat

SEQ ID NO: 219889 - DNA, 25 bp, SARS Virus
ggatcttagagaaggaatcgtaatc

SEQ ID NO: 219890 - DNA, 25 bp, SARS Virus
gatcttagagaaagaatcgtaatcc

SEQ ID NO: 219891 - DNA, 25 bp, SARS Virus
atcttagagaagaaatcgtaatcca

SEQ ID NO: 219892 - DNA, 25 bp, SARS Virus
tcttagagaaggaatcgtaatccac

SEQ ID NO: 219893 - DNA, 25 bp, SARS Virus
cttagagaaggaatcgtaatccacg

SEQ ID NO: 219894 - DNA, 25 bp, SARS Virus
ttagagaaggaaacgtaatccacga

SEQ ID NO: 219895 - DNA, 25 bp, SARS Virus
tagagaaggaatagtaatccacgaa

SEQ ID NO: 219896 - DNA, 25 bp, SARS Virus
agagaaggaatcataatccacgaag

SEQ ID NO: 219897 - DNA, 25 bp, SARS Virus
gagaaggaatcgaaatccacgaaga

SEQ ID NO: 219898 - DNA, 25 bp, SARS Virus
agaaggaatcgtaatccacgaagac

SEQ ID NO: 219899 - DNA, 25 bp, SARS Virus
gaaggaatcgtaatccacgaagact

SEQ ID NO: 219900 - DNA, 25 bp, SARS Virus
aaggaatcgtaaaccacgaagactt

SEQ ID NO: 219901 - DNA, 25 bp, SARS Virus
aggaatcgtaatacacgaagacttc

SEQ ID NO: 219902 - DNA, 25 bp, SARS Virus
ggaatcgtaatcaacgaagacttcc

SEQ ID NO: 219903 - DNA, 25 bp, SARS Virus
gaatcgtaatccacgaagacttcca

SEQ ID NO: 219904 - DNA, 25 bp, SARS Virus
aatcgtaatccaagaagacttccat

SEQ ID NO: 219905 - DNA, 25 bp, SARS Virus
atcgtaatccacaaagacttccatc

SEQ ID NO: 219906 - DNA, 25 bp, SARS Virus
tcgtaatccacgaagacttccatca

SEQ ID NO: 219907 - DNA, 25 bp, SARS Virus
cgtaatccacgaagacttccatcat

SEQ ID NO: 219908 - DNA, 25 bp, SARS Virus
gtaatccacgaaaacttccatcatg

SEQ ID NO: 219909 - DNA, 25 bp, SARS Virus
taatccacgaagacttccatcatgt

SEQ ID NO: 219910 - DNA, 25 bp, SARS Virus
aatccacgaagaattccatcatgta

SEQ ID NO: 219911 - DNA, 25 bp, SARS Virus
atccacgaagacatccatcatgtat

SEQ ID NO: 219912 - DNA, 25 bp, SARS Virus
tccacgaagactaccatcatgtatt

SEQ ID NO: 219913 - DNA, 25 bp, SARS Virus
ccacgaagacttacatcatgtattt

SEQ ID NO: 219914 - DNA, 25 bp, SARS Virus
cacgaagacttcaatcatgtatttt

SEQ ID NO: 219915 - DNA, 25 bp, SARS Virus
acgaagacttccatcatgtatttta

SEQ ID NO: 219916 - DNA, 25 bp, SARS Virus
cgaagacttccaacatgtattttac

SEQ ID NO: 219917 - DNA, 25 bp, SARS Virus
gaagacttccataatgtattttacg

SEQ ID NO: 219918 - DNA, 25 bp, SARS Virus
aagacttccatcatgtattttacgt

SEQ ID NO: 219919 - DNA, 25 bp, SARS Virus
agacttccatcaagtattttacgtc

SEQ ID NO: 219920 - DNA, 25 bp, SARS Virus
gacttccatcatatattttacgtct

SEQ ID NO: 219921 - DNA, 25 bp, SARS Virus
acttccatcatgaattttacgtcta

SEQ ID NO: 219922 - DNA, 25 bp, SARS Virus
cttccatcatgtattttacgtctaa

SEQ ID NO: 219923 - DNA, 25 bp, SARS Virus
ttccatcatgtaatttacgtctaaa

SEQ ID NO: 219924 - DNA, 25 bp, SARS Virus
tccatcatgtatattacgtctaaac

SEQ ID NO: 219925 - DNA, 25 bp, SARS Virus
ccatcatgtattatacgtctaaacg

SEQ ID NO: 219926 - DNA, 25 bp, SARS Virus
catcatgtatttaacgtctaaacgt

SEQ ID NO: 219927 - DNA, 25 bp, SARS Virus
atcatgtattttacgtctaaacgta

SEQ ID NO: 219928 - DNA, 25 bp, SARS Virus
tcatgtattttaagtctaaacgtaa

SEQ ID NO: 219929 - DNA, 25 bp, SARS Virus
catgtattttacatctaaacgtaaa

SEQ ID NO: 219930 - DNA, 25 bp, SARS Virus
atgtattttacgactaaacgtaaag

SEQ ID NO: 219931 - DNA, 25 bp, SARS Virus
tgtattttacgtataaacgtaaaga

SEQ ID NO: 219932 - DNA, 25 bp, SARS Virus
gtattttacgtcaaaacgtaaagaa

SEQ ID NO: 219933 - DNA, 25 bp, SARS Virus
tattttacgtctaaacgtaaagaat

SEQ ID NO: 219934 - DNA, 25 bp, SARS Virus
attttacgtctaaacgtaaagaatt

SEQ ID NO: 219935 - DNA, 25 bp, SARS Virus
ttttacgtctaaacgtaaagaattc

SEQ ID NO: 219936 - DNA, 25 bp, SARS Virus
tttacgtctaaaagtaaagaattct

SEQ ID NO: 219937 - DNA, 25 bp, SARS Virus
ttacgtctaaacataaagaattctc

SEQ ID NO: 219938 - DNA, 25 bp, SARS Virus
tacgtctaaacgaaaagaattctcg

SEQ ID NO: 219939 - DNA, 25 bp, SARS Virus
acgtctaaacgtaaagaattctcgt

SEQ ID NO: 219940 - DNA, 25 bp, SARS Virus
cgtctaaacgtaaagaattctcgtc

SEQ ID NO: 219941 - DNA, 25 bp, SARS Virus
gtctaaacgtaaagaattctcgtca

SEQ ID NO: 219942 - DNA, 25 bp, SARS Virus
tctaaacgtaaaaaattctcgtcag

SEQ ID NO: 219943 - DNA, 25 bp, SARS Virus
ctaaacgtaaagaattctcgtcaga

SEQ ID NO: 219944 - DNA, 25 bp, SARS Virus
taaacgtaaagaattctcgtcagaa

SEQ ID NO: 219945 - DNA, 25 bp, SARS Virus
aaacgtaaagaaatctcgtcagaat

SEQ ID NO: 219946 - DNA, 25 bp, SARS Virus
aacgtaaagaatactcgtcagaatc

SEQ ID NO: 219947 - DNA, 25 bp, SARS Virus
acgtaaagaattatcgtcagaatcg

SEQ ID NO: 219948 - DNA, 25 bp, SARS Virus
cgtaaagaattcacgtcagaatcga

SEQ ID NO: 219949 - DNA, 25 bp, SARS Virus
gtaaagaattctagtcagaatcgaa

SEQ ID NO: 219950 - DNA, 25 bp, SARS Virus
taaagaattctcatcagaatcgaag

SEQ ID NO: 219951 - DNA, 25 bp, SARS Virus
aaagaattctcgacagaatcgaagg

SEQ ID NO: 219952 - DNA, 25 bp, SARS Virus
aagaattctcgtaagaatcgaagga

SEQ ID NO: 219953 - DNA, 25 bp, SARS Virus
agaattctcgtcagaatcgaaggag

SEQ ID NO: 219954 - DNA, 25 bp, SARS Virus
gaattctcgtcaaaatcgaaggagt

SEQ ID NO: 219955 - DNA, 25 bp, SARS Virus
aattctcgtcagaatcgaaggagtt

SEQ ID NO: 219956 - DNA, 25 bp, SARS Virus
attctcgtcagaatcgaaggagttc

SEQ ID NO: 219957 - DNA, 25 bp, SARS Virus
ttctcgtcagaaacgaaggagttca

SEQ ID NO: 219958 - DNA, 25 bp, SARS Virus
tctcgtcagaatagaaggagttcac

SEQ ID NO: 219959 - DNA, 25 bp, SARS Virus
ctcgtcagaatcaaaggagttcaca

SEQ ID NO: 219960 - DNA, 25 bp, SARS Virus
tcgtcagaatcgaaggagttcacat

SEQ ID NO: 219961 - DNA, 25 bp, SARS Virus
cgtcagaatcgaaggagttcacata

SEQ ID NO: 219962 - DNA, 25 bp, SARS Virus
gtcagaatcgaaagagttcacatat

SEQ ID NO: 219963 - DNA, 25 bp, SARS Virus
tcagaatcgaagaagttcacatatt

SEQ ID NO: 219964 - DNA, 25 bp, SARS Virus
cagaatcgaaggagttcacatattg

SEQ ID NO: 219965 - DNA, 25 bp, SARS Virus
agaatcgaaggaattcacatattgg

SEQ ID NO: 219966 - DNA, 25 bp, SARS Virus
gaatcgaaggagatcacatattggt

SEQ ID NO: 219967 - DNA, 25 bp, SARS Virus
aatcgaaggagtacacatattggtc

SEQ ID NO: 219968 - DNA, 25 bp, SARS Virus
atcgaaggagttaacatattggtcg

SEQ ID NO: 219969 - DNA, 25 bp, SARS Virus
tcgaaggagttcacatattggtcgt

SEQ ID NO: 219970 - DNA, 25 bp, SARS Virus
cgaaggagttcaaatattggtcgtg

SEQ ID NO: 219971 - DNA, 25 bp, SARS Virus
gaaggagttcacatattggtcgtgt

SEQ ID NO: 219972 - DNA, 25 bp, SARS Virus
aaggagttcacaaattggtcgtgta

SEQ ID NO: 219973 - DNA, 25 bp, SARS Virus
aggagttcacatattggtcgtgtag

SEQ ID NO: 219974 - DNA, 25 bp, SARS Virus
ggagttcacataatggtcgtgtagg

SEQ ID NO: 219975 - DNA, 25 bp, SARS Virus
gagttcacatataggtcgtgtagga

SEQ ID NO: 219976 - DNA, 25 bp, SARS Virus
agttcacatattagtcgtgtaggaa

SEQ ID NO: 219977 - DNA, 25 bp, SARS Virus
gttcacatattgatcgtgtaggaac

SEQ ID NO: 219978 - DNA, 25 bp, SARS Virus
ttcacatattggacgtgtaggaaca

SEQ ID NO: 219979 - DNA, 25 bp, SARS Virus
tcacatattggtagtgtaggaacag

SEQ ID NO: 219980 - DNA, 25 bp, SARS Virus
cacatattggtcatgtaggaacagg

SEQ ID NO: 219981 - DNA, 25 bp, SARS Virus
acatattggtcgagtaggaacaggt

SEQ ID NO: 219982 - DNA, 25 bp, SARS Virus
catattggtcgtataggaacaggtc

SEQ ID NO: 219983 - DNA, 25 bp, SARS Virus
atattggtcgtgaaggaacaggtcc

SEQ ID NO: 219984 - DNA, 25 bp, SARS Virus
tattggtcgtgtaggaacaggtccc

SEQ ID NO: 219985 - DNA, 25 bp, SARS Virus
attggtcgtgtaagaacaggtccca

SEQ ID NO: 219986 - DNA, 25 bp, SARS Virus
ttggtcgtgtagaaacaggtcccat

SEQ ID NO: 219987 - DNA, 25 bp, SARS Virus
tggtcgtgtaggaacaggtcccatg

SEQ ID NO: 219988 - DNA, 25 bp, SARS Virus
ggtcgtgtaggaacaggtcccatgc

SEQ ID NO: 219989 - DNA, 25 bp, SARS Virus
gtcgtgtaggaaaaggtcccatgca

SEQ ID NO: 219990 - DNA, 25 bp, SARS Virus
tcgtgtaggaacaggtcccatgcac

SEQ ID NO: 219991 - DNA, 25 bp, SARS Virus
cgtgtaggaacaagtcccatgcacc

SEQ ID NO: 219992 - DNA, 25 bp, SARS Virus
gtgtaggaacagatcccatgcacca

SEQ ID NO: 219993 - DNA, 25 bp, SARS Virus
tgtaggaacaggacccatgcaccaa

SEQ ID NO: 219994 - DNA, 25 bp, SARS Virus
gtaggaacaggtaccatgcaccaat

SEQ ID NO: 219995 - DNA, 25 bp, SARS Virus
taggaacaggtcacatgcaccaata

SEQ ID NO: 219996 - DNA, 25 bp, SARS Virus
aggaacaggtccaatgcaccaatat

SEQ ID NO: 219997 - DNA, 25 bp, SARS Virus
ggaacaggtcccatgcaccaatata

SEQ ID NO: 219998 - DNA, 25 bp, SARS Virus
gaacaggtcccaagcaccaatatat

SEQ ID NO: 219999 - DNA, 25 bp, SARS Virus
aacaggtcccatacaccaatatatg

SEQ ID NO: 220000 - DNA, 25 bp, SARS Virus
acaggtcccatgaaccaatatatga

SEQ ID NO: 220001 - DNA, 25 bp, SARS Virus
caggtcccatgcaccaatatatgag

SEQ ID NO: 220002 - DNA, 25 bp, SARS Virus
aggtcccatgcaacaatatatgagt

SEQ ID NO: 220003 - DNA, 25 bp, SARS Virus
ggtcccatgcacaaatatatgagta

SEQ ID NO: 220004 - DNA, 25 bp, SARS Virus
gtcccatgcaccaatatatgagtag

SEQ ID NO: 220005 - DNA, 25 bp, SARS Virus
tcccatgcaccaatatatgagtagt

SEQ ID NO: 220006 - DNA, 25 bp, SARS Virus
cccatgcaccaaaatatgagtagtt

SEQ ID NO: 220007 - DNA, 25 bp, SARS Virus
ccatgcaccaatatatgagtagttg

SEQ ID NO: 220008 - DNA, 25 bp, SARS Virus
catgcaccaataaatgagtagttga

SEQ ID NO: 220009 - DNA, 25 bp, SARS Virus
atgcaccaatatatgagtagttgac

SEQ ID NO: 220010 - DNA, 25 bp, SARS Virus
tgcaccaatataagagtagttgacc

SEQ ID NO: 220011 - DNA, 25 bp, SARS Virus
gcaccaatatataagtagttgaccg

SEQ ID NO: 220012 - DNA, 25 bp, SARS Virus
caccaatatatgagtagttgaccgt

SEQ ID NO: 220013 - DNA, 25 bp, SARS Virus
accaatatatgaatagttgaccgtg

SEQ ID NO: 220014 - DNA, 25 bp, SARS Virus
ccaatatatgagaagttgaccgtga

SEQ ID NO: 220015 - DNA, 25 bp, SARS Virus
caatatatgagtagttgaccgtgaa

SEQ ID NO: 220016 - DNA, 25 bp, SARS Virus
aatatatgagtaattgaccgtgaaa

SEQ ID NO: 220017 - DNA, 25 bp, SARS Virus
atatatgagtagatgaccgtgaaag

SEQ ID NO: 220018 - DNA, 25 bp, SARS Virus
tatatgagtagtagaccgtgaaaga

SEQ ID NO: 220019 - DNA, 25 bp, SARS Virus
atatgagtagttaaccgtgaaagaa

SEQ ID NO: 220020 - DNA, 25 bp, SARS Virus
tatgagtagttgaccgtgaaagaag

SEQ ID NO: 220021 - DNA, 25 bp, SARS Virus
atgagtagttgaacgtgaaagaagt

SEQ ID NO: 220022 - DNA, 25 bp, SARS Virus
tgagtagttgacagtgaaagaagtt

SEQ ID NO: 220023 - DNA, 25 bp, SARS Virus
gagtagttgaccatgaaagaagttt

SEQ ID NO: 220024 - DNA, 25 bp, SARS Virus
agtagttgaccgagaaagaagtttc

SEQ ID NO: 220025 - DNA, 25 bp, SARS Virus
gtagttgaccgtaaaagaagtttcg

SEQ ID NO: 220026 - DNA, 25 bp, SARS Virus
tagttgaccgtgaaagaagtttcga

SEQ ID NO: 220027 - DNA, 25 bp, SARS Virus
agttgaccgtgaaagaagtttcgag

SEQ ID NO: 220028 - DNA, 25 bp, SARS Virus
gttgaccgtgaaagaagtttcgaga

SEQ ID NO: 220029 - DNA, 25 bp, SARS Virus
ttgaccgtgaaaaaagtttcgagaa

SEQ ID NO: 220030 - DNA, 25 bp, SARS Virus
tgaccgtgaaagaagtttcgagaac

SEQ ID NO: 220031 - DNA, 25 bp, SARS Virus
gaccgtgaaagaagtttcgagaact

SEQ ID NO: 220032 - DNA, 25 bp, SARS Virus
accgtgaaagaaatttcgagaactc

SEQ ID NO: 220033 - DNA, 25 bp, SARS Virus
ccgtgaaagaagattcgagaactct

SEQ ID NO: 220034 - DNA, 25 bp, SARS Virus
cgtgaaagaagtatcgagaactctc

SEQ ID NO: 220035 - DNA, 25 bp, SARS Virus
gtgaaagaagttacgagaactctcg

SEQ ID NO: 220036 - DNA, 25 bp, SARS Virus
tgaaagaagtttagagaactctcgt

SEQ ID NO: 220037 - DNA, 25 bp, SARS Virus
gaaagaagtttcaagaactctcgta

SEQ ID NO: 220038 - DNA, 25 bp, SARS Virus
aaagaagtttcgagaactctcgtag

SEQ ID NO: 220039 - DNA, 25 bp, SARS Virus
aagaagtttcgaaaactctcgtaga

SEQ ID NO: 220040 - DNA, 25 bp, SARS Virus
agaagtttcgagaactctcgtagag

SEQ ID NO: 220041 - DNA, 25 bp, SARS Virus
gaagtttcgagaactctcgtagagt

SEQ ID NO: 220042 - DNA, 25 bp, SARS Virus
aagtttcgagaaatctcgtagagtc

SEQ ID NO: 220043 - DNA, 25 bp, SARS Virus
agtttcgagaacactcgtagagtca

SEQ ID NO: 220044 - DNA, 25 bp, SARS Virus
gtttcgagaactatcgtagagtcat

SEQ ID NO: 220045 - DNA, 25 bp, SARS Virus
tttcgagaactcacgtagagtcatc

SEQ ID NO: 220046 - DNA, 25 bp, SARS Virus
ttcgagaactctagtagagtcatca

SEQ ID NO: 220047 - DNA, 25 bp, SARS Virus
tcgagaactctcatagagtcatcac

SEQ ID NO: 220048 - DNA, 25 bp, SARS Virus
cgagaactctcgaagagtcatcacg

SEQ ID NO: 220049 - DNA, 25 bp, SARS Virus
gagaactctcgtagagtcatcacgg

SEQ ID NO: 220050 - DNA, 25 bp, SARS Virus
agaactctcgtaaagtcatcacggt

SEQ ID NO: 220051 - DNA, 25 bp, SARS Virus
gaactctcgtagagtcatcacggtg

SEQ ID NO: 220052 - DNA, 25 bp, SARS Virus
aactctcgtagaatcatcacggtgg

SEQ ID NO: 220053 - DNA, 25 bp, SARS Virus
actctcgtagagacatcacggtggt

SEQ ID NO: 220054 - DNA, 25 bp, SARS Virus
ctctcgtagagtaatcacggtggtc

SEQ ID NO: 220055 - DNA, 25 bp, SARS Virus
tctcgtagagtcatcacggtggtcg

SEQ ID NO: 220056 - DNA, 25 bp, SARS Virus
ctcgtagagtcaacacggtggtcgg

SEQ ID NO: 220057 - DNA, 25 bp, SARS Virus
tcgtagagtcataacggtggtcgga

SEQ ID NO: 220058 - DNA, 25 bp, SARS Virus
cgtagagtcatcacggtggtcggaa

SEQ ID NO: 220059 - DNA, 25 bp, SARS Virus
gtagagtcatcaaggtggtcggaaa

SEQ ID NO: 220060 - DNA, 25 bp, SARS Virus
tagagtcatcacagtggtcggaaaa

SEQ ID NO: 220061 - DNA, 25 bp, SARS Virus
agagtcatcacgatggtcggaaaaa

SEQ ID NO: 220062 - DNA, 25 bp, SARS Virus
gagtcatcacggaggtcggaaaaac

SEQ ID NO: 220063 - DNA, 25 bp, SARS Virus
agtcatcacggtagtcggaaaaacc

SEQ ID NO: 220064 - DNA, 25 bp, SARS Virus
gtcatcacggtgatcggaaaaacct

SEQ ID NO: 220065 - DNA, 25 bp, SARS Virus
tcatcacggtggacggaaaaacctc

SEQ ID NO: 220066 - DNA, 25 bp, SARS Virus
catcacggtggtaggaaaaacctcc

SEQ ID NO: 220067 - DNA, 25 bp, SARS Virus
atcacggtggtcagaaaaacctccc

SEQ ID NO: 220068 - DNA, 25 bp, SARS Virus
tcacggtggtcgaaaaaacctccca

SEQ ID NO: 220069 - DNA, 25 bp, SARS Virus
cacggtggtcggaaaaacctcccat

SEQ ID NO: 220070 - DNA, 25 bp, SARS Virus
acggtggtcggaaaaacctcccata

SEQ ID NO: 220071 - DNA, 25 bp, SARS Virus
cggtggtcggaaaaacctcccataa

SEQ ID NO: 220072 - DNA, 25 bp, SARS Virus
ggtggtcggaaaaacctcccataat

SEQ ID NO: 220073 - DNA, 25 bp, SARS Virus
gtggtcggaaaaacctcccataatg

SEQ ID NO: 220074 - DNA, 25 bp, SARS Virus
tggtcggaaaaaactcccataatgt

SEQ ID NO: 220075 - DNA, 25 bp, SARS Virus
ggtcggaaaaacatcccataatgtt

SEQ ID NO: 220076 - DNA, 25 bp, SARS Virus
gtcggaaaaaccacccataatgttg

SEQ ID NO: 220077 - DNA, 25 bp, SARS Virus
tcggaaaaacctaccataatgttgt

SEQ ID NO: 220078 - DNA, 25 bp, SARS Virus
cggaaaaacctcacataatgttgtg

SEQ ID NO: 220079 - DNA, 25 bp, SARS Virus
ggaaaaacctccaataatgttgtgt

SEQ ID NO: 220080 - DNA, 25 bp, SARS Virus
gaaaaacctcccataatgttgtgtt

SEQ ID NO: 220081 - DNA, 25 bp, SARS Virus
aaaaacctcccaaaatgttgtgttc

SEQ ID NO: 220082 - DNA, 25 bp, SARS Virus
aaaacctcccataatgttgtgttca

SEQ ID NO: 220083 - DNA, 25 bp, SARS Virus
aaacctcccataatgttgtgttcac

SEQ ID NO: 220084 - DNA, 25 bp, SARS Virus
aacctcccataaagttgtgttcact

SEQ ID NO: 220085 - DNA, 25 bp, SARS Virus
acctcccataatattgtgttcacta

SEQ ID NO: 220086 - DNA, 25 bp, SARS Virus
cctcccataatgatgtgttcactat

SEQ ID NO: 220087 - DNA, 25 bp, SARS Virus
ctcccataatgtagtgttcactata

SEQ ID NO: 220088 - DNA, 25 bp, SARS Virus
tcccataatgttatgttcactatag

SEQ ID NO: 220089 - DNA, 25 bp, SARS Virus
cccataatgttgagttcactatagt

SEQ ID NO: 220090 - DNA, 25 bp, SARS Virus
ccataatgttgtattcactatagtg

SEQ ID NO: 220091 - DNA, 25 bp, SARS Virus
cataatgttgtgatcactatagtgg

SEQ ID NO: 220092 - DNA, 25 bp, SARS Virus
ataatgttgtgtacactatagtggt

SEQ ID NO: 220093 - DNA, 25 bp, SARS Virus
taatgttgtgttaactatagtggtg

SEQ ID NO: 220094 - DNA, 25 bp, SARS Virus
aatgttgtgttcactatagtggtga

SEQ ID NO: 220095 - DNA, 25 bp, SARS Virus
atgttgtgttcaatatagtggtgat

SEQ ID NO: 220096 - DNA, 25 bp, SARS Virus
tgttgtgttcacaatagtggtgatc

SEQ ID NO: 220097 - DNA, 25 bp, SARS Virus
gttgtgttcactatagtggtgatca

SEQ ID NO: 220098 - DNA, 25 bp, SARS Virus
ttgtgttcactaaagtggtgatcac

SEQ ID NO: 220099 - DNA, 25 bp, SARS Virus
tgtgttcactatagtggtgatcact

SEQ ID NO: 220100 - DNA, 25 bp, SARS Virus
gtgttcactataatggtgatcacta

SEQ ID NO: 220101 - DNA, 25 bp, SARS Virus
tgttcactatagaggtgatcactat

SEQ ID NO: 220102 - DNA, 25 bp, SARS Virus
gttcactatagtagtgatcactatt

SEQ ID NO: 220103 - DNA, 25 bp, SARS Virus
ttcactatagtgatgatcactattg

SEQ ID NO: 220104 - DNA, 25 bp, SARS Virus
tcactatagtggagatcactattgt

SEQ ID NO: 220105 - DNA, 25 bp, SARS Virus
cactatagtggtaatcactattgta

SEQ ID NO: 220106 - DNA, 25 bp, SARS Virus
actatagtggtgatcactattgtag

SEQ ID NO: 220107 - DNA, 25 bp, SARS Virus
ctatagtggtgaacactattgtagt

SEQ ID NO: 220108 - DNA, 25 bp, SARS Virus
tatagtggtgataactattgtagtg

SEQ ID NO: 220109 - DNA, 25 bp, SARS Virus
atagtggtgatcactattgtagtgg

SEQ ID NO: 220110 - DNA, 25 bp, SARS Virus
tagtggtgatcaatattgtagtgga

SEQ ID NO: 220111 - DNA, 25 bp, SARS Virus
agtggtgatcacaattgtagtggat

SEQ ID NO: 220112 - DNA, 25 bp, SARS Virus
gtggtgatcactattgtagtggatg

SEQ ID NO: 220113 - DNA, 25 bp, SARS Virus
tggtgatcactaatgtagtggatgg

SEQ ID NO: 220114 - DNA, 25 bp, SARS Virus
ggtgatcactatagtagtggatggt

SEQ ID NO: 220115 - DNA, 25 bp, SARS Virus
gtgatcactattatagtggatggta

SEQ ID NO: 220116 - DNA, 25 bp, SARS Virus
tgatcactattgaagtggatggtac

SEQ ID NO: 220117 - DNA, 25 bp, SARS Virus
gatcactattgtagtggatggtaca

SEQ ID NO: 220118 - DNA, 25 bp, SARS Virus
atcactattgtaatggatggtacat

SEQ ID NO: 220119 - DNA, 25 bp, SARS Virus
tcactattgtagaggatggtacatt

SEQ ID NO: 220120 - DNA, 25 bp, SARS Virus
cactattgtagtagatggtacattc

SEQ ID NO: 220121 - DNA, 25 bp, SARS Virus
acagtgtattggctaaccgtaacac

SEQ ID NO: 220122 - DNA, 25 bp, SARS Virus
cagtgtattggtcaaccgtaacact

SEQ ID NO: 220123 - DNA, 25 bp, SARS Virus
agtgtattggttcaccgtaacactg

SEQ ID NO: 220124 - DNA, 25 bp, SARS Virus
gtgtattggttacccgtaacactgt

SEQ ID NO: 220125 - DNA, 25 bp, SARS Virus
tgtattggttaaccgtaacactgtt

SEQ ID NO: 220126 - DNA, 25 bp, SARS Virus
gtattggttaaccgtaacactgttc

SEQ ID NO: 220127 - DNA, 25 bp, SARS Virus
tattggttaaccctaacactgttcg

SEQ ID NO: 220128 - DNA, 25 bp, SARS Virus
attggttaaccgcaacactgttcgc

SEQ ID NO: 220129 - DNA, 25 bp, SARS Virus
ttggttaaccgtcacactgttcgcc

SEQ ID NO: 220130 - DNA, 25 bp, SARS Virus
tggttaaccgtaccactgttcgccg

SEQ ID NO: 220131 - DNA, 25 bp, SARS Virus
ggttaaccgtaacactgttcgccga

SEQ ID NO: 220132 - DNA, 25 bp, SARS Virus
gttaaccgtaaccctgttcgccgag

SEQ ID NO: 220133 - DNA, 25 bp, SARS Virus
ttaaccgtaacactgttcgccgagt

SEQ ID NO: 220134 - DNA, 25 bp, SARS Virus
taaccgtaacaccgttcgccgagta

SEQ ID NO: 220135 - DNA, 25 bp, SARS Virus
aaccgtaacactcttcgccgagtaa

SEQ ID NO: 220136 - DNA, 25 bp, SARS Virus
accgtaacactgctcgccgagtaaa

SEQ ID NO: 220137 - DNA, 25 bp, SARS Virus
ccgtaacactgtccgccgagtaaat

SEQ ID NO: 220138 - DNA, 25 bp, SARS Virus
cgtaacactgttcgccgagtaaatc

SEQ ID NO: 220139 - DNA, 25 bp, SARS Virus
gtaacactgttccccgagtaaatct

SEQ ID NO: 220140 - DNA, 25 bp, SARS Virus
taacactgttcgccgagtaaatctc

SEQ ID NO: 220141 - DNA, 25 bp, SARS Virus
aacactgttcgccgagtaaatctct

SEQ ID NO: 220142 - DNA, 25 bp, SARS Virus
acactgttcgcccagtaaatctctc

SEQ ID NO: 220143 - DNA, 25 bp, SARS Virus
cactgttcgccgcgtaaatctctca

SEQ ID NO: 220144 - DNA, 25 bp, SARS Virus
actgttcgccgactaaatctctcaa

SEQ ID NO: 220145 - DNA, 25 bp, SARS Virus
ctgttcgccgagcaaatctctcaag

SEQ ID NO: 220146 - DNA, 25 bp, SARS Virus
tgttcgccgagtcaatctctcaagt

SEQ ID NO: 220147 - DNA, 25 bp, SARS Virus
gttcgccgagtacatctctcaagtc

SEQ ID NO: 220148 - DNA, 25 bp, SARS Virus
ttcgccgagtaactctctcaagtcg

SEQ ID NO: 220149 - DNA, 25 bp, SARS Virus
tcgccgagtaaacctctcaagtcga

SEQ ID NO: 220150 - DNA, 25 bp, SARS Virus
cgccgagtaaatctctcaagtcgaa

SEQ ID NO: 220151 - DNA, 25 bp, SARS Virus
gccgagtaaatccctcaagtcgaag

SEQ ID NO: 220152 - DNA, 25 bp, SARS Virus
ccgagtaaatctctcaagtcgaagc

SEQ ID NO: 220153 - DNA, 25 bp, SARS Virus
cgagtaaatctcccaagtcgaagca

SEQ ID NO: 220154 - DNA, 25 bp, SARS Virus
gagtaaatctctcaagtcgaagcat

SEQ ID NO: 220155 - DNA, 25 bp, SARS Virus
agtaaatctctccagtcgaagcatt

SEQ ID NO: 220156 - DNA, 25 bp, SARS Virus
gtaaatctctcacgtcgaagcatta

SEQ ID NO: 220157 - DNA, 25 bp, SARS Virus
taaatctctcaactcgaagcattat

SEQ ID NO: 220158 - DNA, 25 bp, SARS Virus
aaatctctcaagccgaagcattatt

SEQ ID NO: 220159 - DNA, 25 bp, SARS Virus
aatctctcaagtcgaagcattatta

SEQ ID NO: 220160 - DNA, 25 bp, SARS Virus
atctctcaagtccaagcattattat

SEQ ID NO: 220161 - DNA, 25 bp, SARS Virus
tctctcaagtcgcagcattattatc

SEQ ID NO: 220162 - DNA, 25 bp, SARS Virus
ctctcaagtcgacgcattattatct

SEQ ID NO: 220163 - DNA, 25 bp, SARS Virus
tctcaagtcgaaccattattatctt

SEQ ID NO: 220164 - DNA, 25 bp, SARS Virus
ctcaagtcgaagcattattatcttc

SEQ ID NO: 220165 - DNA, 25 bp, SARS Virus
tcaagtcgaagccttattatcttcg

SEQ ID NO: 220166 - DNA, 25 bp, SARS Virus
caagtcgaagcactattatcttcga

SEQ ID NO: 220167 - DNA, 25 bp, SARS Virus
aagtcgaagcatcattatcttcgat

SEQ ID NO: 220168 - DNA, 25 bp, SARS Virus
agtcgaagcattcttatcttcgatg

SEQ ID NO: 220169 - DNA, 25 bp, SARS Virus
gtcgaagcattactatcttcgatgt

SEQ ID NO: 220170 - DNA, 25 bp, SARS Virus
tcgaagcattatcatcttcgatgtc

SEQ ID NO: 220171 - DNA, 25 bp, SARS Virus
cgaagcattattctcttcgatgtcc

SEQ ID NO: 220172 - DNA, 25 bp, SARS Virus
gaagcattattaccttcgatgtccg

SEQ ID NO: 220173 - DNA, 25 bp, SARS Virus
aagcattattatcttcgatgtccga

SEQ ID NO: 220174 - DNA, 25 bp, SARS Virus
agcattattatcctcgatgtccgag

SEQ ID NO: 220175 - DNA, 25 bp, SARS Virus
gcattattatctccgatgtccgaga

SEQ ID NO: 220176 - DNA, 25 bp, SARS Virus
cattattatcttcgatgtccgagaa

SEQ ID NO: 220177 - DNA, 25 bp, SARS Virus
attattatcttccatgtccgagaaa

SEQ ID NO: 220178 - DNA, 25 bp, SARS Virus
ttattatcttcgctgtccgagaaat

SEQ ID NO: 220179 - DNA, 25 bp, SARS Virus
tattatcttcgacgtccgagaaatg

SEQ ID NO: 220180 - DNA, 25 bp, SARS Virus
attatcttcgatctccgagaaatga

SEQ ID NO: 220181 - DNA, 25 bp, SARS Virus
ttatcttcgatgcccgagaaatgat

SEQ ID NO: 220182 - DNA, 25 bp, SARS Virus
tatcttcgatgtccgagaaatgatc

SEQ ID NO: 220183 - DNA, 25 bp, SARS Virus
atcttcgatgtccgagaaatgatca

SEQ ID NO: 220184 - DNA, 25 bp, SARS Virus
tcttcgatgtcccagaaatgatcat

SEQ ID NO: 220185 - DNA, 25 bp, SARS Virus
cttcgatgtccgcgaaatgatcata

SEQ ID NO: 220186 - DNA, 25 bp, SARS Virus
ttcgatgtccgacaaatgatcatat

SEQ ID NO: 220187 - DNA, 25 bp, SARS Virus
tcgatgtccgagcaatgatcatatt

SEQ ID NO: 220188 - DNA, 25 bp, SARS Virus
cgatgtccgagacatgatcatattt

SEQ ID NO: 220189 - DNA, 25 bp, SARS Virus
gatgtccgagaactgatcatatttt

SEQ ID NO: 220190 - DNA, 25 bp, SARS Virus
atgtccgagaaacgatcatattttc

SEQ ID NO: 220191 - DNA, 25 bp, SARS Virus
tgtccgagaaatcatcatattttct

SEQ ID NO: 220192 - DNA, 25 bp, SARS Virus
gtccgagaaatgctcatattttctt

SEQ ID NO: 220193 - DNA, 25 bp, SARS Virus
tccgagaaatgaccatattttcttc

SEQ ID NO: 220194 - DNA, 25 bp, SARS Virus
ccgagaaatgatcatattttcttct

SEQ ID NO: 220195 - DNA, 25 bp, SARS Virus
cgagaaatgatcctattttcttctt

SEQ ID NO: 220196 - DNA, 25 bp, SARS Virus
gagaaatgatcacattttcttctta

SEQ ID NO: 220197 - DNA, 25 bp, SARS Virus
agaaatgatcatcttttcttcttag

SEQ ID NO: 220198 - DNA, 25 bp, SARS Virus
gaaatgatcatactttcttcttagc

SEQ ID NO: 220199 - DNA, 25 bp, SARS Virus
aaatgatcatatcttcttcttagcc

SEQ ID NO: 220200 - DNA, 25 bp, SARS Virus
aatgatcatattctcttcttagcct

SEQ ID NO: 220201 - DNA, 25 bp, SARS Virus
atgatcatatttccttcttagcctg

SEQ ID NO: 220202 - DNA, 25 bp, SARS Virus
tgatcatattttcttcttagcctgt

SEQ ID NO: 220203 - DNA, 25 bp, SARS Virus
gatcatattttcctcttagcctgtg

SEQ ID NO: 220204 - DNA, 25 bp, SARS Virus
atcatattttctccttagcctgtgg

SEQ ID NO: 220205 - DNA, 25 bp, SARS Virus
tcatattttcttcttagcctgtggt

SEQ ID NO: 220206 - DNA, 25 bp, SARS Virus
catattttcttcctagcctgtggta

SEQ ID NO: 220207 - DNA, 25 bp, SARS Virus
atattttcttctcagcctgtggtat

SEQ ID NO: 220208 - DNA, 25 bp, SARS Virus
tattttcttcttcgcctgtggtatc

SEQ ID NO: 220209 - DNA, 25 bp, SARS Virus
attttcttcttaccctgtggtatca

SEQ ID NO: 220210 - DNA, 25 bp, SARS Virus
ttttcttcttagcctgtggtatcag

SEQ ID NO: 220211 - DNA, 25 bp, SARS Virus
tttcttcttagcctgtggtatcagt

SEQ ID NO: 220212 - DNA, 25 bp, SARS Virus
ttcttcttagcccgtggtatcagtt

SEQ ID NO: 220213 - DNA, 25 bp, SARS Virus
tcttcttagcctctggtatcagttg

SEQ ID NO: 220214 - DNA, 25 bp, SARS Virus
cttcttagcctgcggtatcagttgc

SEQ ID NO: 220215 - DNA, 25 bp, SARS Virus
ttcttagcctgtcgtatcagttgct

SEQ ID NO: 220216 - DNA, 25 bp, SARS Virus
tcttagcctgtgctatcagttgcta

SEQ ID NO: 220217 - DNA, 25 bp, SARS Virus
cttagcctgtggcatcagttgctac

SEQ ID NO: 220218 - DNA, 25 bp, SARS Virus
ttagcctgtggtctcagttgctacg

SEQ ID NO: 220219 - DNA, 25 bp, SARS Virus
tagcctgtggtaccagttgctacgg

SEQ ID NO: 220220 - DNA, 25 bp, SARS Virus
agcctgtggtatcagttgctacggg

SEQ ID NO: 220221 - DNA, 25 bp, SARS Virus
gcctgtggtatccgttgctacggga

SEQ ID NO: 220222 - DNA, 25 bp, SARS Virus
cctgtggtatcacttgctacgggag

SEQ ID NO: 220223 - DNA, 25 bp, SARS Virus
ctgtggtatcagctgctacgggaga

SEQ ID NO: 220224 - DNA, 25 bp, SARS Virus
tgtggtatcagtcgctacgggagaa

SEQ ID NO: 220225 - DNA, 25 bp, SARS Virus
gtggtatcagttcctacgggagaac

SEQ ID NO: 220226 - DNA, 25 bp, SARS Virus
tggtatcagttgctacgggagaact

SEQ ID NO: 220227 - DNA, 25 bp, SARS Virus
ggtatcagttgccacgggagaactt

SEQ ID NO: 220228 - DNA, 25 bp, SARS Virus
gtatcagttgctccgggagaactta

SEQ ID NO: 220229 - DNA, 25 bp, SARS Virus
tatcagttgctacgggagaacttaa

SEQ ID NO: 220230 - DNA, 25 bp, SARS Virus
atcagttgctaccggagaacttaaa

SEQ ID NO: 220231 - DNA, 25 bp, SARS Virus
tcagttgctacgcgagaacttaaaa

SEQ ID NO: 220232 - DNA, 25 bp, SARS Virus
cagttgctacggcagaacttaaaat

SEQ ID NO: 220233 - DNA, 25 bp, SARS Virus
agttgctacgggcgaacttaaaatt

SEQ ID NO: 220234 - DNA, 25 bp, SARS Virus
gttgctacgggacaacttaaaatta

SEQ ID NO: 220235 - DNA, 25 bp, SARS Virus
ttgctacgggagcacttaaaattaa

SEQ ID NO: 220236 - DNA, 25 bp, SARS Virus
tgctacgggagaccttaaaattaag

SEQ ID NO: 220237 - DNA, 25 bp, SARS Virus
gctacgggagaacttaaaattaagg

SEQ ID NO: 220238 - DNA, 25 bp, SARS Virus
ctacgggagaacctaaaattaagga

SEQ ID NO: 220239 - DNA, 25 bp, SARS Virus
tacgggagaactcaaaattaaggaa

SEQ ID NO: 220240 - DNA, 25 bp, SARS Virus
acgggagaacttcaaattaaggaaa

SEQ ID NO: 220241 - DNA, 25 bp, SARS Virus
cgggagaacttacaattaaggaaat

SEQ ID NO: 220242 - DNA, 25 bp, SARS Virus
gggagaacttaacattaaggaaata

SEQ ID NO: 220243 - DNA, 25 bp, SARS Virus
ggagaacttaaacttaaggaaatat

SEQ ID NO: 220244 - DNA, 25 bp, SARS Virus
gagaacttaaaactaaggaaatatg

SEQ ID NO: 220245 - DNA, 25 bp, SARS Virus
agaacttaaaatcaaggaaatatga

SEQ ID NO: 220246 - DNA, 25 bp, SARS Virus
gaacttaaaattcaggaaatatgaa

SEQ ID NO: 220247 - DNA, 25 bp, SARS Virus
aacttaaaattacggaaatatgaat

SEQ ID NO: 220248 - DNA, 25 bp, SARS Virus
acttaaaattaacgaaatatgaatg

SEQ ID NO: 220249 - DNA, 25 bp, SARS Virus
cttaaaattaagcaaatatgaatgc

SEQ ID NO: 220250 - DNA, 25 bp, SARS Virus
ttaaaattaaggcaatatgaatgca

SEQ ID NO: 220251 - DNA, 25 bp, SARS Virus
taaaattaaggacatatgaatgcaa

SEQ ID NO: 220252 - DNA, 25 bp, SARS Virus
aaaattaaggaactatgaatgcaac

SEQ ID NO: 220253 - DNA, 25 bp, SARS Virus
aaattaaggaaacatgaatgcaacc

SEQ ID NO: 220254 - DNA, 25 bp, SARS Virus
aattaaggaaatctgaatgcaacct

SEQ ID NO: 220255 - DNA, 25 bp, SARS Virus
attaaggaaatacgaatgcaaccta

SEQ ID NO: 220256 - DNA, 25 bp, SARS Virus
ttaaggaaatatcaatgcaacctac

SEQ ID NO: 220257 - DNA, 25 bp, SARS Virus
taaggaaatatgcatgcaacctacc

SEQ ID NO: 220258 - DNA, 25 bp, SARS Virus
aaggaaatatgactgcaacctacca

SEQ ID NO: 220259 - DNA, 25 bp, SARS Virus
aggaaatatgaacgcaacctaccaa

SEQ ID NO: 220260 - DNA, 25 bp, SARS Virus
ggaaatatgaatccaacctaccaac

SEQ ID NO: 220261 - DNA, 25 bp, SARS Virus
gaaatatgaatgcaacctaccaacg

SEQ ID NO: 220262 - DNA, 25 bp, SARS Virus
aaatatgaatgccacctaccaacgg

SEQ ID NO: 220263 - DNA, 25 bp, SARS Virus
aatatgaatgcaccctaccaacggt

SEQ ID NO: 220264 - DNA, 25 bp, SARS Virus
atatgaatgcaacctaccaacggta

SEQ ID NO: 220265 - DNA, 25 bp, SARS Virus
tatgaatgcaacctaccaacggtaa

SEQ ID NO: 220266 - DNA, 25 bp, SARS Virus
atgaatgcaacccaccaacggtaat

SEQ ID NO: 220267 - DNA, 25 bp, SARS Virus
tgaatgcaacctcccaacggtaata

SEQ ID NO: 220268 - DNA, 25 bp, SARS Virus
gaatgcaacctaccaacggtaatac

SEQ ID NO: 220269 - DNA, 25 bp, SARS Virus
aatgcaacctaccaacggtaatacc

SEQ ID NO: 220270 - DNA, 25 bp, SARS Virus
atgcaacctacccacggtaataccg

SEQ ID NO: 220271 - DNA, 25 bp, SARS Virus
tgcaacctaccaccggtaataccga

SEQ ID NO: 220272 - DNA, 25 bp, SARS Virus
gcaacctaccaacggtaataccgag

SEQ ID NO: 220273 - DNA, 25 bp, SARS Virus
caacctaccaaccgtaataccgaga

SEQ ID NO: 220274 - DNA, 25 bp, SARS Virus
aacctaccaacgctaataccgagat

SEQ ID NO: 220275 - DNA, 25 bp, SARS Virus
acctaccaacggcaataccgagatt

SEQ ID NO: 220276 - DNA, 25 bp, SARS Virus
cctaccaacggtcataccgagattg

SEQ ID NO: 220277 - DNA, 25 bp, SARS Virus
ctaccaacggtactaccgagattgt

SEQ ID NO: 220278 - DNA, 25 bp, SARS Virus
taccaacggtaacaccgagattgta

SEQ ID NO: 220279 - DNA, 25 bp, SARS Virus
accaacggtaatcccgagattgtag

SEQ ID NO: 220280 - DNA, 25 bp, SARS Virus
ccaacggtaataccgagattgtagg

SEQ ID NO: 220281 - DNA, 25 bp, SARS Virus
caacggtaataccgagattgtaggt

SEQ ID NO: 220282 - DNA, 25 bp, SARS Virus
aacggtaatacccagattgtaggta

SEQ ID NO: 220283 - DNA, 25 bp, SARS Virus
acggtaataccgcgattgtaggtac

SEQ ID NO: 220284 - DNA, 25 bp, SARS Virus
cggtaataccgacattgtaggtacg

SEQ ID NO: 220285 - DNA, 25 bp, SARS Virus
ggtaataccgagcttgtaggtacgt

SEQ ID NO: 220286 - DNA, 25 bp, SARS Virus
gtaataccgagactgtaggtacgta

SEQ ID NO: 220287 - DNA, 25 bp, SARS Virus
taataccgagatcgtaggtacgtat

SEQ ID NO: 220288 - DNA, 25 bp, SARS Virus
aataccgagattctaggtacgtata

SEQ ID NO: 220289 - DNA, 25 bp, SARS Virus
ataccgagattgcaggtacgtatat

SEQ ID NO: 220290 - DNA, 25 bp, SARS Virus
taccgagattgtcggtacgtatatc

SEQ ID NO: 220291 - DNA, 25 bp, SARS Virus
accgagattgtacgtacgtatatcc

SEQ ID NO: 220292 - DNA, 25 bp, SARS Virus
ccgagattgtagctacgtatatccg

SEQ ID NO: 220293 - DNA, 25 bp, SARS Virus
cgagattgtaggcacgtatatccgt

SEQ ID NO: 220294 - DNA, 25 bp, SARS Virus
gagattgtaggtccgtatatccgta

SEQ ID NO: 220295 - DNA, 25 bp, SARS Virus
agattgtaggtacgtatatccgtaa

SEQ ID NO: 220296 - DNA, 25 bp, SARS Virus
gattgtaggtacctatatccgtaat

SEQ ID NO: 220297 - DNA, 25 bp, SARS Virus
attgtaggtacgcatatccgtaatt

SEQ ID NO: 220298 - DNA, 25 bp, SARS Virus
ttgtaggtacgtctatccgtaatta

SEQ ID NO: 220299 - DNA, 25 bp, SARS Virus
tgtaggtacgtacatccgtaattaa

SEQ ID NO: 220300 - DNA, 25 bp, SARS Virus
gtaggtacgtatctccgtaattaaa

SEQ ID NO: 220301 - DNA, 25 bp, SARS Virus
taggtacgtatacccgtaattaaaa

SEQ ID NO: 220302 - DNA, 25 bp, SARS Virus
aggtacgtatatccgtaattaaaag

SEQ ID NO: 220303 - DNA, 25 bp, SARS Virus
ggtacgtatatccgtaattaaaaga

SEQ ID NO: 220304 - DNA, 25 bp, SARS Virus
gtacgtatatccctaattaaaagaa

SEQ ID NO: 220305 - DNA, 25 bp, SARS Virus
tacgtatatccgcaattaaaagaac

SEQ ID NO: 220306 - DNA, 25 bp, SARS Virus
acgtatatccgtcattaaaagaaca

SEQ ID NO: 220307 - DNA, 25 bp, SARS Virus
cgtatatccgtacttaaaagaacag

SEQ ID NO: 220308 - DNA, 25 bp, SARS Virus
gtatatccgtaactaaaagaacaga

SEQ ID NO: 220309 - DNA, 25 bp, SARS Virus
tatatccgtaatcaaaagaacagag

SEQ ID NO: 220310 - DNA, 25 bp, SARS Virus
atatccgtaattcaaagaacagaga

SEQ ID NO: 220311 - DNA, 25 bp, SARS Virus
tatccgtaattacaagaacagagaa

SEQ ID NO: 220312 - DNA, 25 bp, SARS Virus
atccgtaattaacagaacagagaag

SEQ ID NO: 220313 - DNA, 25 bp, SARS Virus
tccgtaattaaacgaacagagaagt

SEQ ID NO: 220314 - DNA, 25 bp, SARS Virus
ccgtaattaaaacaacagagaagtc

SEQ ID NO: 220315 - DNA, 25 bp, SARS Virus
cgtaattaaaagcacagagaagtcg

SEQ ID NO: 220316 - DNA, 25 bp, SARS Virus
gtaattaaaagaccagagaagtcgt

SEQ ID NO: 220317 - DNA, 25 bp, SARS Virus
taattaaaagaacagagaagtcgta

SEQ ID NO: 220318 - DNA, 25 bp, SARS Virus
aattaaaagaaccgagaagtcgtac

SEQ ID NO: 220319 - DNA, 25 bp, SARS Virus
attaaaagaacacagaagtcgtact

SEQ ID NO: 220320 - DNA, 25 bp, SARS Virus
ttaaaagaacagcgaagtcgtactc

SEQ ID NO: 220321 - DNA, 25 bp, SARS Virus
taaaagaacagacaagtcgtactcg

SEQ ID NO: 220322 - DNA, 25 bp, SARS Virus
aaaagaacagagcagtcgtactcgt

SEQ ID NO: 220323 - DNA, 25 bp, SARS Virus
aaagaacagagacgtcgtactcgtt

SEQ ID NO: 220324 - DNA, 25 bp, SARS Virus
aagaacagagaactcgtactcgttc

SEQ ID NO: 220325 - DNA, 25 bp, SARS Virus
agaacagagaagccgtactcgttcg

SEQ ID NO: 220326 - DNA, 25 bp, SARS Virus
gaacagagaagtcgtactcgttcgt

SEQ ID NO: 220327 - DNA, 25 bp, SARS Virus
aacagagaagtcctactcgttcgta

SEQ ID NO: 220328 - DNA, 25 bp, SARS Virus
acagagaagtcgcactcgttcgtaa

SEQ ID NO: 220329 - DNA, 25 bp, SARS Virus
cagagaagtcgtcctcgttcgtaaa

SEQ ID NO: 220330 - DNA, 25 bp, SARS Virus
agagaagtcgtactcgttcgtaaag

SEQ ID NO: 220331 - DNA, 25 bp, SARS Virus
gagaagtcgtacccgttcgtaaaga

SEQ ID NO: 220332 - DNA, 25 bp, SARS Virus
agaagtcgtactcgttcgtaaagag

SEQ ID NO: 220333 - DNA, 25 bp, SARS Virus
gaagtcgtactccttcgtaaagaga

SEQ ID NO: 220334 - DNA, 25 bp, SARS Virus
aagtcgtactcgctcgtaaagagag

SEQ ID NO: 220335 - DNA, 25 bp, SARS Virus
agtcgtactcgtccgtaaagagagt

SEQ ID NO: 220336 - DNA, 25 bp, SARS Virus
gtcgtactcgttcgtaaagagagtt

SEQ ID NO: 220337 - DNA, 25 bp, SARS Virus
tcgtactcgttcctaaagagagttt

SEQ ID NO: 220338 - DNA, 25 bp, SARS Virus
cgtactcgttcgcaaagagagttta

SEQ ID NO: 220339 - DNA, 25 bp, SARS Virus
gtactcgttcgtcaagagagtttaa

SEQ ID NO: 220340 - DNA, 25 bp, SARS Virus
tactcgttcgtacagagagtttaag

SEQ ID NO: 220341 - DNA, 25 bp, SARS Virus
actcgttcgtaacgagagtttaagg

SEQ ID NO: 220342 - DNA, 25 bp, SARS Virus
ctcgttcgtaaacagagtttaaggt

SEQ ID NO: 220343 - DNA, 25 bp, SARS Virus
tcgttcgtaaagcgagtttaaggtc

SEQ ID NO: 220344 - DNA, 25 bp, SARS Virus
cgttcgtaaagacagtttaaggtcc

SEQ ID NO: 220345 - DNA, 25 bp, SARS Virus
gttcgtaaagagcgtttaaggtcct

SEQ ID NO: 220346 - DNA, 25 bp, SARS Virus
ttcgtaaagagactttaaggtccta

SEQ ID NO: 220347 - DNA, 25 bp, SARS Virus
tcgtaaagagagcttaaggtcctat

SEQ ID NO: 220348 - DNA, 25 bp, SARS Virus
cgtaaagagagtctaaggtcctatg

SEQ ID NO: 220349 - DNA, 25 bp, SARS Virus
gtaaagagagttcaaggtcctatgt

SEQ ID NO: 220350 - DNA, 25 bp, SARS Virus
taaagagagtttcaggtcctatgtc

SEQ ID NO: 220351 - DNA, 25 bp, SARS Virus
aaagagagtttacggtcctatgtca

SEQ ID NO: 220352 - DNA, 25 bp, SARS Virus
aagagagtttaacgtcctatgtcaa

SEQ ID NO: 220353 - DNA, 25 bp, SARS Virus
agagagtttaagctcctatgtcaag

SEQ ID NO: 220354 - DNA, 25 bp, SARS Virus
gagagtttaaggccctatgtcaagg

SEQ ID NO: 220355 - DNA, 25 bp, SARS Virus
agagtttaaggtcctatgtcaagga

SEQ ID NO: 220356 - DNA, 25 bp, SARS Virus
gagtttaaggtcctatgtcaaggat

SEQ ID NO: 220357 - DNA, 25 bp, SARS Virus
agtttaaggtcccatgtcaaggatc

SEQ ID NO: 220358 - DNA, 25 bp, SARS Virus
gtttaaggtcctctgtcaaggatct

SEQ ID NO: 220359 - DNA, 25 bp, SARS Virus
tttaaggtcctacgtcaaggatctt

SEQ ID NO: 220360 - DNA, 25 bp, SARS Virus
ttaaggtcctatctcaaggatctta

SEQ ID NO: 220361 - DNA, 25 bp, SARS Virus
taaggtcctatgccaaggatcttag

SEQ ID NO: 220362 - DNA, 25 bp, SARS Virus
aaggtcctatgtcaaggatcttaga

SEQ ID NO: 220363 - DNA, 25 bp, SARS Virus
aggtcctatgtccaggatcttagag

SEQ ID NO: 220364 - DNA, 25 bp, SARS Virus
ggtcctatgtcacggatcttagaga

SEQ ID NO: 220365 - DNA, 25 bp, SARS Virus
gtcctatgtcaacgatcttagagaa

SEQ ID NO: 220366 - DNA, 25 bp, SARS Virus
tcctatgtcaagcatcttagagaag

SEQ ID NO: 220367 - DNA, 25 bp, SARS Virus
cctatgtcaaggctcttagagaagg

SEQ ID NO: 220368 - DNA, 25 bp, SARS Virus
ctatgtcaaggaccttagagaagga

SEQ ID NO: 220369 - DNA, 25 bp, SARS Virus
tatgtcaaggatcttagagaaggaa

SEQ ID NO: 220370 - DNA, 25 bp, SARS Virus
atgtcaaggatcctagagaaggaat

SEQ ID NO: 220371 - DNA, 25 bp, SARS Virus
tgtcaaggatctcagagaaggaatc

SEQ ID NO: 220372 - DNA, 25 bp, SARS Virus
gtcaaggatcttcgagaaggaatcg

SEQ ID NO: 220373 - DNA, 25 bp, SARS Virus
tcaaggatcttacagaaggaatcgt

SEQ ID NO: 220374 - DNA, 25 bp, SARS Virus
caaggatcttagcgaaggaatcgta

SEQ ID NO: 220375 - DNA, 25 bp, SARS Virus
aaggatcttagacaaggaatcgtaa

SEQ ID NO: 220376 - DNA, 25 bp, SARS Virus
aggatcttagagcaggaatcgtaat

SEQ ID NO: 220377 - DNA, 25 bp, SARS Virus
ggatcttagagacggaatcgtaatc

SEQ ID NO: 220378 - DNA, 25 bp, SARS Virus
gatcttagagaacgaatcgtaatcc

SEQ ID NO: 220379 - DNA, 25 bp, SARS Virus
atcttagagaagcaatcgtaatcca

SEQ ID NO: 220380 - DNA, 25 bp, SARS Virus
tcttagagaaggcatcgtaatccac

SEQ ID NO: 220381 - DNA, 25 bp, SARS Virus
cttagagaaggactcgtaatccacg

SEQ ID NO: 220382 - DNA, 25 bp, SARS Virus
ttagagaaggaaccgtaatccacga

SEQ ID NO: 220383 - DNA, 25 bp, SARS Virus
tagagaaggaatcgtaatccacgaa

SEQ ID NO: 220384 - DNA, 25 bp, SARS Virus
agagaaggaatcctaatccacgaag

SEQ ID NO: 220385 - DNA, 25 bp, SARS Virus
gagaaggaatcgcaatccacgaaga

SEQ ID NO: 220386 - DNA, 25 bp, SARS Virus
agaaggaatcgtcatccacgaagac

SEQ ID NO: 220387 - DNA, 25 bp, SARS Virus
gaaggaatcgtactccacgaagact

SEQ ID NO: 220388 - DNA, 25 bp, SARS Virus
aaggaatcgtaacccacgaagactt

SEQ ID NO: 220389 - DNA, 25 bp, SARS Virus
aggaatcgtaatccacgaagacttc

SEQ ID NO: 220390 - DNA, 25 bp, SARS Virus
ggaatcgtaatccacgaagacttcc

SEQ ID NO: 220391 - DNA, 25 bp, SARS Virus
gaatcgtaatccccgaagacttcca

SEQ ID NO: 220392 - DNA, 25 bp, SARS Virus
aatcgtaatccacgaagacttccat

SEQ ID NO: 220393 - DNA, 25 bp, SARS Virus
atcgtaatccaccaagacttccatc

SEQ ID NO: 220394 - DNA, 25 bp, SARS Virus
tcgtaatccacgcagacttccatca

SEQ ID NO: 220395 - DNA, 25 bp, SARS Virus
cgtaatccacgacgacttccatcat

SEQ ID NO: 220396 - DNA, 25 bp, SARS Virus
gtaatccacgaacacttccatcatg

SEQ ID NO: 220397 - DNA, 25 bp, SARS Virus
taatccacgaagccttccatcatgt

SEQ ID NO: 220398 - DNA, 25 bp, SARS Virus
aatccacgaagacttccatcatgta

SEQ ID NO: 220399 - DNA, 25 bp, SARS Virus
atccacgaagacctccatcatgtat

SEQ ID NO: 220400 - DNA, 25 bp, SARS Virus
tccacgaagactcccatcatgtatt

SEQ ID NO: 220401 - DNA, 25 bp, SARS Virus
ccacgaagacttccatcatgtattt

SEQ ID NO: 220402 - DNA, 25 bp, SARS Virus
cacgaagacttccatcatgtatttt

SEQ ID NO: 220403 - DNA, 25 bp, SARS Virus
acgaagacttccctcatgtatttta

SEQ ID NO: 220404 - DNA, 25 bp, SARS Virus
cgaagacttccaccatgtattttac

SEQ ID NO: 220405 - DNA, 25 bp, SARS Virus
gaagacttccatcatgtattttacg

SEQ ID NO: 220406 - DNA, 25 bp, SARS Virus
aagacttccatcctgtattttacgt

SEQ ID NO: 220407 - DNA, 25 bp, SARS Virus
agacttccatcacgtattttacgtc

SEQ ID NO: 220408 - DNA, 25 bp, SARS Virus
gacttccatcatctattttacgtct

SEQ ID NO: 220409 - DNA, 25 bp, SARS Virus
acttccatcatgcattttacgtcta

SEQ ID NO: 220410 - DNA, 25 bp, SARS Virus
cttccatcatgtcttttacgtctaa

SEQ ID NO: 220411 - DNA, 25 bp, SARS Virus
ttccatcatgtactttacgtctaaa

SEQ ID NO: 220412 - DNA, 25 bp, SARS Virus
tccatcatgtatcttacgtctaaac

SEQ ID NO: 220413 - DNA, 25 bp, SARS Virus
ccatcatgtattctacgtctaaacg

SEQ ID NO: 220414 - DNA, 25 bp, SARS Virus
catcatgtatttcacgtctaaacgt

SEQ ID NO: 220415 - DNA, 25 bp, SARS Virus
atcatgtattttccgtctaaacgta

SEQ ID NO: 220416 - DNA, 25 bp, SARS Virus
tcatgtattttacgtctaaacgtaa

SEQ ID NO: 220417 - DNA, 25 bp, SARS Virus
catgtattttacctctaaacgtaaa

SEQ ID NO: 220418 - DNA, 25 bp, SARS Virus
atgtattttacgcctaaacgtaaag

SEQ ID NO: 220419 - DNA, 25 bp, SARS Virus
tgtattttacgtctaaacgtaaaga

SEQ ID NO: 220420 - DNA, 25 bp, SARS Virus
gtattttacgtccaaacgtaaagaa

SEQ ID NO: 220421 - DNA, 25 bp, SARS Virus
tattttacgtctcaacgtaaagaat

SEQ ID NO: 220422 - DNA, 25 bp, SARS Virus
attttacgtctacacgtaaagaatt

SEQ ID NO: 220423 - DNA, 25 bp, SARS Virus
ttttacgtctaaccgtaaagaattc

SEQ ID NO: 220424 - DNA, 25 bp, SARS Virus
tttacgtctaaacgtaaagaattct

SEQ ID NO: 220425 - DNA, 25 bp, SARS Virus
ttacgtctaaacctaaagaattctc

SEQ ID NO: 220426 - DNA, 25 bp, SARS Virus
tacgtctaaacgcaaagaattctcg

SEQ ID NO: 220427 - DNA, 25 bp, SARS Virus
acgtctaaacgtcaagaattctcgt

SEQ ID NO: 220428 - DNA, 25 bp, SARS Virus
cgtctaaacgtacagaattctcgtc

SEQ ID NO: 220429 - DNA, 25 bp, SARS Virus
gtctaaacgtaacgaattctcgtca

SEQ ID NO: 220430 - DNA, 25 bp, SARS Virus
tctaaacgtaaacaattctcgtcag

SEQ ID NO: 220431 - DNA, 25 bp, SARS Virus
ctaaacgtaaagcattctcgtcaga

SEQ ID NO: 220432 - DNA, 25 bp, SARS Virus
taaacgtaaagacttctcgtcagaa

SEQ ID NO: 220433 - DNA, 25 bp, SARS Virus
aaacgtaaagaactctcgtcagaat

SEQ ID NO: 220434 - DNA, 25 bp, SARS Virus
aacgtaaagaatcctcgtcagaatc

SEQ ID NO: 220435 - DNA, 25 bp, SARS Virus
acgtaaagaattctcgtcagaatcg

SEQ ID NO: 220436 - DNA, 25 bp, SARS Virus
cgtaaagaattcccgtcagaatcga

SEQ ID NO: 220437 - DNA, 25 bp, SARS Virus
gtaaagaattctcgtcagaatcgaa

SEQ ID NO: 220438 - DNA, 25 bp, SARS Virus
taaagaattctcctcagaatcgaag

SEQ ID NO: 220439 - DNA, 25 bp, SARS Virus
aaagaattctcgccagaatcgaagg

SEQ ID NO: 220440 - DNA, 25 bp, SARS Virus
aagaattctcgtcagaatcgaagga

SEQ ID NO: 220441 - DNA, 25 bp, SARS Virus
agaattctcgtccgaatcgaaggag

SEQ ID NO: 220442 - DNA, 25 bp, SARS Virus
gaattctcgtcacaatcgaaggagt

SEQ ID NO: 220443 - DNA, 25 bp, SARS Virus
aattctcgtcagcatcgaaggagtt

SEQ ID NO: 220444 - DNA, 25 bp, SARS Virus
attctcgtcagactcgaaggagttc

SEQ ID NO: 220445 - DNA, 25 bp, SARS Virus
ttctcgtcagaaccgaaggagttca

SEQ ID NO: 220446 - DNA, 25 bp, SARS Virus
tctcgtcagaatcgaaggagttcac

SEQ ID NO: 220447 - DNA, 25 bp, SARS Virus
ctcgtcagaatccaaggagttcaca

SEQ ID NO: 220448 - DNA, 25 bp, SARS Virus
tcgtcagaatcgcaggagttcacat

SEQ ID NO: 220449 - DNA, 25 bp, SARS Virus
cgtcagaatcgacggagttcacata

SEQ ID NO: 220450 - DNA, 25 bp, SARS Virus
gtcagaatcgaacgagttcacatat

SEQ ID NO: 220451 - DNA, 25 bp, SARS Virus
tcagaatcgaagcagttcacatatt

SEQ ID NO: 220452 - DNA, 25 bp, SARS Virus
cagaatcgaaggcgttcacatattg

SEQ ID NO: 220453 - DNA, 25 bp, SARS Virus
agaatcgaaggacttcacatattgg

SEQ ID NO: 220454 - DNA, 25 bp, SARS Virus
gaatcgaaggagctcacatattggt

SEQ ID NO: 220455 - DNA, 25 bp, SARS Virus
aatcgaaggagtccacatattggtc

SEQ ID NO: 220456 - DNA, 25 bp, SARS Virus
atcgaaggagttcacatattggtcg

SEQ ID NO: 220457 - DNA, 25 bp, SARS Virus
tcgaaggagttcccatattggtcgt

SEQ ID NO: 220458 - DNA, 25 bp, SARS Virus
cgaaggagttcacatattggtcgtg

SEQ ID NO: 220459 - DNA, 25 bp, SARS Virus
gaaggagttcacctattggtcgtgt

SEQ ID NO: 220460 - DNA, 25 bp, SARS Virus
aaggagttcacacattggtcgtgta

SEQ ID NO: 220461 - DNA, 25 bp, SARS Virus
aggagttcacatcttggtcgtgtag

SEQ ID NO: 220462 - DNA, 25 bp, SARS Virus
ggagttcacatactggtcgtgtagg

SEQ ID NO: 220463 - DNA, 25 bp, SARS Virus
gagttcacatatcggtcgtgtagga

SEQ ID NO: 220464 - DNA, 25 bp, SARS Virus
agttcacatattcgtcgtgtaggaa

SEQ ID NO: 220465 - DNA, 25 bp, SARS Virus
gttcacatattgctcgtgtaggaac

SEQ ID NO: 220466 - DNA, 25 bp, SARS Virus
ttcacatattggccgtgtaggaaca

SEQ ID NO: 220467 - DNA, 25 bp, SARS Virus
tcacatattggtcgtgtaggaacag

SEQ ID NO: 220468 - DNA, 25 bp, SARS Virus
cacatattggtcctgtaggaacagg

SEQ ID NO: 220469 - DNA, 25 bp, SARS Virus
acatattggtcgcgtaggaacaggt

SEQ ID NO: 220470 - DNA, 25 bp, SARS Virus
catattggtcgtctaggaacaggtc

SEQ ID NO: 220471 - DNA, 25 bp, SARS Virus
atattggtcgtgcaggaacaggtcc

SEQ ID NO: 220472 - DNA, 25 bp, SARS Virus
tattggtcgtgtcggaacaggtccc

SEQ ID NO: 220473 - DNA, 25 bp, SARS Virus
attggtcgtgtacgaacaggtccca

SEQ ID NO: 220474 - DNA, 25 bp, SARS Virus
ttggtcgtgtagcaacaggtcccat

SEQ ID NO: 220475 - DNA, 25 bp, SARS Virus
tggtcgtgtaggcacaggtcccatg

SEQ ID NO: 220476 - DNA, 25 bp, SARS Virus
ggtcgtgtaggaccaggtcccatgc

SEQ ID NO: 220477 - DNA, 25 bp, SARS Virus
gtcgtgtaggaacaggtcccatgca

SEQ ID NO: 220478 - DNA, 25 bp, SARS Virus
tcgtgtaggaaccggtcccatgcac

SEQ ID NO: 220479 - DNA, 25 bp, SARS Virus
cgtgtaggaacacgtcccatgcacc

SEQ ID NO: 220480 - DNA, 25 bp, SARS Virus
gtgtaggaacagctcccatgcacca

SEQ ID NO: 220481 - DNA, 25 bp, SARS Virus
tgtaggaacaggccccatgcaccaa

SEQ ID NO: 220482 - DNA, 25 bp, SARS Virus
gtaggaacaggtcccatgcaccaat

SEQ ID NO: 220483 - DNA, 25 bp, SARS Virus
taggaacaggtcccatgcaccaata

SEQ ID NO: 220484 - DNA, 25 bp, SARS Virus
aggaacaggtcccatgcaccaatat

SEQ ID NO: 220485 - DNA, 25 bp, SARS Virus
ggaacaggtcccctgcaccaatata

SEQ ID NO: 220486 - DNA, 25 bp, SARS Virus
gaacaggtcccacgcaccaatatat

SEQ ID NO: 220487 - DNA, 25 bp, SARS Virus
aacaggtcccatccaccaatatatg

SEQ ID NO: 220488 - DNA, 25 bp, SARS Virus
acaggtcccatgcaccaatatatga

SEQ ID NO: 220489 - DNA, 25 bp, SARS Virus
caggtcccatgccccaatatatgag

SEQ ID NO: 220490 - DNA, 25 bp, SARS Virus
aggtcccatgcaccaatatatgagt

SEQ ID NO: 220491 - DNA, 25 bp, SARS Virus
ggtcccatgcaccaatatatgagta

SEQ ID NO: 220492 - DNA, 25 bp, SARS Virus
gtcccatgcacccatatatgagtag

SEQ ID NO: 220493 - DNA, 25 bp, SARS Virus
tcccatgcaccactatatgagtagt

SEQ ID NO: 220494 - DNA, 25 bp, SARS Virus
cccatgcaccaacatatgagtagtt

SEQ ID NO: 220495 - DNA, 25 bp, SARS Virus
ccatgcaccaatctatgagtagttg

SEQ ID NO: 220496 - DNA, 25 bp, SARS Virus
catgcaccaatacatgagtagttga

SEQ ID NO: 220497 - DNA, 25 bp, SARS Virus
atgcaccaatatctgagtagttgac

SEQ ID NO: 220498 - DNA, 25 bp, SARS Virus
tgcaccaatatacgagtagttgacc

SEQ ID NO: 220499 - DNA, 25 bp, SARS Virus
gcaccaatatatcagtagttgaccg

SEQ ID NO: 220500 - DNA, 25 bp, SARS Virus
caccaatatatgcgtagttgaccgt

SEQ ID NO: 220501 - DNA, 25 bp, SARS Virus
accaatatatgactagttgaccgtg

SEQ ID NO: 220502 - DNA, 25 bp, SARS Virus
ccaatatatgagcagttgaccgtga

SEQ ID NO: 220503 - DNA, 25 bp, SARS Virus
caatatatgagtcgttgaccgtgaa

SEQ ID NO: 220504 - DNA, 25 bp, SARS Virus
aatatatgagtacttgaccgtgaaa

SEQ ID NO: 220505 - DNA, 25 bp, SARS Virus
atatatgagtagctgaccgtgaaag

SEQ ID NO: 220506 - DNA, 25 bp, SARS Virus
tatatgagtagtcgaccgtgaaaga

SEQ ID NO: 220507 - DNA, 25 bp, SARS Virus
atatgagtagttcaccgtgaaagaa

SEQ ID NO: 220508 - DNA, 25 bp, SARS Virus
tatgagtagttgcccgtgaaagaag

SEQ ID NO: 220509 - DNA, 25 bp, SARS Virus
atgagtagttgaccgtgaaagaagt

SEQ ID NO: 220510 - DNA, 25 bp, SARS Virus
tgagtagttgaccgtgaaagaagtt

SEQ ID NO: 220511 - DNA, 25 bp, SARS Virus
gagtagttgaccctgaaagaagttt

SEQ ID NO: 220512 - DNA, 25 bp, SARS Virus
agtagttgaccgcgaaagaagtttc

SEQ ID NO: 220513 - DNA, 25 bp, SARS Virus
gtagttgaccgtcaaagaagtttcg

SEQ ID NO: 220514 - DNA, 25 bp, SARS Virus
tagttgaccgtgcaagaagtttcga

SEQ ID NO: 220515 - DNA, 25 bp, SARS Virus
agttgaccgtgacagaagtttcgag

SEQ ID NO: 220516 - DNA, 25 bp, SARS Virus
gttgaccgtgaacgaagtttcgaga

SEQ ID NO: 220517 - DNA, 25 bp, SARS Virus
ttgaccgtgaaacaagtttcgagaa

SEQ ID NO: 220518 - DNA, 25 bp, SARS Virus
tgaccgtgaaagcagtttcgagaac

SEQ ID NO: 220519 - DNA, 25 bp, SARS Virus
gaccgtgaaagacgtttcgagaact

SEQ ID NO: 220520 - DNA, 25 bp, SARS Virus
accgtgaaagaactttcgagaactc

SEQ ID NO: 220521 - DNA, 25 bp, SARS Virus
ccgtgaaagaagcttcgagaactct

SEQ ID NO: 220522 - DNA, 25 bp, SARS Virus
cgtgaaagaagtctcgagaactctc

SEQ ID NO: 220523 - DNA, 25 bp, SARS Virus
gtgaaagaagttccgagaactctcg

SEQ ID NO: 220524 - DNA, 25 bp, SARS Virus
tgaaagaagtttcgagaactctcgt

SEQ ID NO: 220525 - DNA, 25 bp, SARS Virus
gaaagaagtttccagaactctcgta

SEQ ID NO: 220526 - DNA, 25 bp, SARS Virus
aaagaagtttcgcgaactctcgtag

SEQ ID NO: 220527 - DNA, 25 bp, SARS Virus
aagaagtttcgacaactctcgtaga

SEQ ID NO: 220528 - DNA, 25 bp, SARS Virus
agaagtttcgagcactctcgtagag

SEQ ID NO: 220529 - DNA, 25 bp, SARS Virus
gaagtttcgagacctctcgtagagt

SEQ ID NO: 220530 - DNA, 25 bp, SARS Virus
aagtttcgagaactctcgtagagtc

SEQ ID NO: 220531 - DNA, 25 bp, SARS Virus
agtttcgagaaccctcgtagagtca

SEQ ID NO: 220532 - DNA, 25 bp, SARS Virus
gtttcgagaactctcgtagagtcat

SEQ ID NO: 220533 - DNA, 25 bp, SARS Virus
tttcgagaactcccgtagagtcatc

SEQ ID NO: 220534 - DNA, 25 bp, SARS Virus
ttcgagaactctcgtagagtcatca

SEQ ID NO: 220535 - DNA, 25 bp, SARS Virus
tcgagaactctcctagagtcatcac

SEQ ID NO: 220536 - DNA, 25 bp, SARS Virus
cgagaactctcgcagagtcatcacg

SEQ ID NO: 220537 - DNA, 25 bp, SARS Virus
gagaactctcgtcgagtcatcacgg

SEQ ID NO: 220538 - DNA, 25 bp, SARS Virus
agaactctcgtacagtcatcacggt

SEQ ID NO: 220539 - DNA, 25 bp, SARS Virus
gaactctcgtagcgtcatcacggtg

SEQ ID NO: 220540 - DNA, 25 bp, SARS Virus
aactctcgtagactcatcacggtgg

SEQ ID NO: 220541 - DNA, 25 bp, SARS Virus
actctcgtagagccatcacggtggt

SEQ ID NO: 220542 - DNA, 25 bp, SARS Virus
ctctcgtagagtcatcacggtggtc

SEQ ID NO: 220543 - DNA, 25 bp, SARS Virus
tctcgtagagtcctcacggtggtcg

SEQ ID NO: 220544 - DNA, 25 bp, SARS Virus
ctcgtagagtcaccacggtggtcgg

SEQ ID NO: 220545 - DNA, 25 bp, SARS Virus
tcgtagagtcatcacggtggtcgga

SEQ ID NO: 220546 - DNA, 25 bp, SARS Virus
cgtagagtcatcccggtggtcggaa

SEQ ID NO: 220547 - DNA, 25 bp, SARS Virus
gtagagtcatcacggtggtcggaaa

SEQ ID NO: 220548 - DNA, 25 bp, SARS Virus
tagagtcatcaccgtggtcggaaaa

SEQ ID NO: 220549 - DNA, 25 bp, SARS Virus
agagtcatcacgctggtcggaaaaa

SEQ ID NO: 220550 - DNA, 25 bp, SARS Virus
gagtcatcacggcggtcggaaaaac

SEQ ID NO: 220551 - DNA, 25 bp, SARS Virus
agtcatcacggtcgtcggaaaaacc

SEQ ID NO: 220552 - DNA, 25 bp, SARS Virus
gtcatcacggtgctcggaaaaacct

SEQ ID NO: 220553 - DNA, 25 bp, SARS Virus
tcatcacggtggccggaaaaacctc

SEQ ID NO: 220554 - DNA, 25 bp, SARS Virus
catcacggtggtcggaaaaacctcc

SEQ ID NO: 220555 - DNA, 25 bp, SARS Virus
atcacggtggtccgaaaaacctccc

SEQ ID NO: 220556 - DNA, 25 bp, SARS Virus
tcacggtggtcgcaaaaacctccca

SEQ ID NO: 220557 - DNA, 25 bp, SARS Virus
cacggtggtcggcaaaacctcccat

SEQ ID NO: 220558 - DNA, 25 bp, SARS Virus
acggtggtcggacaaacctcccata

SEQ ID NO: 220559 - DNA, 25 bp, SARS Virus
cggtggtcggaacaacctcccataa

SEQ ID NO: 220560 - DNA, 25 bp, SARS Virus
ggtggtcggaaacacctcccataat

SEQ ID NO: 220561 - DNA, 25 bp, SARS Virus
gtggtcggaaaaccctcccataatg

SEQ ID NO: 220562 - DNA, 25 bp, SARS Virus
tggtcggaaaaacctcccataatgt

SEQ ID NO: 220563 - DNA, 25 bp, SARS Virus
ggtcggaaaaacctcccataatgtt

SEQ ID NO: 220564 - DNA, 25 bp, SARS Virus
gtcggaaaaaccccccataatgttg

SEQ ID NO: 220565 - DNA, 25 bp, SARS Virus
tcggaaaaacctcccataatgttgt

SEQ ID NO: 220566 - DNA, 25 bp, SARS Virus
cggaaaaacctcccataatgttgtg

SEQ ID NO: 220567 - DNA, 25 bp, SARS Virus
ggaaaaacctcccataatgttgtgt

SEQ ID NO: 220568 - DNA, 25 bp, SARS Virus
gaaaaacctcccctaatgttgtgtt

SEQ ID NO: 220569 - DNA, 25 bp, SARS Virus
aaaaacctcccacaatgttgtgttc

SEQ ID NO: 220570 - DNA, 25 bp, SARS Virus
aaaacctcccatcatgttgtgttca

SEQ ID NO: 220571 - DNA, 25 bp, SARS Virus
aaacctcccatactgttgtgttcac

SEQ ID NO: 220572 - DNA, 25 bp, SARS Virus
aacctcccataacgttgtgttcact

SEQ ID NO: 220573 - DNA, 25 bp, SARS Virus
acctcccataatcttgtgttcacta

SEQ ID NO: 220574 - DNA, 25 bp, SARS Virus
cctcccataatgctgtgttcactat

SEQ ID NO: 220575 - DNA, 25 bp, SARS Virus
ctcccataatgtcgtgttcactata

SEQ ID NO: 220576 - DNA, 25 bp, SARS Virus
tcccataatgttctgttcactatag

SEQ ID NO: 220577 - DNA, 25 bp, SARS Virus
cccataatgttgcgttcactatagt

SEQ ID NO: 220578 - DNA, 25 bp, SARS Virus
ccataatgttgtcttcactatagtg

SEQ ID NO: 220579 - DNA, 25 bp, SARS Virus
cataatgttgtgctcactatagtgg

SEQ ID NO: 220580 - DNA, 25 bp, SARS Virus
ataatgttgtgtccactatagtggt

SEQ ID NO: 220581 - DNA, 25 bp, SARS Virus
taatgttgtgttcactatagtggtg

SEQ ID NO: 220582 - DNA, 25 bp, SARS Virus
aatgttgtgttccctatagtggtga

SEQ ID NO: 220583 - DNA, 25 bp, SARS Virus
atgttgtgttcactatagtggtgat

SEQ ID NO: 220584 - DNA, 25 bp, SARS Virus
tgttgtgttcaccatagtggtgatc

SEQ ID NO: 220585 - DNA, 25 bp, SARS Virus
gttgtgttcactctagtggtgatca

SEQ ID NO: 220586 - DNA, 25 bp, SARS Virus
ttgtgttcactacagtggtgatcac

SEQ ID NO: 220587 - DNA, 25 bp, SARS Virus
tgtgttcactatcgtggtgatcact

SEQ ID NO: 220588 - DNA, 25 bp, SARS Virus
gtgttcactatactggtgatcacta

SEQ ID NO: 220589 - DNA, 25 bp, SARS Virus
tgttcactatagcggtgatcactat

SEQ ID NO: 220590 - DNA, 25 bp, SARS Virus
gttcactatagtcgtgatcactatt

SEQ ID NO: 220591 - DNA, 25 bp, SARS Virus
ttcactatagtgctgatcactattg

SEQ ID NO: 220592 - DNA, 25 bp, SARS Virus
tcactatagtggcgatcactattgt

SEQ ID NO: 220593 - DNA, 25 bp, SARS Virus
cactatagtggtcatcactattgta

SEQ ID NO: 220594 - DNA, 25 bp, SARS Virus
actatagtggtgctcactattgtag

SEQ ID NO: 220595 - DNA, 25 bp, SARS Virus
ctatagtggtgaccactattgtagt

SEQ ID NO: 220596 - DNA, 25 bp, SARS Virus
tatagtggtgatcactattgtagtg

SEQ ID NO: 220597 - DNA, 25 bp, SARS Virus
atagtggtgatccctattgtagtgg

SEQ ID NO: 220598 - DNA, 25 bp, SARS Virus
tagtggtgatcactattgtagtgga

SEQ ID NO: 220599 - DNA, 25 bp, SARS Virus
agtggtgatcaccattgtagtggat

SEQ ID NO: 220600 - DNA, 25 bp, SARS Virus
gtggtgatcactcttgtagtggatg

SEQ ID NO: 220601 - DNA, 25 bp, SARS Virus
tggtgatcactactgtagtggatgg

SEQ ID NO: 220602 - DNA, 25 bp, SARS Virus
ggtgatcactatcgtagtggatggt

SEQ ID NO: 220603 - DNA, 25 bp, SARS Virus
gtgatcactattctagtggatggta

SEQ ID NO: 220604 - DNA, 25 bp, SARS Virus
tgatcactattgcagtggatggtac

SEQ ID NO: 220605 - DNA, 25 bp, SARS Virus
gatcactattgtcgtggatggtaca

SEQ ID NO: 220606 - DNA, 25 bp, SARS Virus
atcactattgtactggatggtacat

SEQ ID NO: 220607 - DNA, 25 bp, SARS Virus
tcactattgtagcggatggtacatt

SEQ ID NO: 220608 - DNA, 25 bp, SARS Virus
cactattgtagtcgatggtacattc

SEQ ID NO: 220609 - DNA, 25 bp, SARS Virus
acagtgtattgggtaaccgtaacac

SEQ ID NO: 220610 - DNA, 25 bp, SARS Virus
cagtgtattggtgaaccgtaacact

SEQ ID NO: 220611 - DNA, 25 bp, SARS Virus
agtgtattggttgaccgtaacactg

SEQ ID NO: 220612 - DNA, 25 bp, SARS Virus
gtgtattggttagccgtaacactgt

SEQ ID NO: 220613 - DNA, 25 bp, SARS Virus
tgtattggttaagcgtaacactgtt

SEQ ID NO: 220614 - DNA, 25 bp, SARS Virus
gtattggttaacggtaacactgttc

SEQ ID NO: 220615 - DNA, 25 bp, SARS Virus
tattggttaaccgtaacactgttcg

SEQ ID NO: 220616 - DNA, 25 bp, SARS Virus
attggttaaccggaacactgttcgc

SEQ ID NO: 220617 - DNA, 25 bp, SARS Virus
ttggttaaccgtgacactgttcgcc

SEQ ID NO: 220618 - DNA, 25 bp, SARS Virus
tggttaaccgtagcactgttcgccg

SEQ ID NO: 220619 - DNA, 25 bp, SARS Virus
ggttaaccgtaagactgttcgccga

SEQ ID NO: 220620 - DNA, 25 bp, SARS Virus
gttaaccgtaacgctgttcgccgag

SEQ ID NO: 220621 - DNA, 25 bp, SARS Virus
ttaaccgtaacagtgttcgccgagt

SEQ ID NO: 220622 - DNA, 25 bp, SARS Virus
taaccgtaacacggttcgccgagta

SEQ ID NO: 220623 - DNA, 25 bp, SARS Virus
aaccgtaacactgttcgccgagtaa

SEQ ID NO: 220624 - DNA, 25 bp, SARS Virus
accgtaacactggtcgccgagtaaa

SEQ ID NO: 220625 - DNA, 25 bp, SARS Virus
ccgtaacactgtgcgccgagtaaat

SEQ ID NO: 220626 - DNA, 25 bp, SARS Virus
cgtaacactgttggccgagtaaatc

SEQ ID NO: 220627 - DNA, 25 bp, SARS Virus
gtaacactgttcgccgagtaaatct

SEQ ID NO: 220628 - DNA, 25 bp, SARS Virus
taacactgttcggcgagtaaatctc

SEQ ID NO: 220629 - DNA, 25 bp, SARS Virus
aacactgttcgcggagtaaatctct

SEQ ID NO: 220630 - DNA, 25 bp, SARS Virus
acactgttcgccgagtaaatctctc

SEQ ID NO: 220631 - DNA, 25 bp, SARS Virus
cactgttcgccgggtaaatctctca

SEQ ID NO: 220632 - DNA, 25 bp, SARS Virus
actgttcgccgagtaaatctctcaa

SEQ ID NO: 220633 - DNA, 25 bp, SARS Virus
ctgttcgccgaggaaatctctcaag

SEQ ID NO: 220634 - DNA, 25 bp, SARS Virus
tgttcgccgagtgaatctctcaagt

SEQ ID NO: 220635 - DNA, 25 bp, SARS Virus
gttcgccgagtagatctctcaagtc

SEQ ID NO: 220636 - DNA, 25 bp, SARS Virus
ttcgccgagtaagtctctcaagtcg

SEQ ID NO: 220637 - DNA, 25 bp, SARS Virus
tcgccgagtaaagctctcaagtcga

SEQ ID NO: 220638 - DNA, 25 bp, SARS Virus
cgccgagtaaatgtctcaagtcgaa

SEQ ID NO: 220639 - DNA, 25 bp, SARS Virus
gccgagtaaatcgctcaagtcgaag

SEQ ID NO: 220640 - DNA, 25 bp, SARS Virus
ccgagtaaatctgtcaagtcgaagc

SEQ ID NO: 220641 - DNA, 25 bp, SARS Virus
cgagtaaatctcgcaagtcgaagca

SEQ ID NO: 220642 - DNA, 25 bp, SARS Virus
gagtaaatctctgaagtcgaagcat

SEQ ID NO: 220643 - DNA, 25 bp, SARS Virus
agtaaatctctcgagtcgaagcatt

SEQ ID NO: 220644 - DNA, 25 bp, SARS Virus
gtaaatctctcaggtcgaagcatta

SEQ ID NO: 220645 - DNA, 25 bp, SARS Virus
taaatctctcaagtcgaagcattat

SEQ ID NO: 220646 - DNA, 25 bp, SARS Virus
aaatctctcaaggcgaagcattatt

SEQ ID NO: 220647 - DNA, 25 bp, SARS Virus
aatctctcaagtggaagcattatta

SEQ ID NO: 220648 - DNA, 25 bp, SARS Virus
atctctcaagtcgaagcattattat

SEQ ID NO: 220649 - DNA, 25 bp, SARS Virus
tctctcaagtcggagcattattatc

SEQ ID NO: 220650 - DNA, 25 bp, SARS Virus
ctctcaagtcgaggcattattatct

SEQ ID NO: 220651 - DNA, 25 bp, SARS Virus
tctcaagtcgaagcattattatctt

SEQ ID NO: 220652 - DNA, 25 bp, SARS Virus
ctcaagtcgaaggattattatcttc

SEQ ID NO: 220653 - DNA, 25 bp, SARS Virus
tcaagtcgaagcgttattatcttcg

SEQ ID NO: 220654 - DNA, 25 bp, SARS Virus
caagtcgaagcagtattatcttcga

SEQ ID NO: 220655 - DNA, 25 bp, SARS Virus
aagtcgaagcatgattatcttcgat

SEQ ID NO: 220656 - DNA, 25 bp, SARS Virus
agtcgaagcattgttatcttcgatg

SEQ ID NO: 220657 - DNA, 25 bp, SARS Virus
gtcgaagcattagtatcttcgatgt

SEQ ID NO: 220658 - DNA, 25 bp, SARS Virus
tcgaagcattatgatcttcgatgtc

SEQ ID NO: 220659 - DNA, 25 bp, SARS Virus
cgaagcattattgtcttcgatgtcc

SEQ ID NO: 220660 - DNA, 25 bp, SARS Virus
gaagcattattagcttcgatgtccg

SEQ ID NO: 220661 - DNA, 25 bp, SARS Virus
aagcattattatgttcgatgtccga

SEQ ID NO: 220662 - DNA, 25 bp, SARS Virus
agcattattatcgtcgatgtccgag

SEQ ID NO: 220663 - DNA, 25 bp, SARS Virus
gcattattatctgcgatgtccgaga

SEQ ID NO: 220664 - DNA, 25 bp, SARS Virus
cattattatcttggatgtccgagaa

SEQ ID NO: 220665 - DNA, 25 bp, SARS Virus
attattatcttcgatgtccgagaaa

SEQ ID NO: 220666 - DNA, 25 bp, SARS Virus
ttattatcttcggtgtccgagaaat

SEQ ID NO: 220667 - DNA, 25 bp, SARS Virus
tattatcttcgaggtccgagaaatg

SEQ ID NO: 220668 - DNA, 25 bp, SARS Virus
attatcttcgatgtccgagaaatga

SEQ ID NO: 220669 - DNA, 25 bp, SARS Virus
ttatcttcgatggccgagaaatgat

SEQ ID NO: 220670 - DNA, 25 bp, SARS Virus
tatcttcgatgtgcgagaaatgatc

SEQ ID NO: 220671 - DNA, 25 bp, SARS Virus
atcttcgatgtcggagaaatgatca

SEQ ID NO: 220672 - DNA, 25 bp, SARS Virus
tcttcgatgtccgagaaatgatcat

SEQ ID NO: 220673 - DNA, 25 bp, SARS Virus
cttcgatgtccgggaaatgatcata

SEQ ID NO: 220674 - DNA, 25 bp, SARS Virus
ttcgatgtccgagaaatgatcatat

SEQ ID NO: 220675 - DNA, 25 bp, SARS Virus
tcgatgtccgaggaatgatcatatt

SEQ ID NO: 220676 - DNA, 25 bp, SARS Virus
cgatgtccgagagatgatcatattt

SEQ ID NO: 220677 - DNA, 25 bp, SARS Virus
gatgtccgagaagtgatcatatttt

SEQ ID NO: 220678 - DNA, 25 bp, SARS Virus
atgtccgagaaaggatcatattttc

SEQ ID NO: 220679 - DNA, 25 bp, SARS Virus
tgtccgagaaatgatcatattttct

SEQ ID NO: 220680 - DNA, 25 bp, SARS Virus
gtccgagaaatggtcatattttctt

SEQ ID NO: 220681 - DNA, 25 bp, SARS Virus
tccgagaaatgagcatattttcttc

SEQ ID NO: 220682 - DNA, 25 bp, SARS Virus
ccgagaaatgatgatattttcttct

SEQ ID NO: 220683 - DNA, 25 bp, SARS Virus
cgagaaatgatcgtattttcttctt

SEQ ID NO: 220684 - DNA, 25 bp, SARS Virus
gagaaatgatcagattttcttctta

SEQ ID NO: 220685 - DNA, 25 bp, SARS Virus
agaaatgatcatgttttcttcttag

SEQ ID NO: 220686 - DNA, 25 bp, SARS Virus
gaaatgatcatagtttcttcttagc

SEQ ID NO: 220687 - DNA, 25 bp, SARS Virus
aaatgatcatatgttcttcttagcc

SEQ ID NO: 220688 - DNA, 25 bp, SARS Virus
aatgatcatattgtcttcttagcct

SEQ ID NO: 220689 - DNA, 25 bp, SARS Virus
atgatcatatttgcttcttagcctg

SEQ ID NO: 220690 - DNA, 25 bp, SARS Virus
tgatcatattttgttcttagcctgt

SEQ ID NO: 220691 - DNA, 25 bp, SARS Virus
gatcatattttcgtcttagcctgtg

SEQ ID NO: 220692 - DNA, 25 bp, SARS Virus
atcatattttctgcttagcctgtgg

SEQ ID NO: 220693 - DNA, 25 bp, SARS Virus
tcatattttcttgttagcctgtggt

SEQ ID NO: 220694 - DNA, 25 bp, SARS Virus
catattttcttcgtagcctgtggta

SEQ ID NO: 220695 - DNA, 25 bp, SARS Virus
atattttcttctgagcctgtggtat

SEQ ID NO: 220696 - DNA, 25 bp, SARS Virus
tattttcttcttggcctgtggtatc

SEQ ID NO: 220697 - DNA, 25 bp, SARS Virus
attttcttcttagcctgtggtatca

SEQ ID NO: 220698 - DNA, 25 bp, SARS Virus
ttttcttcttaggctgtggtatcag

SEQ ID NO: 220699 - DNA, 25 bp, SARS Virus
tttcttcttagcgtgtggtatcagt

SEQ ID NO: 220700 - DNA, 25 bp, SARS Virus
ttcttcttagccggtggtatcagtt

SEQ ID NO: 220701 - DNA, 25 bp, SARS Virus
tcttcttagcctgtggtatcagttg

SEQ ID NO: 220702 - DNA, 25 bp, SARS Virus
cttcttagcctggggtatcagttgc

SEQ ID NO: 220703 - DNA, 25 bp, SARS Virus
ttcttagcctgtggtatcagttgct

SEQ ID NO: 220704 - DNA, 25 bp, SARS Virus
tcttagcctgtggtatcagttgcta

SEQ ID NO: 220705 - DNA, 25 bp, SARS Virus
cttagcctgtgggatcagttgctac

SEQ ID NO: 220706 - DNA, 25 bp, SARS Virus
ttagcctgtggtgtcagttgctacg

SEQ ID NO: 220707 - DNA, 25 bp, SARS Virus
tagcctgtggtagcagttgctacgg

SEQ ID NO: 220708 - DNA, 25 bp, SARS Virus
agcctgtggtatgagttgctacggg

SEQ ID NO: 220709 - DNA, 25 bp, SARS Virus
gcctgtggtatcggttgctacggga

SEQ ID NO: 220710 - DNA, 25 bp, SARS Virus
cctgtggtatcagttgctacgggag

SEQ ID NO: 220711 - DNA, 25 bp, SARS Virus
ctgtggtatcaggtgctacgggaga

SEQ ID NO: 220712 - DNA, 25 bp, SARS Virus
tgtggtatcagtggctacgggagaa

SEQ ID NO: 220713 - DNA, 25 bp, SARS Virus
gtggtatcagttgctacgggagaac

SEQ ID NO: 220714 - DNA, 25 bp, SARS Virus
tggtatcagttggtacgggagaact

SEQ ID NO: 220715 - DNA, 25 bp, SARS Virus
ggtatcagttgcgacgggagaactt

SEQ ID NO: 220716 - DNA, 25 bp, SARS Virus
gtatcagttgctgcgggagaactta

SEQ ID NO: 220717 - DNA, 25 bp, SARS Virus
tatcagttgctaggggagaacttaa

SEQ ID NO: 220718 - DNA, 25 bp, SARS Virus
atcagttgctacgggagaacttaaa

SEQ ID NO: 220719 - DNA, 25 bp, SARS Virus
tcagttgctacgggagaacttaaaa

SEQ ID NO: 220720 - DNA, 25 bp, SARS Virus
cagttgctacgggagaacttaaaat

SEQ ID NO: 220721 - DNA, 25 bp, SARS Virus
agttgctacgggggaacttaaaatt

SEQ ID NO: 220722 - DNA, 25 bp, SARS Virus
gttgctacgggagaacttaaaatta

SEQ ID NO: 220723 - DNA, 25 bp, SARS Virus
ttgctacgggaggacttaaaattaa

SEQ ID NO: 220724 - DNA, 25 bp, SARS Virus
tgctacgggagagcttaaaattaag

SEQ ID NO: 220725 - DNA, 25 bp, SARS Virus
gctacgggagaagttaaaattaagg

SEQ ID NO: 220726 - DNA, 25 bp, SARS Virus
ctacgggagaacgtaaaattaagga

SEQ ID NO: 220727 - DNA, 25 bp, SARS Virus
tacgggagaactgaaaattaaggaa

SEQ ID NO: 220728 - DNA, 25 bp, SARS Virus
acgggagaacttgaaattaaggaaa

SEQ ID NO: 220729 - DNA, 25 bp, SARS Virus
cgggagaacttagaattaaggaaat

SEQ ID NO: 220730 - DNA, 25 bp, SARS Virus
gggagaacttaagattaaggaaata

SEQ ID NO: 220731 - DNA, 25 bp, SARS Virus
ggagaacttaaagttaaggaaatat

SEQ ID NO: 220732 - DNA, 25 bp, SARS Virus
gagaacttaaaagtaaggaaatatg

SEQ ID NO: 220733 - DNA, 25 bp, SARS Virus
agaacttaaaatgaaggaaatatga

SEQ ID NO: 220734 - DNA, 25 bp, SARS Virus
gaacttaaaattgaggaaatatgaa

SEQ ID NO: 220735 - DNA, 25 bp, SARS Virus
aacttaaaattagggaaatatgaat

SEQ ID NO: 220736 - DNA, 25 bp, SARS Virus
acttaaaattaaggaaatatgaatg

SEQ ID NO: 220737 - DNA, 25 bp, SARS Virus
cttaaaattaaggaaatatgaatgc

SEQ ID NO: 220738 - DNA, 25 bp, SARS Virus
ttaaaattaagggaatatgaatgca

SEQ ID NO: 220739 - DNA, 25 bp, SARS Virus
taaaattaaggagatatgaatgcaa

SEQ ID NO: 220740 - DNA, 25 bp, SARS Virus
aaaattaaggaagtatgaatgcaac

SEQ ID NO: 220741 - DNA, 25 bp, SARS Virus
aaattaaggaaagatgaatgcaacc

SEQ ID NO: 220742 - DNA, 25 bp, SARS Virus
aattaaggaaatgtgaatgcaacct

SEQ ID NO: 220743 - DNA, 25 bp, SARS Virus
attaaggaaataggaatgcaaccta

SEQ ID NO: 220744 - DNA, 25 bp, SARS Virus
ttaaggaaatatgaatgcaacctac

SEQ ID NO: 220745 - DNA, 25 bp, SARS Virus
taaggaaatatggatgcaacctacc

SEQ ID NO: 220746 - DNA, 25 bp, SARS Virus
aaggaaatatgagtgcaacctacca

SEQ ID NO: 220747 - DNA, 25 bp, SARS Virus
aggaaatatgaaggcaacctaccaa

SEQ ID NO: 220748 - DNA, 25 bp, SARS Virus
ggaaatatgaatgcaacctaccaac

SEQ ID NO: 220749 - DNA, 25 bp, SARS Virus
gaaatatgaatggaacctaccaacg

SEQ ID NO: 220750 - DNA, 25 bp, SARS Virus
aaatatgaatgcgacctaccaacgg

SEQ ID NO: 220751 - DNA, 25 bp, SARS Virus
aatatgaatgcagcctaccaacggt

SEQ ID NO: 220752 - DNA, 25 bp, SARS Virus
atatgaatgcaagctaccaacggta

SEQ ID NO: 220753 - DNA, 25 bp, SARS Virus
tatgaatgcaacgtaccaacggtaa

SEQ ID NO: 220754 - DNA, 25 bp, SARS Virus
atgaatgcaaccgaccaacggtaat

SEQ ID NO: 220755 - DNA, 25 bp, SARS Virus
tgaatgcaacctgccaacggtaata

SEQ ID NO: 220756 - DNA, 25 bp, SARS Virus
gaatgcaacctagcaacggtaatac

SEQ ID NO: 220757 - DNA, 25 bp, SARS Virus
aatgcaacctacgaacggtaatacc

SEQ ID NO: 220758 - DNA, 25 bp, SARS Virus
atgcaacctaccgacggtaataccg

SEQ ID NO: 220759 - DNA, 25 bp, SARS Virus
tgcaacctaccagcggtaataccga

SEQ ID NO: 220760 - DNA, 25 bp, SARS Virus
gcaacctaccaagggtaataccgag

SEQ ID NO: 220761 - DNA, 25 bp, SARS Virus
caacctaccaacggtaataccgaga

SEQ ID NO: 220762 - DNA, 25 bp, SARS Virus
aacctaccaacggtaataccgagat

SEQ ID NO: 220763 - DNA, 25 bp, SARS Virus
acctaccaacgggaataccgagatt

SEQ ID NO: 220764 - DNA, 25 bp, SARS Virus
cctaccaacggtgataccgagattg

SEQ ID NO: 220765 - DNA, 25 bp, SARS Virus
ctaccaacggtagtaccgagattgt

SEQ ID NO: 220766 - DNA, 25 bp, SARS Virus
taccaacggtaagaccgagattgta

SEQ ID NO: 220767 - DNA, 25 bp, SARS Virus
accaacggtaatgccgagattgtag

SEQ ID NO: 220768 - DNA, 25 bp, SARS Virus
ccaacggtaatagcgagattgtagg

SEQ ID NO: 220769 - DNA, 25 bp, SARS Virus
caacggtaatacggagattgtaggt

SEQ ID NO: 220770 - DNA, 25 bp, SARS Virus
aacggtaataccgagattgtaggta

SEQ ID NO: 220771 - DNA, 25 bp, SARS Virus
acggtaataccgggattgtaggtac

SEQ ID NO: 220772 - DNA, 25 bp, SARS Virus
cggtaataccgagattgtaggtacg

SEQ ID NO: 220773 - DNA, 25 bp, SARS Virus
ggtaataccgaggttgtaggtacgt

SEQ ID NO: 220774 - DNA, 25 bp, SARS Virus
gtaataccgagagtgtaggtacgta

SEQ ID NO: 220775 - DNA, 25 bp, SARS Virus
taataccgagatggtaggtacgtat

SEQ ID NO: 220776 - DNA, 25 bp, SARS Virus
aataccgagattgtaggtacgtata

SEQ ID NO: 220777 - DNA, 25 bp, SARS Virus
ataccgagattggaggtacgtatat

SEQ ID NO: 220778 - DNA, 25 bp, SARS Virus
taccgagattgtgggtacgtatatc

SEQ ID NO: 220779 - DNA, 25 bp, SARS Virus
accgagattgtaggtacgtatatcc

SEQ ID NO: 220780 - DNA, 25 bp, SARS Virus
ccgagattgtaggtacgtatatccg

SEQ ID NO: 220781 - DNA, 25 bp, SARS Virus
cgagattgtagggacgtatatccgt

SEQ ID NO: 220782 - DNA, 25 bp, SARS Virus
gagattgtaggtgcgtatatccgta

SEQ ID NO: 220783 - DNA, 25 bp, SARS Virus
agattgtaggtaggtatatccgtaa

SEQ ID NO: 220784 - DNA, 25 bp, SARS Virus
gattgtaggtacgtatatccgtaat

SEQ ID NO: 220785 - DNA, 25 bp, SARS Virus
attgtaggtacggatatccgtaatt

SEQ ID NO: 220786 - DNA, 25 bp, SARS Virus
ttgtaggtacgtgtatccgtaatta

SEQ ID NO: 220787 - DNA, 25 bp, SARS Virus
tgtaggtacgtagatccgtaattaa

SEQ ID NO: 220788 - DNA, 25 bp, SARS Virus
gtaggtacgtatgtccgtaattaaa

SEQ ID NO: 220789 - DNA, 25 bp, SARS Virus
taggtacgtatagccgtaattaaaa

SEQ ID NO: 220790 - DNA, 25 bp, SARS Virus
aggtacgtatatgcgtaattaaaag

SEQ ID NO: 220791 - DNA, 25 bp, SARS Virus
ggtacgtatatcggtaattaaaaga

SEQ ID NO: 220792 - DNA, 25 bp, SARS Virus
gtacgtatatccgtaattaaaagaa

SEQ ID NO: 220793 - DNA, 25 bp, SARS Virus
tacgtatatccggaattaaaagaac

SEQ ID NO: 220794 - DNA, 25 bp, SARS Virus
acgtatatccgtgattaaaagaaca

SEQ ID NO: 220795 - DNA, 25 bp, SARS Virus
cgtatatccgtagttaaaagaacag

SEQ ID NO: 220796 - DNA, 25 bp, SARS Virus
gtatatccgtaagtaaaagaacaga

SEQ ID NO: 220797 - DNA, 25 bp, SARS Virus
tatatccgtaatgaaaagaacagag

SEQ ID NO: 220798 - DNA, 25 bp, SARS Virus
atatccgtaattgaaagaacagaga

SEQ ID NO: 220799 - DNA, 25 bp, SARS Virus
tatccgtaattagaagaacagagaa

SEQ ID NO: 220800 - DNA, 25 bp, SARS Virus
atccgtaattaagagaacagagaag

SEQ ID NO: 220801 - DNA, 25 bp, SARS Virus
tccgtaattaaaggaacagagaagt

SEQ ID NO: 220802 - DNA, 25 bp, SARS Virus
ccgtaattaaaagaacagagaagtc

SEQ ID NO: 220803 - DNA, 25 bp, SARS Virus
cgtaattaaaaggacagagaagtcg

SEQ ID NO: 220804 - DNA, 25 bp, SARS Virus
gtaattaaaagagcagagaagtcgt

SEQ ID NO: 220805 - DNA, 25 bp, SARS Virus
taattaaaagaagagagaagtcgta

SEQ ID NO: 220806 - DNA, 25 bp, SARS Virus
aattaaaagaacggagaagtcgtac

SEQ ID NO: 220807 - DNA, 25 bp, SARS Virus
attaaaagaacagagaagtcgtact

SEQ ID NO: 220808 - DNA, 25 bp, SARS Virus
ttaaaagaacagggaagtcgtactc

SEQ ID NO: 220809 - DNA, 25 bp, SARS Virus
taaaagaacagagaagtcgtactcg

SEQ ID NO: 220810 - DNA, 25 bp, SARS Virus
aaaagaacagaggagtcgtactcgt

SEQ ID NO: 220811 - DNA, 25 bp, SARS Virus
aaagaacagagaggtcgtactcgtt

SEQ ID NO: 220812 - DNA, 25 bp, SARS Virus
aagaacagagaagtcgtactcgttc

SEQ ID NO: 220813 - DNA, 25 bp, SARS Virus
agaacagagaaggcgtactcgttcg

SEQ ID NO: 220814 - DNA, 25 bp, SARS Virus
gaacagagaagtggtactcgttcgt

SEQ ID NO: 220815 - DNA, 25 bp, SARS Virus
aacagagaagtcgtactcgttcgta

SEQ ID NO: 220816 - DNA, 25 bp, SARS Virus
acagagaagtcggactcgttcgtaa

SEQ ID NO: 220817 - DNA, 25 bp, SARS Virus
cagagaagtcgtgctcgttcgtaaa

SEQ ID NO: 220818 - DNA, 25 bp, SARS Virus
agagaagtcgtagtcgttcgtaaag

SEQ ID NO: 220819 - DNA, 25 bp, SARS Virus
gagaagtcgtacgcgttcgtaaaga

SEQ ID NO: 220820 - DNA, 25 bp, SARS Virus
agaagtcgtactggttcgtaaagag

SEQ ID NO: 220821 - DNA, 25 bp, SARS Virus
gaagtcgtactcgttcgtaaagaga

SEQ ID NO: 220822 - DNA, 25 bp, SARS Virus
aagtcgtactcggtcgtaaagagag

SEQ ID NO: 220823 - DNA, 25 bp, SARS Virus
agtcgtactcgtgcgtaaagagagt

SEQ ID NO: 220824 - DNA, 25 bp, SARS Virus
gtcgtactcgttggtaaagagagtt

SEQ ID NO: 220825 - DNA, 25 bp, SARS Virus
tcgtactcgttcgtaaagagagttt

SEQ ID NO: 220826 - DNA, 25 bp, SARS Virus
cgtactcgttcggaaagagagttta

SEQ ID NO: 220827 - DNA, 25 bp, SARS Virus
gtactcgttcgtgaagagagtttaa

SEQ ID NO: 220828 - DNA, 25 bp, SARS Virus
tactcgttcgtagagagagtttaag

SEQ ID NO: 220829 - DNA, 25 bp, SARS Virus
actcgttcgtaaggagagtttaagg

SEQ ID NO: 220830 - DNA, 25 bp, SARS Virus
ctcgttcgtaaagagagtttaaggt

SEQ ID NO: 220831 - DNA, 25 bp, SARS Virus
tcgttcgtaaagggagtttaaggtc

SEQ ID NO: 220832 - DNA, 25 bp, SARS Virus
cgttcgtaaagagagtttaaggtcc

SEQ ID NO: 220833 - DNA, 25 bp, SARS Virus
gttcgtaaagagggtttaaggtcct

SEQ ID NO: 220834 - DNA, 25 bp, SARS Virus
ttcgtaaagagagtttaaggtccta

SEQ ID NO: 220835 - DNA, 25 bp, SARS Virus
tcgtaaagagaggttaaggtcctat

SEQ ID NO: 220836 - DNA, 25 bp, SARS Virus
cgtaaagagagtgtaaggtcctatg

SEQ ID NO: 220837 - DNA, 25 bp, SARS Virus
gtaaagagagttgaaggtcctatgt

SEQ ID NO: 220838 - DNA, 25 bp, SARS Virus
taaagagagtttgaggtcctatgtc

SEQ ID NO: 220839 - DNA, 25 bp, SARS Virus
aaagagagtttagggtcctatgtca

SEQ ID NO: 220840 - DNA, 25 bp, SARS Virus
aagagagtttaaggtcctatgtcaa

SEQ ID NO: 220841 - DNA, 25 bp, SARS Virus
agagagtttaaggtcctatgtcaag

SEQ ID NO: 220842 - DNA, 25 bp, SARS Virus
gagagtttaagggcctatgtcaagg

SEQ ID NO: 220843 - DNA, 25 bp, SARS Virus
agagtttaaggtgctatgtcaagga

SEQ ID NO: 220844 - DNA, 25 bp, SARS Virus
gagtttaaggtcgtatgtcaaggat

SEQ ID NO: 220845 - DNA, 25 bp, SARS Virus
agtttaaggtccgatgtcaaggatc

SEQ ID NO: 220846 - DNA, 25 bp, SARS Virus
gtttaaggtcctgtgtcaaggatct

SEQ ID NO: 220847 - DNA, 25 bp, SARS Virus
tttaaggtcctaggtcaaggatctt

SEQ ID NO: 220848 - DNA, 25 bp, SARS Virus
ttaaggtcctatgtcaaggatctta

SEQ ID NO: 220849 - DNA, 25 bp, SARS Virus
taaggtcctatggcaaggatcttag

SEQ ID NO: 220850 - DNA, 25 bp, SARS Virus
aaggtcctatgtgaaggatcttaga

SEQ ID NO: 220851 - DNA, 25 bp, SARS Virus
aggtcctatgtcgaggatcttagag

SEQ ID NO: 220852 - DNA, 25 bp, SARS Virus
ggtcctatgtcagggatcttagaga

SEQ ID NO: 220853 - DNA, 25 bp, SARS Virus
gtcctatgtcaaggatcttagagaa

SEQ ID NO: 220854 - DNA, 25 bp, SARS Virus
tcctatgtcaaggatcttagagaag

SEQ ID NO: 220855 - DNA, 25 bp, SARS Virus
cctatgtcaagggtcttagagaagg

SEQ ID NO: 220856 - DNA, 25 bp, SARS Virus
ctatgtcaaggagcttagagaagga

SEQ ID NO: 220857 - DNA, 25 bp, SARS Virus
tatgtcaaggatgttagagaaggaa

SEQ ID NO: 220858 - DNA, 25 bp, SARS Virus
atgtcaaggatcgtagagaaggaat

SEQ ID NO: 220859 - DNA, 25 bp, SARS Virus
tgtcaaggatctgagagaaggaatc

SEQ ID NO: 220860 - DNA, 25 bp, SARS Virus
gtcaaggatcttggagaaggaatcg

SEQ ID NO: 220861 - DNA, 25 bp, SARS Virus
tcaaggatcttagagaaggaatcgt

SEQ ID NO: 220862 - DNA, 25 bp, SARS Virus
caaggatcttagggaaggaatcgta

SEQ ID NO: 220863 - DNA, 25 bp, SARS Virus
aaggatcttagagaaggaatcgtaa

SEQ ID NO: 220864 - DNA, 25 bp, SARS Virus
aggatcttagaggaggaatcgtaat

SEQ ID NO: 220865 - DNA, 25 bp, SARS Virus
ggatcttagagagggaatcgtaatc

SEQ ID NO: 220866 - DNA, 25 bp, SARS Virus
gatcttagagaaggaatcgtaatcc

SEQ ID NO: 220867 - DNA, 25 bp, SARS Virus
atcttagagaaggaatcgtaatcca

SEQ ID NO: 220868 - DNA, 25 bp, SARS Virus
tcttagagaagggatcgtaatccac

SEQ ID NO: 220869 - DNA, 25 bp, SARS Virus
cttagagaaggagtcgtaatccacg

SEQ ID NO: 220870 - DNA, 25 bp, SARS Virus
ttagagaaggaagcgtaatccacga

SEQ ID NO: 220871 - DNA, 25 bp, SARS Virus
tagagaaggaatggtaatccacgaa

SEQ ID NO: 220872 - DNA, 25 bp, SARS Virus
agagaaggaatcgtaatccacgaag

SEQ ID NO: 220873 - DNA, 25 bp, SARS Virus
gagaaggaatcggaatccacgaaga

SEQ ID NO: 220874 - DNA, 25 bp, SARS Virus
agaaggaatcgtgatccacgaagac

SEQ ID NO: 220875 - DNA, 25 bp, SARS Virus
gaaggaatcgtagtccacgaagact

SEQ ID NO: 220876 - DNA, 25 bp, SARS Virus
aaggaatcgtaagccacgaagactt

SEQ ID NO: 220877 - DNA, 25 bp, SARS Virus
aggaatcgtaatgcacgaagacttc

SEQ ID NO: 220878 - DNA, 25 bp, SARS Virus
ggaatcgtaatcgacgaagacttcc

SEQ ID NO: 220879 - DNA, 25 bp, SARS Virus
gaatcgtaatccgcgaagacttcca

SEQ ID NO: 220880 - DNA, 25 bp, SARS Virus
aatcgtaatccaggaagacttccat

SEQ ID NO: 220881 - DNA, 25 bp, SARS Virus
atcgtaatccacgaagacttccatc

SEQ ID NO: 220882 - DNA, 25 bp, SARS Virus
tcgtaatccacggagacttccatca

SEQ ID NO: 220883 - DNA, 25 bp, SARS Virus
cgtaatccacgaggacttccatcat

SEQ ID NO: 220884 - DNA, 25 bp, SARS Virus
gtaatccacgaagacttccatcatg

SEQ ID NO: 220885 - DNA, 25 bp, SARS Virus
taatccacgaaggcttccatcatgt

SEQ ID NO: 220886 - DNA, 25 bp, SARS Virus
aatccacgaagagttccatcatgta

SEQ ID NO: 220887 - DNA, 25 bp, SARS Virus
atccacgaagacgtccatcatgtat

SEQ ID NO: 220888 - DNA, 25 bp, SARS Virus
tccacgaagactgccatcatgtatt

SEQ ID NO: 220889 - DNA, 25 bp, SARS Virus
ccacgaagacttgcatcatgtattt

SEQ ID NO: 220890 - DNA, 25 bp, SARS Virus
cacgaagacttcgatcatgtatttt

SEQ ID NO: 220891 - DNA, 25 bp, SARS Virus
acgaagacttccgtcatgtatttta

SEQ ID NO: 220892 - DNA, 25 bp, SARS Virus
cgaagacttccagcatgtattttac

SEQ ID NO: 220893 - DNA, 25 bp, SARS Virus
gaagacttccatgatgtattttacg

SEQ ID NO: 220894 - DNA, 25 bp, SARS Virus
aagacttccatcgtgtattttacgt

SEQ ID NO: 220895 - DNA, 25 bp, SARS Virus
agacttccatcaggtattttacgtc

SEQ ID NO: 220896 - DNA, 25 bp, SARS Virus
gacttccatcatgtattttacgtct

SEQ ID NO: 220897 - DNA, 25 bp, SARS Virus
acttccatcatggattttacgtcta

SEQ ID NO: 220898 - DNA, 25 bp, SARS Virus
cttccatcatgtgttttacgtctaa

SEQ ID NO: 220899 - DNA, 25 bp, SARS Virus
ttccatcatgtagtttacgtctaaa

SEQ ID NO: 220900 - DNA, 25 bp, SARS Virus
tccatcatgtatgttacgtctaaac

SEQ ID NO: 220901 - DNA, 25 bp, SARS Virus
ccatcatgtattgtacgtctaaacg

SEQ ID NO: 220902 - DNA, 25 bp, SARS Virus
catcatgtatttgacgtctaaacgt

SEQ ID NO: 220903 - DNA, 25 bp, SARS Virus
atcatgtattttgcgtctaaacgta

SEQ ID NO: 220904 - DNA, 25 bp, SARS Virus
tcatgtattttaggtctaaacgtaa

SEQ ID NO: 220905 - DNA, 25 bp, SARS Virus
catgtattttacgtctaaacgtaaa

SEQ ID NO: 220906 - DNA, 25 bp, SARS Virus
atgtattttacggctaaacgtaaag

SEQ ID NO: 220907 - DNA, 25 bp, SARS Virus
tgtattttacgtgtaaacgtaaaga

SEQ ID NO: 220908 - DNA, 25 bp, SARS Virus
gtattttacgtcgaaacgtaaagaa

SEQ ID NO: 220909 - DNA, 25 bp, SARS Virus
tattttacgtctgaacgtaaagaat

SEQ ID NO: 220910 - DNA, 25 bp, SARS Virus
attttacgtctagacgtaaagaatt

SEQ ID NO: 220911 - DNA, 25 bp, SARS Virus
ttttacgtctaagcgtaaagaattc

SEQ ID NO: 220912 - DNA, 25 bp, SARS Virus
tttacgtctaaaggtaaagaattct

SEQ ID NO: 220913 - DNA, 25 bp, SARS Virus
ttacgtctaaacgtaaagaattctc

SEQ ID NO: 220914 - DNA, 25 bp, SARS Virus
tacgtctaaacggaaagaattctcg

SEQ ID NO: 220915 - DNA, 25 bp, SARS Virus
acgtctaaacgtgaagaattctcgt

SEQ ID NO: 220916 - DNA, 25 bp, SARS Virus
cgtctaaacgtagagaattctcgtc

SEQ ID NO: 220917 - DNA, 25 bp, SARS Virus
gtctaaacgtaaggaattctcgtca

SEQ ID NO: 220918 - DNA, 25 bp, SARS Virus
tctaaacgtaaagaattctcgtcag

SEQ ID NO: 220919 - DNA, 25 bp, SARS Virus
ctaaacgtaaaggattctcgtcaga

SEQ ID NO: 220920 - DNA, 25 bp, SARS Virus
taaacgtaaagagttctcgtcagaa

SEQ ID NO: 220921 - DNA, 25 bp, SARS Virus
aaacgtaaagaagtctcgtcagaat

SEQ ID NO: 220922 - DNA, 25 bp, SARS Virus
aacgtaaagaatgctcgtcagaatc

SEQ ID NO: 220923 - DNA, 25 bp, SARS Virus
acgtaaagaattgtcgtcagaatcg

SEQ ID NO: 220924 - DNA, 25 bp, SARS Virus
cgtaaagaattcgcgtcagaatcga

SEQ ID NO: 220925 - DNA, 25 bp, SARS Virus
gtaaagaattctggtcagaatcgaa

SEQ ID NO: 220926 - DNA, 25 bp, SARS Virus
taaagaattctcgtcagaatcgaag

SEQ ID NO: 220927 - DNA, 25 bp, SARS Virus
aaagaattctcggcagaatcgaagg

SEQ ID NO: 220928 - DNA, 25 bp, SARS Virus
aagaattctcgtgagaatcgaagga

SEQ ID NO: 220929 - DNA, 25 bp, SARS Virus
agaattctcgtcggaatcgaaggag

SEQ ID NO: 220930 - DNA, 25 bp, SARS Virus
gaattctcgtcagaatcgaaggagt

SEQ ID NO: 220931 - DNA, 25 bp, SARS Virus
aattctcgtcaggatcgaaggagtt

SEQ ID NO: 220932 - DNA, 25 bp, SARS Virus
attctcgtcagagtcgaaggagttc

SEQ ID NO: 220933 - DNA, 25 bp, SARS Virus
ttctcgtcagaagcgaaggagttca

SEQ ID NO: 220934 - DNA, 25 bp, SARS Virus
tctcgtcagaatggaaggagttcac

SEQ ID NO: 220935 - DNA, 25 bp, SARS Virus
ctcgtcagaatcgaaggagttcaca

SEQ ID NO: 220936 - DNA, 25 bp, SARS Virus
tcgtcagaatcggaggagttcacat

SEQ ID NO: 220937 - DNA, 25 bp, SARS Virus
cgtcagaatcgagggagttcacata

SEQ ID NO: 220938 - DNA, 25 bp, SARS Virus
gtcagaatcgaaggagttcacatat

SEQ ID NO: 220939 - DNA, 25 bp, SARS Virus
tcagaatcgaaggagttcacatatt

SEQ ID NO: 220940 - DNA, 25 bp, SARS Virus
cagaatcgaaggggttcacatattg

SEQ ID NO: 220941 - DNA, 25 bp, SARS Virus
agaatcgaaggagttcacatattgg

SEQ ID NO: 220942 - DNA, 25 bp, SARS Virus
gaatcgaaggaggtcacatattggt

SEQ ID NO: 220943 - DNA, 25 bp, SARS Virus
aatcgaaggagtgcacatattggtc

SEQ ID NO: 220944 - DNA, 25 bp, SARS Virus
atcgaaggagttgacatattggtcg

SEQ ID NO: 220945 - DNA, 25 bp, SARS Virus
tcgaaggagttcgcatattggtcgt

SEQ ID NO: 220946 - DNA, 25 bp, SARS Virus
cgaaggagttcagatattggtcgtg

SEQ ID NO: 220947 - DNA, 25 bp, SARS Virus
gaaggagttcacgtattggtcgtgt

SEQ ID NO: 220948 - DNA, 25 bp, SARS Virus
aaggagttcacagattggtcgtgta

SEQ ID NO: 220949 - DNA, 25 bp, SARS Virus
aggagttcacatgttggtcgtgtag

SEQ ID NO: 220950 - DNA, 25 bp, SARS Virus
ggagttcacatagtggtcgtgtagg

SEQ ID NO: 220951 - DNA, 25 bp, SARS Virus
gagttcacatatgggtcgtgtagga

SEQ ID NO: 220952 - DNA, 25 bp, SARS Virus
agttcacatattggtcgtgtaggaa

SEQ ID NO: 220953 - DNA, 25 bp, SARS Virus
gttcacatattggtcgtgtaggaac

SEQ ID NO: 220954 - DNA, 25 bp, SARS Virus
ttcacatattgggcgtgtaggaaca

SEQ ID NO: 220955 - DNA, 25 bp, SARS Virus
tcacatattggtggtgtaggaacag

SEQ ID NO: 220956 - DNA, 25 bp, SARS Virus
cacatattggtcgtgtaggaacagg

SEQ ID NO: 220957 - DNA, 25 bp, SARS Virus
acatattggtcgggtaggaacaggt

SEQ ID NO: 220958 - DNA, 25 bp, SARS Virus
catattggtcgtgtaggaacaggtc

SEQ ID NO: 220959 - DNA, 25 bp, SARS Virus
atattggtcgtggaggaacaggtcc

SEQ ID NO: 220960 - DNA, 25 bp, SARS Virus
tattggtcgtgtgggaacaggtccc

SEQ ID NO: 220961 - DNA, 25 bp, SARS Virus
attggtcgtgtaggaacaggtccca

SEQ ID NO: 220962 - DNA, 25 bp, SARS Virus
ttggtcgtgtaggaacaggtcccat

SEQ ID NO: 220963 - DNA, 25 bp, SARS Virus
tggtcgtgtagggacaggtcccatg

SEQ ID NO: 220964 - DNA, 25 bp, SARS Virus
ggtcgtgtaggagcaggtcccatgc

SEQ ID NO: 220965 - DNA, 25 bp, SARS Virus
gtcgtgtaggaagaggtcccatgca

SEQ ID NO: 220966 - DNA, 25 bp, SARS Virus
tcgtgtaggaacgggtcccatgcac

SEQ ID NO: 220967 - DNA, 25 bp, SARS Virus
cgtgtaggaacaggtcccatgcacc

SEQ ID NO: 220968 - DNA, 25 bp, SARS Virus
gtgtaggaacaggtcccatgcacca

SEQ ID NO: 220969 - DNA, 25 bp, SARS Virus
tgtaggaacagggcccatgcaccaa

SEQ ID NO: 220970 - DNA, 25 bp, SARS Virus
gtaggaacaggtgccatgcaccaat

SEQ ID NO: 220971 - DNA, 25 bp, SARS Virus
taggaacaggtcgcatgcaccaata

SEQ ID NO: 220972 - DNA, 25 bp, SARS Virus
aggaacaggtccgatgcaccaatat

SEQ ID NO: 220973 - DNA, 25 bp, SARS Virus
ggaacaggtcccgtgcaccaatata

SEQ ID NO: 220974 - DNA, 25 bp, SARS Virus
gaacaggtcccaggcaccaatatat

SEQ ID NO: 220975 - DNA, 25 bp, SARS Virus
aacaggtcccatgcaccaatatatg

SEQ ID NO: 220976 - DNA, 25 bp, SARS Virus
acaggtcccatggaccaatatatga

SEQ ID NO: 220977 - DNA, 25 bp, SARS Virus
caggtcccatgcgccaatatatgag

SEQ ID NO: 220978 - DNA, 25 bp, SARS Virus
aggtcccatgcagcaatatatgagt

SEQ ID NO: 220979 - DNA, 25 bp, SARS Virus
ggtcccatgcacgaatatatgagta

SEQ ID NO: 220980 - DNA, 25 bp, SARS Virus
gtcccatgcaccgatatatgagtag

SEQ ID NO: 220981 - DNA, 25 bp, SARS Virus
tcccatgcaccagtatatgagtagt

SEQ ID NO: 220982 - DNA, 25 bp, SARS Virus
cccatgcaccaagatatgagtagtt

SEQ ID NO: 220983 - DNA, 25 bp, SARS Virus
ccatgcaccaatgtatgagtagttg

SEQ ID NO: 220984 - DNA, 25 bp, SARS Virus
catgcaccaatagatgagtagttga

SEQ ID NO: 220985 - DNA, 25 bp, SARS Virus
atgcaccaatatgtgagtagttgac

SEQ ID NO: 220986 - DNA, 25 bp, SARS Virus
tgcaccaatataggagtagttgacc

SEQ ID NO: 220987 - DNA, 25 bp, SARS Virus
gcaccaatatatgagtagttgaccg

SEQ ID NO: 220988 - DNA, 25 bp, SARS Virus
caccaatatatgggtagttgaccgt

SEQ ID NO: 220989 - DNA, 25 bp, SARS Virus
accaatatatgagtagttgaccgtg

SEQ ID NO: 220990 - DNA, 25 bp, SARS Virus
ccaatatatgaggagttgaccgtga

SEQ ID NO: 220991 - DNA, 25 bp, SARS Virus
caatatatgagtggttgaccgtgaa

SEQ ID NO: 220992 - DNA, 25 bp, SARS Virus
aatatatgagtagttgaccgtgaaa

SEQ ID NO: 220993 - DNA, 25 bp, SARS Virus
atatatgagtaggtgaccgtgaaag

SEQ ID NO: 220994 - DNA, 25 bp, SARS Virus
tatatgagtagtggaccgtgaaaga

SEQ ID NO: 220995 - DNA, 25 bp, SARS Virus
atatgagtagttgaccgtgaaagaa

SEQ ID NO: 220996 - DNA, 25 bp, SARS Virus
tatgagtagttggccgtgaaagaag

SEQ ID NO: 220997 - DNA, 25 bp, SARS Virus
atgagtagttgagcgtgaaagaagt

SEQ ID NO: 220998 - DNA, 25 bp, SARS Virus
tgagtagttgacggtgaaagaagtt

SEQ ID NO: 220999 - DNA, 25 bp, SARS Virus
gagtagttgaccgtgaaagaagttt

SEQ ID NO: 221000 - DNA, 25 bp, SARS Virus
agtagttgaccgggaaagaagtttc

SEQ ID NO: 221001 - DNA, 25 bp, SARS Virus
gtagttgaccgtgaaagaagtttcg

SEQ ID NO: 221002 - DNA, 25 bp, SARS Virus
tagttgaccgtggaagaagtttcga

SEQ ID NO: 221003 - DNA, 25 bp, SARS Virus
agttgaccgtgagagaagtttcgag

SEQ ID NO: 221004 - DNA, 25 bp, SARS Virus
gttgaccgtgaaggaagtttcgaga

SEQ ID NO: 221005 - DNA, 25 bp, SARS Virus
ttgaccgtgaaagaagtttcgagaa

SEQ ID NO: 221006 - DNA, 25 bp, SARS Virus
tgaccgtgaaaggagtttcgagaac

SEQ ID NO: 221007 - DNA, 25 bp, SARS Virus
gaccgtgaaagaggtttcgagaact

SEQ ID NO: 221008 - DNA, 25 bp, SARS Virus
accgtgaaagaagtttcgagaactc

SEQ ID NO: 221009 - DNA, 25 bp, SARS Virus
ccgtgaaagaaggttcgagaactct

SEQ ID NO: 221010 - DNA, 25 bp, SARS Virus
cgtgaaagaagtgtcgagaactctc

SEQ ID NO: 221011 - DNA, 25 bp, SARS Virus
gtgaaagaagttgcgagaactctcg

SEQ ID NO: 221012 - DNA, 25 bp, SARS Virus
tgaaagaagtttggagaactctcgt

SEQ ID NO: 221013 - DNA, 25 bp, SARS Virus
gaaagaagtttcgagaactctcgta

SEQ ID NO: 221014 - DNA, 25 bp, SARS Virus
aaagaagtttcgggaactctcgtag

SEQ ID NO: 221015 - DNA, 25 bp, SARS Virus
aagaagtttcgagaactctcgtaga

SEQ ID NO: 221016 - DNA, 25 bp, SARS Virus
agaagtttcgaggactctcgtagag

SEQ ID NO: 221017 - DNA, 25 bp, SARS Virus
gaagtttcgagagctctcgtagagt

SEQ ID NO: 221018 - DNA, 25 bp, SARS Virus
aagtttcgagaagtctcgtagagtc

SEQ ID NO: 221019 - DNA, 25 bp, SARS Virus
agtttcgagaacgctcgtagagtca

SEQ ID NO: 221020 - DNA, 25 bp, SARS Virus
gtttcgagaactgtcgtagagtcat

SEQ ID NO: 221021 - DNA, 25 bp, SARS Virus
tttcgagaactcgcgtagagtcatc

SEQ ID NO: 221022 - DNA, 25 bp, SARS Virus
ttcgagaactctggtagagtcatca

SEQ ID NO: 221023 - DNA, 25 bp, SARS Virus
tcgagaactctcgtagagtcatcac

SEQ ID NO: 221024 - DNA, 25 bp, SARS Virus
cgagaactctcggagagtcatcacg

SEQ ID NO: 221025 - DNA, 25 bp, SARS Virus
gagaactctcgtggagtcatcacgg

SEQ ID NO: 221026 - DNA, 25 bp, SARS Virus
agaactctcgtagagtcatcacggt

SEQ ID NO: 221027 - DNA, 25 bp, SARS Virus
gaactctcgtagggtcatcacggtg

SEQ ID NO: 221028 - DNA, 25 bp, SARS Virus
aactctcgtagagtcatcacggtgg

SEQ ID NO: 221029 - DNA, 25 bp, SARS Virus
actctcgtagaggcatcacggtggt

SEQ ID NO: 221030 - DNA, 25 bp, SARS Virus
ctctcgtagagtgatcacggtggtc

SEQ ID NO: 221031 - DNA, 25 bp, SARS Virus
tctcgtagagtcgtcacggtggtcg

SEQ ID NO: 221032 - DNA, 25 bp, SARS Virus
ctcgtagagtcagcacggtggtcgg

SEQ ID NO: 221033 - DNA, 25 bp, SARS Virus
tcgtagagtcatgacggtggtcgga

SEQ ID NO: 221034 - DNA, 25 bp, SARS Virus
cgtagagtcatcgcggtggtcggaa

SEQ ID NO: 221035 - DNA, 25 bp, SARS Virus
gtagagtcatcagggtggtcggaaa

SEQ ID NO: 221036 - DNA, 25 bp, SARS Virus
tagagtcatcacggtggtcggaaaa

SEQ ID NO: 221037 - DNA, 25 bp, SARS Virus
agagtcatcacggtggtcggaaaaa

SEQ ID NO: 221038 - DNA, 25 bp, SARS Virus
gagtcatcacgggggtcggaaaaac

SEQ ID NO: 221039 - DNA, 25 bp, SARS Virus
agtcatcacggtggtcggaaaaacc

SEQ ID NO: 221040 - DNA, 25 bp, SARS Virus
gtcatcacggtggtcggaaaaacct

SEQ ID NO: 221041 - DNA, 25 bp, SARS Virus
tcatcacggtgggcggaaaaacctc

SEQ ID NO: 221042 - DNA, 25 bp, SARS Virus
catcacggtggtgggaaaaacctcc

SEQ ID NO: 221043 - DNA, 25 bp, SARS Virus
atcacggtggtcggaaaaacctccc

SEQ ID NO: 221044 - DNA, 25 bp, SARS Virus
tcacggtggtcggaaaaacctccca

SEQ ID NO: 221045 - DNA, 25 bp, SARS Virus
cacggtggtcgggaaaacctcccat

SEQ ID NO: 221046 - DNA, 25 bp, SARS Virus
acggtggtcggagaaacctcccata

SEQ ID NO: 221047 - DNA, 25 bp, SARS Virus
cggtggtcggaagaacctcccataa

SEQ ID NO: 221048 - DNA, 25 bp, SARS Virus
ggtggtcggaaagacctcccataat

SEQ ID NO: 221049 - DNA, 25 bp, SARS Virus
gtggtcggaaaagcctcccataatg

SEQ ID NO: 221050 - DNA, 25 bp, SARS Virus
tggtcggaaaaagctcccataatgt

SEQ ID NO: 221051 - DNA, 25 bp, SARS Virus
ggtcggaaaaacgtcccataatgtt

SEQ ID NO: 221052 - DNA, 25 bp, SARS Virus
gtcggaaaaaccgcccataatgttg

SEQ ID NO: 221053 - DNA, 25 bp, SARS Virus
tcggaaaaacctgccataatgttgt

SEQ ID NO: 221054 - DNA, 25 bp, SARS Virus
cggaaaaacctcgcataatgttgtg

SEQ ID NO: 221055 - DNA, 25 bp, SARS Virus
ggaaaaacctccgataatgttgtgt

SEQ ID NO: 221056 - DNA, 25 bp, SARS Virus
gaaaaacctcccgtaatgttgtgtt

SEQ ID NO: 221057 - DNA, 25 bp, SARS Virus
aaaaacctcccagaatgttgtgttc

SEQ ID NO: 221058 - DNA, 25 bp, SARS Virus
aaaacctcccatgatgttgtgttca

SEQ ID NO: 221059 - DNA, 25 bp, SARS Virus
aaacctcccatagtgttgtgttcac

SEQ ID NO: 221060 - DNA, 25 bp, SARS Virus
aacctcccataaggttgtgttcact

SEQ ID NO: 221061 - DNA, 25 bp, SARS Virus
acctcccataatgttgtgttcacta

SEQ ID NO: 221062 - DNA, 25 bp, SARS Virus
cctcccataatggtgtgttcactat

SEQ ID NO: 221063 - DNA, 25 bp, SARS Virus
ctcccataatgtggtgttcactata

SEQ ID NO: 221064 - DNA, 25 bp, SARS Virus
tcccataatgttgtgttcactatag

SEQ ID NO: 221065 - DNA, 25 bp, SARS Virus
cccataatgttgggttcactatagt

SEQ ID NO: 221066 - DNA, 25 bp, SARS Virus
ccataatgttgtgttcactatagtg

SEQ ID NO: 221067 - DNA, 25 bp, SARS Virus
cataatgttgtggtcactatagtgg

SEQ ID NO: 221068 - DNA, 25 bp, SARS Virus
ataatgttgtgtgcactatagtggt

SEQ ID NO: 221069 - DNA, 25 bp, SARS Virus
taatgttgtgttgactatagtggtg

SEQ ID NO: 221070 - DNA, 25 bp, SARS Virus
aatgttgtgttcgctatagtggtga

SEQ ID NO: 221071 - DNA, 25 bp, SARS Virus
atgttgtgttcagtatagtggtgat

SEQ ID NO: 221072 - DNA, 25 bp, SARS Virus
tgttgtgttcacgatagtggtgatc

SEQ ID NO: 221073 - DNA, 25 bp, SARS Virus
gttgtgttcactgtagtggtgatca

SEQ ID NO: 221074 - DNA, 25 bp, SARS Virus
ttgtgttcactagagtggtgatcac

SEQ ID NO: 221075 - DNA, 25 bp, SARS Virus
tgtgttcactatggtggtgatcact

SEQ ID NO: 221076 - DNA, 25 bp, SARS Virus
gtgttcactatagtggtgatcacta

SEQ ID NO: 221077 - DNA, 25 bp, SARS Virus
tgttcactataggggtgatcactat

SEQ ID NO: 221078 - DNA, 25 bp, SARS Virus
gttcactatagtggtgatcactatt

SEQ ID NO: 221079 - DNA, 25 bp, SARS Virus
ttcactatagtggtgatcactattg

SEQ ID NO: 221080 - DNA, 25 bp, SARS Virus
tcactatagtggggatcactattgt

SEQ ID NO: 221081 - DNA, 25 bp, SARS Virus
cactatagtggtgatcactattgta

SEQ ID NO: 221082 - DNA, 25 bp, SARS Virus
actatagtggtggtcactattgtag

SEQ ID NO: 221083 - DNA, 25 bp, SARS Virus
ctatagtggtgagcactattgtagt

SEQ ID NO: 221084 - DNA, 25 bp, SARS Virus
tatagtggtgatgactattgtagtg

SEQ ID NO: 221085 - DNA, 25 bp, SARS Virus
atagtggtgatcgctattgtagtgg

SEQ ID NO: 221086 - DNA, 25 bp, SARS Virus
tagtggtgatcagtattgtagtgga

SEQ ID NO: 221087 - DNA, 25 bp, SARS Virus
agtggtgatcacgattgtagtggat

SEQ ID NO: 221088 - DNA, 25 bp, SARS Virus
gtggtgatcactgttgtagtggatg

SEQ ID NO: 221089 - DNA, 25 bp, SARS Virus
tggtgatcactagtgtagtggatgg

SEQ ID NO: 221090 - DNA, 25 bp, SARS Virus
ggtgatcactatggtagtggatggt

SEQ ID NO: 221091 - DNA, 25 bp, SARS Virus
gtgatcactattgtagtggatggta

SEQ ID NO: 221092 - DNA, 25 bp, SARS Virus
tgatcactattggagtggatggtac

SEQ ID NO: 221093 - DNA, 25 bp, SARS Virus
gatcactattgtggtggatggtaca

SEQ ID NO: 221094 - DNA, 25 bp, SARS Virus
atcactattgtagtggatggtacat

SEQ ID NO: 221095 - DNA, 25 bp, SARS Virus
tcactattgtaggggatggtacatt

SEQ ID NO: 221096 - DNA, 25 bp, SARS Virus
cactattgtagtggatggtacattc

SEQ ID NO: 221097 - DNA, 25 bp, SARS Virus
acagtgtattggttaaccgtaacac

SEQ ID NO: 221098 - DNA, 25 bp, SARS Virus
cagtgtattggttaaccgtaacact

SEQ ID NO: 221099 - DNA, 25 bp, SARS Virus
agtgtattggtttaccgtaacactg

SEQ ID NO: 221100 - DNA, 25 bp, SARS Virus
gtgtattggttatccgtaacactgt

SEQ ID NO: 221101 - DNA, 25 bp, SARS Virus
tgtattggttaatcgtaacactgtt

SEQ ID NO: 221102 - DNA, 25 bp, SARS Virus
gtattggttaactgtaacactgttc

SEQ ID NO: 221103 - DNA, 25 bp, SARS Virus
tattggttaaccttaacactgttcg

SEQ ID NO: 221104 - DNA, 25 bp, SARS Virus
attggttaaccgtaacactgttcgc

SEQ ID NO: 221105 - DNA, 25 bp, SARS Virus
ttggttaaccgttacactgttcgcc

SEQ ID NO: 221106 - DNA, 25 bp, SARS Virus
tggttaaccgtatcactgttcgccg

SEQ ID NO: 221107 - DNA, 25 bp, SARS Virus
ggttaaccgtaatactgttcgccga

SEQ ID NO: 221108 - DNA, 25 bp, SARS Virus
gttaaccgtaactctgttcgccgag

SEQ ID NO: 221109 - DNA, 25 bp, SARS Virus
ttaaccgtaacattgttcgccgagt

SEQ ID NO: 221110 - DNA, 25 bp, SARS Virus
taaccgtaacactgttcgccgagta

SEQ ID NO: 221111 - DNA, 25 bp, SARS Virus
aaccgtaacacttttcgccgagtaa

SEQ ID NO: 221112 - DNA, 25 bp, SARS Virus
accgtaacactgttcgccgagtaaa

SEQ ID NO: 221113 - DNA, 25 bp, SARS Virus
ccgtaacactgttcgccgagtaaat

SEQ ID NO: 221114 - DNA, 25 bp, SARS Virus
cgtaacactgtttgccgagtaaatc

SEQ ID NO: 221115 - DNA, 25 bp, SARS Virus
gtaacactgttctccgagtaaatct

SEQ ID NO: 221116 - DNA, 25 bp, SARS Virus
taacactgttcgtcgagtaaatctc

SEQ ID NO: 221117 - DNA, 25 bp, SARS Virus
aacactgttcgctgagtaaatctct

SEQ ID NO: 221118 - DNA, 25 bp, SARS Virus
acactgttcgcctagtaaatctctc

SEQ ID NO: 221119 - DNA, 25 bp, SARS Virus
cactgttcgccgtgtaaatctctca

SEQ ID NO: 221120 - DNA, 25 bp, SARS Virus
actgttcgccgattaaatctctcaa

SEQ ID NO: 221121 - DNA, 25 bp, SARS Virus
ctgttcgccgagtaaatctctcaag

SEQ ID NO: 221122 - DNA, 25 bp, SARS Virus
tgttcgccgagttaatctctcaagt

SEQ ID NO: 221123 - DNA, 25 bp, SARS Virus
gttcgccgagtatatctctcaagtc

SEQ ID NO: 221124 - DNA, 25 bp, SARS Virus
ttcgccgagtaattctctcaagtcg

SEQ ID NO: 221125 - DNA, 25 bp, SARS Virus
tcgccgagtaaatctctcaagtcga

SEQ ID NO: 221126 - DNA, 25 bp, SARS Virus
cgccgagtaaatttctcaagtcgaa

SEQ ID NO: 221127 - DNA, 25 bp, SARS Virus
gccgagtaaatctctcaagtcgaag

SEQ ID NO: 221128 - DNA, 25 bp, SARS Virus
ccgagtaaatctttcaagtcgaagc

SEQ ID NO: 221129 - DNA, 25 bp, SARS Virus
cgagtaaatctctcaagtcgaagca

SEQ ID NO: 221130 - DNA, 25 bp, SARS Virus
gagtaaatctcttaagtcgaagcat

SEQ ID NO: 221131 - DNA, 25 bp, SARS Virus
agtaaatctctctagtcgaagcatt

SEQ ID NO: 221132 - DNA, 25 bp, SARS Virus
gtaaatctctcatgtcgaagcatta

SEQ ID NO: 221133 - DNA, 25 bp, SARS Virus
taaatctctcaattcgaagcattat

SEQ ID NO: 221134 - DNA, 25 bp, SARS Virus
aaatctctcaagtcgaagcattatt

SEQ ID NO: 221135 - DNA, 25 bp, SARS Virus
aatctctcaagttgaagcattatta

SEQ ID NO: 221136 - DNA, 25 bp, SARS Virus
atctctcaagtctaagcattattat

SEQ ID NO: 221137 - DNA, 25 bp, SARS Virus
tctctcaagtcgtagcattattatc

SEQ ID NO: 221138 - DNA, 25 bp, SARS Virus
ctctcaagtcgatgcattattatct

SEQ ID NO: 221139 - DNA, 25 bp, SARS Virus
tctcaagtcgaatcattattatctt

SEQ ID NO: 221140 - DNA, 25 bp, SARS Virus
ctcaagtcgaagtattattatcttc

SEQ ID NO: 221141 - DNA, 25 bp, SARS Virus
tcaagtcgaagctttattatcttcg

SEQ ID NO: 221142 - DNA, 25 bp, SARS Virus
caagtcgaagcattattatcttcga

SEQ ID NO: 221143 - DNA, 25 bp, SARS Virus
aagtcgaagcattattatcttcgat

SEQ ID NO: 221144 - DNA, 25 bp, SARS Virus
agtcgaagcatttttatcttcgatg

SEQ ID NO: 221145 - DNA, 25 bp, SARS Virus
gtcgaagcattattatcttcgatgt

SEQ ID NO: 221146 - DNA, 25 bp, SARS Virus
tcgaagcattattatcttcgatgtc

SEQ ID NO: 221147 - DNA, 25 bp, SARS Virus
cgaagcattattttcttcgatgtcc

SEQ ID NO: 221148 - DNA, 25 bp, SARS Virus
gaagcattattatcttcgatgtccg

SEQ ID NO: 221149 - DNA, 25 bp, SARS Virus
aagcattattattttcgatgtccga

SEQ ID NO: 221150 - DNA, 25 bp, SARS Virus
agcattattatcttcgatgtccgag

SEQ ID NO: 221151 - DNA, 25 bp, SARS Virus
gcattattatcttcgatgtccgaga

SEQ ID NO: 221152 - DNA, 25 bp, SARS Virus
cattattatctttgatgtccgagaa

SEQ ID NO: 221153 - DNA, 25 bp, SARS Virus
attattatcttctatgtccgagaaa

SEQ ID NO: 221154 - DNA, 25 bp, SARS Virus
ttattatcttcgttgtccgagaaat

SEQ ID NO: 221155 - DNA, 25 bp, SARS Virus
tattatcttcgatgtccgagaaatg

SEQ ID NO: 221156 - DNA, 25 bp, SARS Virus
attatcttcgatttccgagaaatga

SEQ ID NO: 221157 - DNA, 25 bp, SARS Virus
ttatcttcgatgtccgagaaatgat

SEQ ID NO: 221158 - DNA, 25 bp, SARS Virus
tatcttcgatgttcgagaaatgatc

SEQ ID NO: 221159 - DNA, 25 bp, SARS Virus
atcttcgatgtctgagaaatgatca

SEQ ID NO: 221160 - DNA, 25 bp, SARS Virus
tcttcgatgtcctagaaatgatcat

SEQ ID NO: 221161 - DNA, 25 bp, SARS Virus
cttcgatgtccgtgaaatgatcata

SEQ ID NO: 221162 - DNA, 25 bp, SARS Virus
ttcgatgtccgataaatgatcatat

SEQ ID NO: 221163 - DNA, 25 bp, SARS Virus
tcgatgtccgagtaatgatcatatt

SEQ ID NO: 221164 - DNA, 25 bp, SARS Virus
cgatgtccgagatatgatcatattt

SEQ ID NO: 221165 - DNA, 25 bp, SARS Virus
gatgtccgagaattgatcatatttt

SEQ ID NO: 221166 - DNA, 25 bp, SARS Virus
atgtccgagaaatgatcatattttc

SEQ ID NO: 221167 - DNA, 25 bp, SARS Virus
tgtccgagaaattatcatattttct

SEQ ID NO: 221168 - DNA, 25 bp, SARS Virus
gtccgagaaatgttcatattttctt

SEQ ID NO: 221169 - DNA, 25 bp, SARS Virus
tccgagaaatgatcatattttcttc

SEQ ID NO: 221170 - DNA, 25 bp, SARS Virus
ccgagaaatgattatattttcttct

SEQ ID NO: 221171 - DNA, 25 bp, SARS Virus
cgagaaatgatcttattttcttctt

SEQ ID NO: 221172 - DNA, 25 bp, SARS Virus
gagaaatgatcatattttcttctta

SEQ ID NO: 221173 - DNA, 25 bp, SARS Virus
agaaatgatcattttttcttcttag

SEQ ID NO: 221174 - DNA, 25 bp, SARS Virus
gaaatgatcatattttcttcttagc

SEQ ID NO: 221175 - DNA, 25 bp, SARS Virus
aaatgatcatattttcttcttagcc

SEQ ID NO: 221176 - DNA, 25 bp, SARS Virus
aatgatcatattttcttcttagcct

SEQ ID NO: 221177 - DNA, 25 bp, SARS Virus
atgatcatattttcttcttagcctg

SEQ ID NO: 221178 - DNA, 25 bp, SARS Virus
tgatcatatttttttcttagcctgt

SEQ ID NO: 221179 - DNA, 25 bp, SARS Virus
gatcatattttcttcttagcctgtg

SEQ ID NO: 221180 - DNA, 25 bp, SARS Virus
atcatattttcttcttagcctgtgg

SEQ ID NO: 221181 - DNA, 25 bp, SARS Virus
tcatattttctttttagcctgtggt

SEQ ID NO: 221182 - DNA, 25 bp, SARS Virus
catattttcttcttagcctgtggta

SEQ ID NO: 221183 - DNA, 25 bp, SARS Virus
atattttcttcttagcctgtggtat

SEQ ID NO: 221184 - DNA, 25 bp, SARS Virus
tattttcttctttgcctgtggtatc

SEQ ID NO: 221185 - DNA, 25 bp, SARS Virus
attttcttcttatcctgtggtatca

SEQ ID NO: 221186 - DNA, 25 bp, SARS Virus
ttttcttcttagtctgtggtatcag

SEQ ID NO: 221187 - DNA, 25 bp, SARS Virus
tttcttcttagcttgtggtatcagt

SEQ ID NO: 221188 - DNA, 25 bp, SARS Virus
ttcttcttagcctgtggtatcagtt

SEQ ID NO: 221189 - DNA, 25 bp, SARS Virus
tcttcttagcctttggtatcagttg

SEQ ID NO: 221190 - DNA, 25 bp, SARS Virus
cttcttagcctgtggtatcagttgc

SEQ ID NO: 221191 - DNA, 25 bp, SARS Virus
ttcttagcctgttgtatcagttgct

SEQ ID NO: 221192 - DNA, 25 bp, SARS Virus
tcttagcctgtgttatcagttgcta

SEQ ID NO: 221193 - DNA, 25 bp, SARS Virus
cttagcctgtggtatcagttgctac

SEQ ID NO: 221194 - DNA, 25 bp, SARS Virus
ttagcctgtggtttcagttgctacg

SEQ ID NO: 221195 - DNA, 25 bp, SARS Virus
tagcctgtggtatcagttgctacgg

SEQ ID NO: 221196 - DNA, 25 bp, SARS Virus
agcctgtggtattagttgctacggg

SEQ ID NO: 221197 - DNA, 25 bp, SARS Virus
gcctgtggtatctgttgctacggga

SEQ ID NO: 221198 - DNA, 25 bp, SARS Virus
cctgtggtatcatttgctacgggag

SEQ ID NO: 221199 - DNA, 25 bp, SARS Virus
ctgtggtatcagttgctacgggaga

SEQ ID NO: 221200 - DNA, 25 bp, SARS Virus
tgtggtatcagttgctacgggagaa

SEQ ID NO: 221201 - DNA, 25 bp, SARS Virus
gtggtatcagtttctacgggagaac

SEQ ID NO: 221202 - DNA, 25 bp, SARS Virus
tggtatcagttgttacgggagaact

SEQ ID NO: 221203 - DNA, 25 bp, SARS Virus
ggtatcagttgctacgggagaactt

SEQ ID NO: 221204 - DNA, 25 bp, SARS Virus
gtatcagttgcttcgggagaactta

SEQ ID NO: 221205 - DNA, 25 bp, SARS Virus
tatcagttgctatgggagaacttaa

SEQ ID NO: 221206 - DNA, 25 bp, SARS Virus
atcagttgctactggagaacttaaa

SEQ ID NO: 221207 - DNA, 25 bp, SARS Virus
tcagttgctacgtgagaacttaaaa

SEQ ID NO: 221208 - DNA, 25 bp, SARS Virus
cagttgctacggtagaacttaaaat

SEQ ID NO: 221209 - DNA, 25 bp, SARS Virus
agttgctacgggtgaacttaaaatt

SEQ ID NO: 221210 - DNA, 25 bp, SARS Virus
gttgctacgggataacttaaaatta

SEQ ID NO: 221211 - DNA, 25 bp, SARS Virus
ttgctacgggagtacttaaaattaa

SEQ ID NO: 221212 - DNA, 25 bp, SARS Virus
tgctacgggagatcttaaaattaag

SEQ ID NO: 221213 - DNA, 25 bp, SARS Virus
gctacgggagaatttaaaattaagg

SEQ ID NO: 221214 - DNA, 25 bp, SARS Virus
ctacgggagaacttaaaattaagga

SEQ ID NO: 221215 - DNA, 25 bp, SARS Virus
tacgggagaacttaaaattaaggaa

SEQ ID NO: 221216 - DNA, 25 bp, SARS Virus
acgggagaactttaaattaaggaaa

SEQ ID NO: 221217 - DNA, 25 bp, SARS Virus
cgggagaacttataattaaggaaat

SEQ ID NO: 221218 - DNA, 25 bp, SARS Virus
gggagaacttaatattaaggaaata

SEQ ID NO: 221219 - DNA, 25 bp, SARS Virus
ggagaacttaaatttaaggaaatat

SEQ ID NO: 221220 - DNA, 25 bp, SARS Virus
gagaacttaaaattaaggaaatatg

SEQ ID NO: 221221 - DNA, 25 bp, SARS Virus
agaacttaaaattaaggaaatatga

SEQ ID NO: 221222 - DNA, 25 bp, SARS Virus
gaacttaaaatttaggaaatatgaa

SEQ ID NO: 221223 - DNA, 25 bp, SARS Virus
aacttaaaattatggaaatatgaat

SEQ ID NO: 221224 - DNA, 25 bp, SARS Virus
acttaaaattaatgaaatatgaatg

SEQ ID NO: 221225 - DNA, 25 bp, SARS Virus
cttaaaattaagtaaatatgaatgc

SEQ ID NO: 221226 - DNA, 25 bp, SARS Virus
ttaaaattaaggtaatatgaatgca

SEQ ID NO: 221227 - DNA, 25 bp, SARS Virus
taaaattaaggatatatgaatgcaa

SEQ ID NO: 221228 - DNA, 25 bp, SARS Virus
aaaattaaggaattatgaatgcaac

SEQ ID NO: 221229 - DNA, 25 bp, SARS Virus
aaattaaggaaatatgaatgcaacc

SEQ ID NO: 221230 - DNA, 25 bp, SARS Virus
aattaaggaaatttgaatgcaacct

SEQ ID NO: 221231 - DNA, 25 bp, SARS Virus
attaaggaaatatgaatgcaaccta

SEQ ID NO: 221232 - DNA, 25 bp, SARS Virus
ttaaggaaatattaatgcaacctac

SEQ ID NO: 221233 - DNA, 25 bp, SARS Virus
taaggaaatatgtatgcaacctacc

SEQ ID NO: 221234 - DNA, 25 bp, SARS Virus
aaggaaatatgattgcaacctacca

SEQ ID NO: 221235 - DNA, 25 bp, SARS Virus
aggaaatatgaatgcaacctaccaa

SEQ ID NO: 221236 - DNA, 25 bp, SARS Virus
ggaaatatgaattcaacctaccaac

SEQ ID NO: 221237 - DNA, 25 bp, SARS Virus
gaaatatgaatgtaacctaccaacg

SEQ ID NO: 221238 - DNA, 25 bp, SARS Virus
aaatatgaatgctacctaccaacgg

SEQ ID NO: 221239 - DNA, 25 bp, SARS Virus
aatatgaatgcatcctaccaacggt

SEQ ID NO: 221240 - DNA, 25 bp, SARS Virus
atatgaatgcaatctaccaacggta

SEQ ID NO: 221241 - DNA, 25 bp, SARS Virus
tatgaatgcaacttaccaacggtaa

SEQ ID NO: 221242 - DNA, 25 bp, SARS Virus
atgaatgcaacctaccaacggtaat

SEQ ID NO: 221243 - DNA, 25 bp, SARS Virus
tgaatgcaaccttccaacggtaata

SEQ ID NO: 221244 - DNA, 25 bp, SARS Virus
gaatgcaacctatcaacggtaatac

SEQ ID NO: 221245 - DNA, 25 bp, SARS Virus
aatgcaacctactaacggtaatacc

SEQ ID NO: 221246 - DNA, 25 bp, SARS Virus
atgcaacctacctacggtaataccg

SEQ ID NO: 221247 - DNA, 25 bp, SARS Virus
tgcaacctaccatcggtaataccga

SEQ ID NO: 221248 - DNA, 25 bp, SARS Virus
gcaacctaccaatggtaataccgag

SEQ ID NO: 221249 - DNA, 25 bp, SARS Virus
caacctaccaactgtaataccgaga

SEQ ID NO: 221250 - DNA, 25 bp, SARS Virus
aacctaccaacgttaataccgagat

SEQ ID NO: 221251 - DNA, 25 bp, SARS Virus
acctaccaacggtaataccgagatt

SEQ ID NO: 221252 - DNA, 25 bp, SARS Virus
cctaccaacggttataccgagattg

SEQ ID NO: 221253 - DNA, 25 bp, SARS Virus
ctaccaacggtattaccgagattgt

SEQ ID NO: 221254 - DNA, 25 bp, SARS Virus
taccaacggtaataccgagattgta

SEQ ID NO: 221255 - DNA, 25 bp, SARS Virus
accaacggtaattccgagattgtag

SEQ ID NO: 221256 - DNA, 25 bp, SARS Virus
ccaacggtaatatcgagattgtagg

SEQ ID NO: 221257 - DNA, 25 bp, SARS Virus
caacggtaatactgagattgtaggt

SEQ ID NO: 221258 - DNA, 25 bp, SARS Virus
aacggtaatacctagattgtaggta

SEQ ID NO: 221259 - DNA, 25 bp, SARS Virus
acggtaataccgtgattgtaggtac

SEQ ID NO: 221260 - DNA, 25 bp, SARS Virus
cggtaataccgatattgtaggtacg

SEQ ID NO: 221261 - DNA, 25 bp, SARS Virus
ggtaataccgagtttgtaggtacgt

SEQ ID NO: 221262 - DNA, 25 bp, SARS Virus
gtaataccgagattgtaggtacgta

SEQ ID NO: 221263 - DNA, 25 bp, SARS Virus
taataccgagattgtaggtacgtat

SEQ ID NO: 221264 - DNA, 25 bp, SARS Virus
aataccgagattttaggtacgtata

SEQ ID NO: 221265 - DNA, 25 bp, SARS Virus
ataccgagattgtaggtacgtatat

SEQ ID NO: 221266 - DNA, 25 bp, SARS Virus
taccgagattgttggtacgtatatc

SEQ ID NO: 221267 - DNA, 25 bp, SARS Virus
accgagattgtatgtacgtatatcc

SEQ ID NO: 221268 - DNA, 25 bp, SARS Virus
ccgagattgtagttacgtatatccg

SEQ ID NO: 221269 - DNA, 25 bp, SARS Virus
cgagattgtaggtacgtatatccgt

SEQ ID NO: 221270 - DNA, 25 bp, SARS Virus
gagattgtaggttcgtatatccgta

SEQ ID NO: 221271 - DNA, 25 bp, SARS Virus
agattgtaggtatgtatatccgtaa

SEQ ID NO: 221272 - DNA, 25 bp, SARS Virus
gattgtaggtacttatatccgtaat

SEQ ID NO: 221273 - DNA, 25 bp, SARS Virus
attgtaggtacgtatatccgtaatt

SEQ ID NO: 221274 - DNA, 25 bp, SARS Virus
ttgtaggtacgtttatccgtaatta

SEQ ID NO: 221275 - DNA, 25 bp, SARS Virus
tgtaggtacgtatatccgtaattaa

SEQ ID NO: 221276 - DNA, 25 bp, SARS Virus
gtaggtacgtatttccgtaattaaa

SEQ ID NO: 221277 - DNA, 25 bp, SARS Virus
taggtacgtatatccgtaattaaaa

SEQ ID NO: 221278 - DNA, 25 bp, SARS Virus
aggtacgtatattcgtaattaaaag

SEQ ID NO: 221279 - DNA, 25 bp, SARS Virus
ggtacgtatatctgtaattaaaaga

SEQ ID NO: 221280 - DNA, 25 bp, SARS Virus
gtacgtatatccttaattaaaagaa

SEQ ID NO: 221281 - DNA, 25 bp, SARS Virus
tacgtatatccgtaattaaaagaac

SEQ ID NO: 221282 - DNA, 25 bp, SARS Virus
acgtatatccgttattaaaagaaca

SEQ ID NO: 221283 - DNA, 25 bp, SARS Virus
cgtatatccgtatttaaaagaacag

SEQ ID NO: 221284 - DNA, 25 bp, SARS Virus
gtatatccgtaattaaaagaacaga

SEQ ID NO: 221285 - DNA, 25 bp, SARS Virus
tatatccgtaattaaaagaacagag

SEQ ID NO: 221286 - DNA, 25 bp, SARS Virus
atatccgtaatttaaagaacagaga

SEQ ID NO: 221287 - DNA, 25 bp, SARS Virus
tatccgtaattataagaacagagaa

SEQ ID NO: 221288 - DNA, 25 bp, SARS Virus
atccgtaattaatagaacagagaag

SEQ ID NO: 221289 - DNA, 25 bp, SARS Virus
tccgtaattaaatgaacagagaagt

SEQ ID NO: 221290 - DNA, 25 bp, SARS Virus
ccgtaattaaaataacagagaagtc

SEQ ID NO: 221291 - DNA, 25 bp, SARS Virus
cgtaattaaaagtacagagaagtcg

SEQ ID NO: 221292 - DNA, 25 bp, SARS Virus
gtaattaaaagatcagagaagtcgt

SEQ ID NO: 221293 - DNA, 25 bp, SARS Virus
taattaaaagaatagagaagtcgta

SEQ ID NO: 221294 - DNA, 25 bp, SARS Virus
aattaaaagaactgagaagtcgtac

SEQ ID NO: 221295 - DNA, 25 bp, SARS Virus
attaaaagaacatagaagtcgtact

SEQ ID NO: 221296 - DNA, 25 bp, SARS Virus
ttaaaagaacagtgaagtcgtactc

SEQ ID NO: 221297 - DNA, 25 bp, SARS Virus
taaaagaacagataagtcgtactcg

SEQ ID NO: 221298 - DNA, 25 bp, SARS Virus
aaaagaacagagtagtcgtactcgt

SEQ ID NO: 221299 - DNA, 25 bp, SARS Virus
aaagaacagagatgtcgtactcgtt

SEQ ID NO: 221300 - DNA, 25 bp, SARS Virus
aagaacagagaattcgtactcgttc

SEQ ID NO: 221301 - DNA, 25 bp, SARS Virus
agaacagagaagtcgtactcgttcg

SEQ ID NO: 221302 - DNA, 25 bp, SARS Virus
gaacagagaagttgtactcgttcgt

SEQ ID NO: 221303 - DNA, 25 bp, SARS Virus
aacagagaagtcttactcgttcgta

SEQ ID NO: 221304 - DNA, 25 bp, SARS Virus
acagagaagtcgtactcgttcgtaa

SEQ ID NO: 221305 - DNA, 25 bp, SARS Virus
cagagaagtcgttctcgttcgtaaa

SEQ ID NO: 221306 - DNA, 25 bp, SARS Virus
agagaagtcgtattcgttcgtaaag

SEQ ID NO: 221307 - DNA, 25 bp, SARS Virus
gagaagtcgtactcgttcgtaaaga

SEQ ID NO: 221308 - DNA, 25 bp, SARS Virus
agaagtcgtacttgttcgtaaagag

SEQ ID NO: 221309 - DNA, 25 bp, SARS Virus
gaagtcgtactctttcgtaaagaga

SEQ ID NO: 221310 - DNA, 25 bp, SARS Virus
aagtcgtactcgttcgtaaagagag

SEQ ID NO: 221311 - DNA, 25 bp, SARS Virus
agtcgtactcgttcgtaaagagagt

SEQ ID NO: 221312 - DNA, 25 bp, SARS Virus
gtcgtactcgtttgtaaagagagtt

SEQ ID NO: 221313 - DNA, 25 bp, SARS Virus
tcgtactcgttcttaaagagagttt

SEQ ID NO: 221314 - DNA, 25 bp, SARS Virus
cgtactcgttcgtaaagagagttta

SEQ ID NO: 221315 - DNA, 25 bp, SARS Virus
gtactcgttcgttaagagagtttaa

SEQ ID NO: 221316 - DNA, 25 bp, SARS Virus
tactcgttcgtatagagagtttaag

SEQ ID NO: 221317 - DNA, 25 bp, SARS Virus
actcgttcgtaatgagagtttaagg

SEQ ID NO: 221318 - DNA, 25 bp, SARS Virus
ctcgttcgtaaatagagtttaaggt

SEQ ID NO: 221319 - DNA, 25 bp, SARS Virus
tcgttcgtaaagtgagtttaaggtc

SEQ ID NO: 221320 - DNA, 25 bp, SARS Virus
cgttcgtaaagatagtttaaggtcc

SEQ ID NO: 221321 - DNA, 25 bp, SARS Virus
gttcgtaaagagtgtttaaggtcct

SEQ ID NO: 221322 - DNA, 25 bp, SARS Virus
ttcgtaaagagattttaaggtccta

SEQ ID NO: 221323 - DNA, 25 bp, SARS Virus
tcgtaaagagagtttaaggtcctat

SEQ ID NO: 221324 - DNA, 25 bp, SARS Virus
cgtaaagagagtttaaggtcctatg

SEQ ID NO: 221325 - DNA, 25 bp, SARS Virus
gtaaagagagtttaaggtcctatgt

SEQ ID NO: 221326 - DNA, 25 bp, SARS Virus
taaagagagttttaggtcctatgtc

SEQ ID NO: 221327 - DNA, 25 bp, SARS Virus
aaagagagtttatggtcctatgtca

SEQ ID NO: 221328 - DNA, 25 bp, SARS Virus
aagagagtttaatgtcctatgtcaa

SEQ ID NO: 221329 - DNA, 25 bp, SARS Virus
agagagtttaagttcctatgtcaag

SEQ ID NO: 221330 - DNA, 25 bp, SARS Virus
gagagtttaaggtcctatgtcaagg

SEQ ID NO: 221331 - DNA, 25 bp, SARS Virus
agagtttaaggttctatgtcaagga

SEQ ID NO: 221332 - DNA, 25 bp, SARS Virus
gagtttaaggtcttatgtcaaggat

SEQ ID NO: 221333 - DNA, 25 bp, SARS Virus
agtttaaggtcctatgtcaaggatc

SEQ ID NO: 221334 - DNA, 25 bp, SARS Virus
gtttaaggtcctttgtcaaggatct

SEQ ID NO: 221335 - DNA, 25 bp, SARS Virus
tttaaggtcctatgtcaaggatctt

SEQ ID NO: 221336 - DNA, 25 bp, SARS Virus
ttaaggtcctatttcaaggatctta

SEQ ID NO: 221337 - DNA, 25 bp, SARS Virus
taaggtcctatgtcaaggatcttag

SEQ ID NO: 221338 - DNA, 25 bp, SARS Virus
aaggtcctatgttaaggatcttaga

SEQ ID NO: 221339 - DNA, 25 bp, SARS Virus
aggtcctatgtctaggatcttagag

SEQ ID NO: 221340 - DNA, 25 bp, SARS Virus
ggtcctatgtcatggatcttagaga

SEQ ID NO: 221341 - DNA, 25 bp, SARS Virus
gtcctatgtcaatgatcttagagaa

SEQ ID NO: 221342 - DNA, 25 bp, SARS Virus
tcctatgtcaagtatcttagagaag

SEQ ID NO: 221343 - DNA, 25 bp, SARS Virus
cctatgtcaaggttcttagagaagg

SEQ ID NO: 221344 - DNA, 25 bp, SARS Virus
ctatgtcaaggatcttagagaagga

SEQ ID NO: 221345 - DNA, 25 bp, SARS Virus
tatgtcaaggattttagagaaggaa

SEQ ID NO: 221346 - DNA, 25 bp, SARS Virus
atgtcaaggatcttagagaaggaat

SEQ ID NO: 221347 - DNA, 25 bp, SARS Virus
tgtcaaggatcttagagaaggaatc

SEQ ID NO: 221348 - DNA, 25 bp, SARS Virus
gtcaaggatctttgagaaggaatcg

SEQ ID NO: 221349 - DNA, 25 bp, SARS Virus
tcaaggatcttatagaaggaatcgt

SEQ ID NO: 221350 - DNA, 25 bp, SARS Virus
caaggatcttagtgaaggaatcgta

SEQ ID NO: 221351 - DNA, 25 bp, SARS Virus
aaggatcttagataaggaatcgtaa

SEQ ID NO: 221352 - DNA, 25 bp, SARS Virus
aggatcttagagtaggaatcgtaat

SEQ ID NO: 221353 - DNA, 25 bp, SARS Virus
ggatcttagagatggaatcgtaatc

SEQ ID NO: 221354 - DNA, 25 bp, SARS Virus
gatcttagagaatgaatcgtaatcc

SEQ ID NO: 221355 - DNA, 25 bp, SARS Virus
atcttagagaagtaatcgtaatcca

SEQ ID NO: 221356 - DNA, 25 bp, SARS Virus
tcttagagaaggtatcgtaatccac

SEQ ID NO: 221357 - DNA, 25 bp, SARS Virus
cttagagaaggattcgtaatccacg

SEQ ID NO: 221358 - DNA, 25 bp, SARS Virus
ttagagaaggaatcgtaatccacga

SEQ ID NO: 221359 - DNA, 25 bp, SARS Virus
tagagaaggaattgtaatccacgaa

SEQ ID NO: 221360 - DNA, 25 bp, SARS Virus
agagaaggaatcttaatccacgaag

SEQ ID NO: 221361 - DNA, 25 bp, SARS Virus
gagaaggaatcgtaatccacgaaga

SEQ ID NO: 221362 - DNA, 25 bp, SARS Virus
agaaggaatcgttatccacgaagac

SEQ ID NO: 221363 - DNA, 25 bp, SARS Virus
gaaggaatcgtattccacgaagact

SEQ ID NO: 221364 - DNA, 25 bp, SARS Virus
aaggaatcgtaatccacgaagactt

SEQ ID NO: 221365 - DNA, 25 bp, SARS Virus
aggaatcgtaattcacgaagacttc

SEQ ID NO: 221366 - DNA, 25 bp, SARS Virus
ggaatcgtaatctacgaagacttcc

SEQ ID NO: 221367 - DNA, 25 bp, SARS Virus
gaatcgtaatcctcgaagacttcca

SEQ ID NO: 221368 - DNA, 25 bp, SARS Virus
aatcgtaatccatgaagacttccat

SEQ ID NO: 221369 - DNA, 25 bp, SARS Virus
atcgtaatccactaagacttccatc

SEQ ID NO: 221370 - DNA, 25 bp, SARS Virus
tcgtaatccacgtagacttccatca

SEQ ID NO: 221371 - DNA, 25 bp, SARS Virus
cgtaatccacgatgacttccatcat

SEQ ID NO: 221372 - DNA, 25 bp, SARS Virus
gtaatccacgaatacttccatcatg

SEQ ID NO: 221373 - DNA, 25 bp, SARS Virus
taatccacgaagtcttccatcatgt

SEQ ID NO: 221374 - DNA, 25 bp, SARS Virus
aatccacgaagatttccatcatgta

SEQ ID NO: 221375 - DNA, 25 bp, SARS Virus
atccacgaagacttccatcatgtat

SEQ ID NO: 221376 - DNA, 25 bp, SARS Virus
tccacgaagacttccatcatgtatt

SEQ ID NO: 221377 - DNA, 25 bp, SARS Virus
ccacgaagactttcatcatgtattt

SEQ ID NO: 221378 - DNA, 25 bp, SARS Virus
cacgaagacttctatcatgtatttt

SEQ ID NO: 221379 - DNA, 25 bp, SARS Virus
acgaagacttccttcatgtatttta

SEQ ID NO: 221380 - DNA, 25 bp, SARS Virus
cgaagacttccatcatgtattttac

SEQ ID NO: 221381 - DNA, 25 bp, SARS Virus
gaagacttccattatgtattttacg

SEQ ID NO: 221382 - DNA, 25 bp, SARS Virus
aagacttccatcttgtattttacgt

SEQ ID NO: 221383 - DNA, 25 bp, SARS Virus
agacttccatcatgtattttacgtc

SEQ ID NO: 221384 - DNA, 25 bp, SARS Virus
gacttccatcatttattttacgtct

SEQ ID NO: 221385 - DNA, 25 bp, SARS Virus
acttccatcatgtattttacgtcta

SEQ ID NO: 221386 - DNA, 25 bp, SARS Virus
cttccatcatgttttttacgtctaa

SEQ ID NO: 221387 - DNA, 25 bp, SARS Virus
ttccatcatgtattttacgtctaaa

SEQ ID NO: 221388 - DNA, 25 bp, SARS Virus
tccatcatgtattttacgtctaaac

SEQ ID NO: 221389 - DNA, 25 bp, SARS Virus
ccatcatgtattttacgtctaaacg

SEQ ID NO: 221390 - DNA, 25 bp, SARS Virus
catcatgtattttacgtctaaacgt

SEQ ID NO: 221391 - DNA, 25 bp, SARS Virus
atcatgtatttttcgtctaaacgta

SEQ ID NO: 221392 - DNA, 25 bp, SARS Virus
tcatgtattttatgtctaaacgtaa

SEQ ID NO: 221393 - DNA, 25 bp, SARS Virus
catgtattttacttctaaacgtaaa

SEQ ID NO: 221394 - DNA, 25 bp, SARS Virus
atgtattttacgtctaaacgtaaag

SEQ ID NO: 221395 - DNA, 25 bp, SARS Virus
tgtattttacgtttaaacgtaaaga

SEQ ID NO: 221396 - DNA, 25 bp, SARS Virus
gtattttacgtctaaacgtaaagaa

SEQ ID NO: 221397 - DNA, 25 bp, SARS Virus
tattttacgtcttaacgtaaagaat

SEQ ID NO: 221398 - DNA, 25 bp, SARS Virus
attttacgtctatacgtaaagaatt

SEQ ID NO: 221399 - DNA, 25 bp, SARS Virus
ttttacgtctaatcgtaaagaattc

SEQ ID NO: 221400 - DNA, 25 bp, SARS Virus
tttacgtctaaatgtaaagaattct

SEQ ID NO: 221401 - DNA, 25 bp, SARS Virus
ttacgtctaaacttaaagaattctc

SEQ ID NO: 221402 - DNA, 25 bp, SARS Virus
tacgtctaaacgtaaagaattctcg

SEQ ID NO: 221403 - DNA, 25 bp, SARS Virus
acgtctaaacgttaagaattctcgt

SEQ ID NO: 221404 - DNA, 25 bp, SARS Virus
cgtctaaacgtatagaattctcgtc

SEQ ID NO: 221405 - DNA, 25 bp, SARS Virus
gtctaaacgtaatgaattctcgtca

SEQ ID NO: 221406 - DNA, 25 bp, SARS Virus
tctaaacgtaaataattctcgtcag

SEQ ID NO: 221407 - DNA, 25 bp, SARS Virus
ctaaacgtaaagtattctcgtcaga

SEQ ID NO: 221408 - DNA, 25 bp, SARS Virus
taaacgtaaagatttctcgtcagaa

SEQ ID NO: 221409 - DNA, 25 bp, SARS Virus
aaacgtaaagaattctcgtcagaat

SEQ ID NO: 221410 - DNA, 25 bp, SARS Virus
aacgtaaagaattctcgtcagaatc

SEQ ID NO: 221411 - DNA, 25 bp, SARS Virus
acgtaaagaattttcgtcagaatcg

SEQ ID NO: 221412 - DNA, 25 bp, SARS Virus
cgtaaagaattctcgtcagaatcga

SEQ ID NO: 221413 - DNA, 25 bp, SARS Virus
gtaaagaattcttgtcagaatcgaa

SEQ ID NO: 221414 - DNA, 25 bp, SARS Virus
taaagaattctcttcagaatcgaag

SEQ ID NO: 221415 - DNA, 25 bp, SARS Virus
aaagaattctcgtcagaatcgaagg

SEQ ID NO: 221416 - DNA, 25 bp, SARS Virus
aagaattctcgttagaatcgaagga

SEQ ID NO: 221417 - DNA, 25 bp, SARS Virus
agaattctcgtctgaatcgaaggag

SEQ ID NO: 221418 - DNA, 25 bp, SARS Virus
gaattctcgtcataatcgaaggagt

SEQ ID NO: 221419 - DNA, 25 bp, SARS Virus
aattctcgtcagtatcgaaggagtt

SEQ ID NO: 221420 - DNA, 25 bp, SARS Virus
attctcgtcagattcgaaggagttc

SEQ ID NO: 221421 - DNA, 25 bp, SARS Virus
ttctcgtcagaatcgaaggagttca

SEQ ID NO: 221422 - DNA, 25 bp, SARS Virus
tctcgtcagaattgaaggagttcac

SEQ ID NO: 221423 - DNA, 25 bp, SARS Virus
ctcgtcagaatctaaggagttcaca

SEQ ID NO: 221424 - DNA, 25 bp, SARS Virus
tcgtcagaatcgtaggagttcacat

SEQ ID NO: 221425 - DNA, 25 bp, SARS Virus
cgtcagaatcgatggagttcacata

SEQ ID NO: 221426 - DNA, 25 bp, SARS Virus
gtcagaatcgaatgagttcacatat

SEQ ID NO: 221427 - DNA, 25 bp, SARS Virus
tcagaatcgaagtagttcacatatt

SEQ ID NO: 221428 - DNA, 25 bp, SARS Virus
cagaatcgaaggtgttcacatattg

SEQ ID NO: 221429 - DNA, 25 bp, SARS Virus
agaatcgaaggatttcacatattgg

SEQ ID NO: 221430 - DNA, 25 bp, SARS Virus
gaatcgaaggagttcacatattggt

SEQ ID NO: 221431 - DNA, 25 bp, SARS Virus
aatcgaaggagttcacatattggtc

SEQ ID NO: 221432 - DNA, 25 bp, SARS Virus
atcgaaggagtttacatattggtcg

SEQ ID NO: 221433 - DNA, 25 bp, SARS Virus
tcgaaggagttctcatattggtcgt

SEQ ID NO: 221434 - DNA, 25 bp, SARS Virus
cgaaggagttcatatattggtcgtg

SEQ ID NO: 221435 - DNA, 25 bp, SARS Virus
gaaggagttcacttattggtcgtgt

SEQ ID NO: 221436 - DNA, 25 bp, SARS Virus
aaggagttcacatattggtcgtgta

SEQ ID NO: 221437 - DNA, 25 bp, SARS Virus
aggagttcacattttggtcgtgtag

SEQ ID NO: 221438 - DNA, 25 bp, SARS Virus
ggagttcacatattggtcgtgtagg

SEQ ID NO: 221439 - DNA, 25 bp, SARS Virus
gagttcacatattggtcgtgtagga

SEQ ID NO: 221440 - DNA, 25 bp, SARS Virus
agttcacatatttgtcgtgtaggaa

SEQ ID NO: 221441 - DNA, 25 bp, SARS Virus
gttcacatattgttcgtgtaggaac

SEQ ID NO: 221442 - DNA, 25 bp, SARS Virus
ttcacatattggtcgtgtaggaaca

SEQ ID NO: 221443 - DNA, 25 bp, SARS Virus
tcacatattggttgtgtaggaacag

SEQ ID NO: 221444 - DNA, 25 bp, SARS Virus
cacatattggtcttgtaggaacagg

SEQ ID NO: 221445 - DNA, 25 bp, SARS Virus
acatattggtcgtgtaggaacaggt

SEQ ID NO: 221446 - DNA, 25 bp, SARS Virus
catattggtcgtttaggaacaggtc

SEQ ID NO: 221447 - DNA, 25 bp, SARS Virus
atattggtcgtgtaggaacaggtcc

SEQ ID NO: 221448 - DNA, 25 bp, SARS Virus
tattggtcgtgttggaacaggtccc

SEQ ID NO: 221449 - DNA, 25 bp, SARS Virus
attggtcgtgtatgaacaggtccca

SEQ ID NO: 221450 - DNA, 25 bp, SARS Virus
ttggtcgtgtagtaacaggtcccat

SEQ ID NO: 221451 - DNA, 25 bp, SARS Virus
tggtcgtgtaggtacaggtcccatg

SEQ ID NO: 221452 - DNA, 25 bp, SARS Virus
ggtcgtgtaggatcaggtcccatgc

SEQ ID NO: 221453 - DNA, 25 bp, SARS Virus
gtcgtgtaggaataggtcccatgca

SEQ ID NO: 221454 - DNA, 25 bp, SARS Virus
tcgtgtaggaactggtcccatgcac

SEQ ID NO: 221455 - DNA, 25 bp, SARS Virus
cgtgtaggaacatgtcccatgcacc

SEQ ID NO: 221456 - DNA, 25 bp, SARS Virus
gtgtaggaacagttcccatgcacca

SEQ ID NO: 221457 - DNA, 25 bp, SARS Virus
tgtaggaacaggtcccatgcaccaa

SEQ ID NO: 221458 - DNA, 25 bp, SARS Virus
gtaggaacaggttccatgcaccaat

SEQ ID NO: 221459 - DNA, 25 bp, SARS Virus
taggaacaggtctcatgcaccaata

SEQ ID NO: 221460 - DNA, 25 bp, SARS Virus
aggaacaggtcctatgcaccaatat

SEQ ID NO: 221461 - DNA, 25 bp, SARS Virus
ggaacaggtcccttgcaccaatata

SEQ ID NO: 221462 - DNA, 25 bp, SARS Virus
gaacaggtcccatgcaccaatatat

SEQ ID NO: 221463 - DNA, 25 bp, SARS Virus
aacaggtcccattcaccaatatatg

SEQ ID NO: 221464 - DNA, 25 bp, SARS Virus
acaggtcccatgtaccaatatatga

SEQ ID NO: 221465 - DNA, 25 bp, SARS Virus
caggtcccatgctccaatatatgag

SEQ ID NO: 221466 - DNA, 25 bp, SARS Virus
aggtcccatgcatcaatatatgagt

SEQ ID NO: 221467 - DNA, 25 bp, SARS Virus
ggtcccatgcactaatatatgagta

SEQ ID NO: 221468 - DNA, 25 bp, SARS Virus
gtcccatgcacctatatatgagtag

SEQ ID NO: 221469 - DNA, 25 bp, SARS Virus
tcccatgcaccattatatgagtagt

SEQ ID NO: 221470 - DNA, 25 bp, SARS Virus
cccatgcaccaatatatgagtagtt

SEQ ID NO: 221471 - DNA, 25 bp, SARS Virus
ccatgcaccaatttatgagtagttg

SEQ ID NO: 221472 - DNA, 25 bp, SARS Virus
catgcaccaatatatgagtagttga

SEQ ID NO: 221473 - DNA, 25 bp, SARS Virus
atgcaccaatatttgagtagttgac

SEQ ID NO: 221474 - DNA, 25 bp, SARS Virus
tgcaccaatatatgagtagttgacc

SEQ ID NO: 221475 - DNA, 25 bp, SARS Virus
gcaccaatatattagtagttgaccg

SEQ ID NO: 221476 - DNA, 25 bp, SARS Virus
caccaatatatgtgtagttgaccgt

SEQ ID NO: 221477 - DNA, 25 bp, SARS Virus
accaatatatgattagttgaccgtg

SEQ ID NO: 221478 - DNA, 25 bp, SARS Virus
ccaatatatgagtagttgaccgtga

SEQ ID NO: 221479 - DNA, 25 bp, SARS Virus
caatatatgagttgttgaccgtgaa

SEQ ID NO: 221480 - DNA, 25 bp, SARS Virus
aatatatgagtatttgaccgtgaaa

SEQ ID NO: 221481 - DNA, 25 bp, SARS Virus
atatatgagtagttgaccgtgaaag

SEQ ID NO: 221482 - DNA, 25 bp, SARS Virus
tatatgagtagttgaccgtgaaaga

SEQ ID NO: 221483 - DNA, 25 bp, SARS Virus
atatgagtagtttaccgtgaaagaa

SEQ ID NO: 221484 - DNA, 25 bp, SARS Virus
tatgagtagttgtccgtgaaagaag

SEQ ID NO: 221485 - DNA, 25 bp, SARS Virus
atgagtagttgatcgtgaaagaagt

SEQ ID NO: 221486 - DNA, 25 bp, SARS Virus
tgagtagttgactgtgaaagaagtt

SEQ ID NO: 221487 - DNA, 25 bp, SARS Virus
gagtagttgaccttgaaagaagttt

SEQ ID NO: 221488 - DNA, 25 bp, SARS Virus
agtagttgaccgtgaaagaagtttc

SEQ ID NO: 221489 - DNA, 25 bp, SARS Virus
gtagttgaccgttaaagaagtttcg

SEQ ID NO: 221490 - DNA, 25 bp, SARS Virus
tagttgaccgtgtaagaagtttcga

SEQ ID NO: 221491 - DNA, 25 bp, SARS Virus
agttgaccgtgatagaagtttcgag

SEQ ID NO: 221492 - DNA, 25 bp, SARS Virus
gttgaccgtgaatgaagtttcgaga

SEQ ID NO: 221493 - DNA, 25 bp, SARS Virus
ttgaccgtgaaataagtttcgagaa

SEQ ID NO: 221494 - DNA, 25 bp, SARS Virus
tgaccgtgaaagtagtttcgagaac

SEQ ID NO: 221495 - DNA, 25 bp, SARS Virus
gaccgtgaaagatgtttcgagaact

SEQ ID NO: 221496 - DNA, 25 bp, SARS Virus
accgtgaaagaattttcgagaactc

SEQ ID NO: 221497 - DNA, 25 bp, SARS Virus
ccgtgaaagaagtttcgagaactct

SEQ ID NO: 221498 - DNA, 25 bp, SARS Virus
cgtgaaagaagtttcgagaactctc

SEQ ID NO: 221499 - DNA, 25 bp, SARS Virus
gtgaaagaagtttcgagaactctcg

SEQ ID NO: 221500 - DNA, 25 bp, SARS Virus
tgaaagaagttttgagaactctcgt

SEQ ID NO: 221501 - DNA, 25 bp, SARS Virus
gaaagaagtttctagaactctcgta

SEQ ID NO: 221502 - DNA, 25 bp, SARS Virus
aaagaagtttcgtgaactctcgtag

SEQ ID NO: 221503 - DNA, 25 bp, SARS Virus
aagaagtttcgataactctcgtaga

SEQ ID NO: 221504 - DNA, 25 bp, SARS Virus
agaagtttcgagtactctcgtagag

SEQ ID NO: 221505 - DNA, 25 bp, SARS Virus
gaagtttcgagatctctcgtagagt

SEQ ID NO: 221506 - DNA, 25 bp, SARS Virus
aagtttcgagaattctcgtagagtc

SEQ ID NO: 221507 - DNA, 25 bp, SARS Virus
agtttcgagaactctcgtagagtca

SEQ ID NO: 221508 - DNA, 25 bp, SARS Virus
gtttcgagaactttcgtagagtcat

SEQ ID NO: 221509 - DNA, 25 bp, SARS Virus
tttcgagaactctcgtagagtcatc

SEQ ID NO: 221510 - DNA, 25 bp, SARS Virus
ttcgagaactcttgtagagtcatca

SEQ ID NO: 221511 - DNA, 25 bp, SARS Virus
tcgagaactctcttagagtcatcac

SEQ ID NO: 221512 - DNA, 25 bp, SARS Virus
cgagaactctcgtagagtcatcacg

SEQ ID NO: 221513 - DNA, 25 bp, SARS Virus
gagaactctcgttgagtcatcacgg

SEQ ID NO: 221514 - DNA, 25 bp, SARS Virus
agaactctcgtatagtcatcacggt

SEQ ID NO: 221515 - DNA, 25 bp, SARS Virus
gaactctcgtagtgtcatcacggtg

SEQ ID NO: 221516 - DNA, 25 bp, SARS Virus
aactctcgtagattcatcacggtgg

SEQ ID NO: 221517 - DNA, 25 bp, SARS Virus
actctcgtagagtcatcacggtggt

SEQ ID NO: 221518 - DNA, 25 bp, SARS Virus
ctctcgtagagttatcacggtggtc

SEQ ID NO: 221519 - DNA, 25 bp, SARS Virus
tctcgtagagtcttcacggtggtcg

SEQ ID NO: 221520 - DNA, 25 bp, SARS Virus
ctcgtagagtcatcacggtggtcgg

SEQ ID NO: 221521 - DNA, 25 bp, SARS Virus
tcgtagagtcattacggtggtcgga

SEQ ID NO: 221522 - DNA, 25 bp, SARS Virus
cgtagagtcatctcggtggtcggaa

SEQ ID NO: 221523 - DNA, 25 bp, SARS Virus
gtagagtcatcatggtggtcggaaa

SEQ ID NO: 221524 - DNA, 25 bp, SARS Virus
tagagtcatcactgtggtcggaaaa

SEQ ID NO: 221525 - DNA, 25 bp, SARS Virus
agagtcatcacgttggtcggaaaaa

SEQ ID NO: 221526 - DNA, 25 bp, SARS Virus
gagtcatcacggtggtcggaaaaac

SEQ ID NO: 221527 - DNA, 25 bp, SARS Virus
agtcatcacggttgtcggaaaaacc

SEQ ID NO: 221528 - DNA, 25 bp, SARS Virus
gtcatcacggtgttcggaaaaacct

SEQ ID NO: 221529 - DNA, 25 bp, SARS Virus
tcatcacggtggtcggaaaaacctc

SEQ ID NO: 221530 - DNA, 25 bp, SARS Virus
catcacggtggttggaaaaacctcc

SEQ ID NO: 221531 - DNA, 25 bp, SARS Virus
atcacggtggtctgaaaaacctccc

SEQ ID NO: 221532 - DNA, 25 bp, SARS Virus
tcacggtggtcgtaaaaacctccca

SEQ ID NO: 221533 - DNA, 25 bp, SARS Virus
cacggtggtcggtaaaacctcccat

SEQ ID NO: 221534 - DNA, 25 bp, SARS Virus
acggtggtcggataaacctcccata

SEQ ID NO: 221535 - DNA, 25 bp, SARS Virus
cggtggtcggaataacctcccataa

SEQ ID NO: 221536 - DNA, 25 bp, SARS Virus
ggtggtcggaaatacctcccataat

SEQ ID NO: 221537 - DNA, 25 bp, SARS Virus
gtggtcggaaaatcctcccataatg

SEQ ID NO: 221538 - DNA, 25 bp, SARS Virus
tggtcggaaaaatctcccataatgt

SEQ ID NO: 221539 - DNA, 25 bp, SARS Virus
ggtcggaaaaacttcccataatgtt

SEQ ID NO: 221540 - DNA, 25 bp, SARS Virus
gtcggaaaaacctcccataatgttg

SEQ ID NO: 221541 - DNA, 25 bp, SARS Virus
tcggaaaaaccttccataatgttgt

SEQ ID NO: 221542 - DNA, 25 bp, SARS Virus
cggaaaaacctctcataatgttgtg

SEQ ID NO: 221543 - DNA, 25 bp, SARS Virus
ggaaaaacctcctataatgttgtgt

SEQ ID NO: 221544 - DNA, 25 bp, SARS Virus
gaaaaacctcccttaatgttgtgtt

SEQ ID NO: 221545 - DNA, 25 bp, SARS Virus
aaaaacctcccataatgttgtgttc

SEQ ID NO: 221546 - DNA, 25 bp, SARS Virus
aaaacctcccattatgttgtgttca

SEQ ID NO: 221547 - DNA, 25 bp, SARS Virus
aaacctcccatattgttgtgttcac

SEQ ID NO: 221548 - DNA, 25 bp, SARS Virus
aacctcccataatgttgtgttcact

SEQ ID NO: 221549 - DNA, 25 bp, SARS Virus
acctcccataattttgtgttcacta

SEQ ID NO: 221550 - DNA, 25 bp, SARS Virus
cctcccataatgttgtgttcactat

SEQ ID NO: 221551 - DNA, 25 bp, SARS Virus
ctcccataatgttgtgttcactata

SEQ ID NO: 221552 - DNA, 25 bp, SARS Virus
tcccataatgttttgttcactatag

SEQ ID NO: 221553 - DNA, 25 bp, SARS Virus
cccataatgttgtgttcactatagt

SEQ ID NO: 221554 - DNA, 25 bp, SARS Virus
ccataatgttgttttcactatagtg

SEQ ID NO: 221555 - DNA, 25 bp, SARS Virus
cataatgttgtgttcactatagtgg

SEQ ID NO: 221556 - DNA, 25 bp, SARS Virus
ataatgttgtgttcactatagtggt

SEQ ID NO: 221557 - DNA, 25 bp, SARS Virus
taatgttgtgtttactatagtggtg

SEQ ID NO: 221558 - DNA, 25 bp, SARS Virus
aatgttgtgttctctatagtggtga

SEQ ID NO: 221559 - DNA, 25 bp, SARS Virus
atgttgtgttcattatagtggtgat

SEQ ID NO: 221560 - DNA, 25 bp, SARS Virus
tgttgtgttcactatagtggtgatc

SEQ ID NO: 221561 - DNA, 25 bp, SARS Virus
gttgtgttcactttagtggtgatca

SEQ ID NO: 221562 - DNA, 25 bp, SARS Virus
ttgtgttcactatagtggtgatcac

SEQ ID NO: 221563 - DNA, 25 bp, SARS Virus
tgtgttcactattgtggtgatcact

SEQ ID NO: 221564 - DNA, 25 bp, SARS Virus
gtgttcactatattggtgatcacta

SEQ ID NO: 221565 - DNA, 25 bp, SARS Virus
tgttcactatagtggtgatcactat

SEQ ID NO: 221566 - DNA, 25 bp, SARS Virus
gttcactatagttgtgatcactatt

SEQ ID NO: 221567 - DNA, 25 bp, SARS Virus
ttcactatagtgttgatcactattg

SEQ ID NO: 221568 - DNA, 25 bp, SARS Virus
tcactatagtggtgatcactattgt

SEQ ID NO: 221569 - DNA, 25 bp, SARS Virus
cactatagtggttatcactattgta

SEQ ID NO: 221570 - DNA, 25 bp, SARS Virus
actatagtggtgttcactattgtag

SEQ ID NO: 221571 - DNA, 25 bp, SARS Virus
ctatagtggtgatcactattgtagt

SEQ ID NO: 221572 - DNA, 25 bp, SARS Virus
tatagtggtgattactattgtagtg

SEQ ID NO: 221573 - DNA, 25 bp, SARS Virus
atagtggtgatctctattgtagtgg

SEQ ID NO: 221574 - DNA, 25 bp, SARS Virus
tagtggtgatcattattgtagtgga

SEQ ID NO: 221575 - DNA, 25 bp, SARS Virus
agtggtgatcactattgtagtggat

SEQ ID NO: 221576 - DNA, 25 bp, SARS Virus
gtggtgatcacttttgtagtggatg

SEQ ID NO: 221577 - DNA, 25 bp, SARS Virus
tggtgatcactattgtagtggatgg

SEQ ID NO: 221578 - DNA, 25 bp, SARS Virus
ggtgatcactattgtagtggatggt

SEQ ID NO: 221579 - DNA, 25 bp, SARS Virus
gtgatcactattttagtggatggta

SEQ ID NO: 221580 - DNA, 25 bp, SARS Virus
tgatcactattgtagtggatggtac

SEQ ID NO: 221581 - DNA, 25 bp, SARS Virus
gatcactattgttgtggatggtaca

SEQ ID NO: 221582 - DNA, 25 bp, SARS Virus
atcactattgtattggatggtacat

SEQ ID NO: 221583 - DNA, 25 bp, SARS Virus
tcactattgtagtggatggtacatt

SEQ ID NO: 221584 - DNA, 25 bp, SARS Virus
cactattgtagttgatggtacattc

SEQ ID NO: 221585 - DNA, 25 bp, SARS Virus
actattgtagtgaatggtacattcc

SEQ ID NO: 221586 - DNA, 25 bp, SARS Virus
ctattgtagtggatggtacattcca

SEQ ID NO: 221587 - DNA, 25 bp, SARS Virus
tattgtagtggaaggtacattccac

SEQ ID NO: 221588 - DNA, 25 bp, SARS Virus
attgtagtggatagtacattccacg

SEQ ID NO: 221589 - DNA, 25 bp, SARS Virus
ttgtagtggatgatacattccacgt

SEQ ID NO: 221590 - DNA, 25 bp, SARS Virus
tgtagtggatggaacattccacgta

SEQ ID NO: 221591 - DNA, 25 bp, SARS Virus
gtagtggatggtacattccacgtag

SEQ ID NO: 221592 - DNA, 25 bp, SARS Virus
tagtggatggtaaattccacgtagg

SEQ ID NO: 221593 - DNA, 25 bp, SARS Virus
agtggatggtacattccacgtagga

SEQ ID NO: 221594 - DNA, 25 bp, SARS Virus
gtggatggtacaatccacgtaggaa

SEQ ID NO: 221595 - DNA, 25 bp, SARS Virus
tggatggtacataccacgtaggaag

SEQ ID NO: 221596 - DNA, 25 bp, SARS Virus
ggatggtacattacacgtaggaaga

SEQ ID NO: 221597 - DNA, 25 bp, SARS Virus
gatggtacattcaacgtaggaagag

SEQ ID NO: 221598 - DNA, 25 bp, SARS Virus
atggtacattccacgtaggaagagt

SEQ ID NO: 221599 - DNA, 25 bp, SARS Virus
tggtacattccaagtaggaagagtt

SEQ ID NO: 221600 - DNA, 25 bp, SARS Virus
ggtacattccacataggaagagttc

SEQ ID NO: 221601 - DNA, 25 bp, SARS Virus
gtacattccacgaaggaagagttcc

SEQ ID NO: 221602 - DNA, 25 bp, SARS Virus
tacattccacgtaggaagagttcct

SEQ ID NO: 221603 - DNA, 25 bp, SARS Virus
acattccacgtaagaagagttcctt

SEQ ID NO: 221604 - DNA, 25 bp, SARS Virus
cattccacgtagaaagagttccttt

SEQ ID NO: 221605 - DNA, 25 bp, SARS Virus
attccacgtaggaagagttcctttc

SEQ ID NO: 221606 - DNA, 25 bp, SARS Virus
ttccacgtaggaagagttcctttct

SEQ ID NO: 221607 - DNA, 25 bp, SARS Virus
tccacgtaggaaaagttcctttctg

SEQ ID NO: 221608 - DNA, 25 bp, SARS Virus
ccacgtaggaagagttcctttctgt

SEQ ID NO: 221609 - DNA, 25 bp, SARS Virus
cacgtaggaagaattcctttctgta

SEQ ID NO: 221610 - DNA, 25 bp, SARS Virus
acgtaggaagagatcctttctgtat

SEQ ID NO: 221611 - DNA, 25 bp, SARS Virus
cgtaggaagagtacctttctgtata

SEQ ID NO: 221612 - DNA, 25 bp, SARS Virus
gtaggaagagttactttctgtatag

SEQ ID NO: 221613 - DNA, 25 bp, SARS Virus
taggaagagttcatttctgtataga

SEQ ID NO: 221614 - DNA, 25 bp, SARS Virus
aggaagagttccattctgtatagaa

SEQ ID NO: 221615 - DNA, 25 bp, SARS Virus
ggaagagttcctatctgtatagaag

SEQ ID NO: 221616 - DNA, 25 bp, SARS Virus
gaagagttccttactgtatagaagt

SEQ ID NO: 221617 - DNA, 25 bp, SARS Virus
aagagttcctttatgtatagaagtg

SEQ ID NO: 221618 - DNA, 25 bp, SARS Virus
agagttcctttcagtatagaagtgg

SEQ ID NO: 221619 - DNA, 25 bp, SARS Virus
gagttcctttctatatagaagtgga

SEQ ID NO: 221620 - DNA, 25 bp, SARS Virus
agttcctttctgaatagaagtggag

SEQ ID NO: 221621 - DNA, 25 bp, SARS Virus
gttcctttctgtatagaagtggaga

SEQ ID NO: 221622 - DNA, 25 bp, SARS Virus
ttcctttctgtaaagaagtggagat

SEQ ID NO: 221623 - DNA, 25 bp, SARS Virus
tcctttctgtatagaagtggagatt

SEQ ID NO: 221624 - DNA, 25 bp, SARS Virus
cctttctgtataaaagtggagattc

SEQ ID NO: 221625 - DNA, 25 bp, SARS Virus
ctttctgtatagaagtggagattcg

SEQ ID NO: 221626 - DNA, 25 bp, SARS Virus
tttctgtatagaagtggagattcgt

SEQ ID NO: 221627 - DNA, 25 bp, SARS Virus
ttctgtatagaaatggagattcgta

SEQ ID NO: 221628 - DNA, 25 bp, SARS Virus
tctgtatagaagaggagattcgtac

SEQ ID NO: 221629 - DNA, 25 bp, SARS Virus
ctgtatagaagtagagattcgtaca

SEQ ID NO: 221630 - DNA, 25 bp, SARS Virus
tgtatagaagtgaagattcgtacaa

SEQ ID NO: 221631 - DNA, 25 bp, SARS Virus
gtatagaagtggagattcgtacaag

SEQ ID NO: 221632 - DNA, 25 bp, SARS Virus
tatagaagtggaaattcgtacaaga

SEQ ID NO: 221633 - DNA, 25 bp, SARS Virus
atagaagtggagattcgtacaagac

SEQ ID NO: 221634 - DNA, 25 bp, SARS Virus
tagaagtggagaatcgtacaagact

SEQ ID NO: 221635 - DNA, 25 bp, SARS Virus
agaagtggagatacgtacaagactc

SEQ ID NO: 221636 - DNA, 25 bp, SARS Virus
gaagtggagattagtacaagactct

SEQ ID NO: 221637 - DNA, 25 bp, SARS Virus
aagtggagattcatacaagactctt

SEQ ID NO: 221638 - DNA, 25 bp, SARS Virus
agtggagattcgaacaagactctta

SEQ ID NO: 221639 - DNA, 25 bp, SARS Virus
gtggagattcgtacaagactcttag

SEQ ID NO: 221640 - DNA, 25 bp, SARS Virus
tggagattcgtaaaagactcttagt

SEQ ID NO: 221641 - DNA, 25 bp, SARS Virus
ggagattcgtacaagactcttagta

SEQ ID NO: 221642 - DNA, 25 bp, SARS Virus
gagattcgtacaagactcttagtac

SEQ ID NO: 221643 - DNA, 25 bp, SARS Virus
agattcgtacaaaactcttagtacc

SEQ ID NO: 221644 - DNA, 25 bp, SARS Virus
gattcgtacaagactcttagtacca

SEQ ID NO: 221645 - DNA, 25 bp, SARS Virus
attcgtacaagaatcttagtaccat

SEQ ID NO: 221646 - DNA, 25 bp, SARS Virus
ttcgtacaagacacttagtaccatt

SEQ ID NO: 221647 - DNA, 25 bp, SARS Virus
tcgtacaagactattagtaccattt

SEQ ID NO: 221648 - DNA, 25 bp, SARS Virus
cgtacaagactcatagtaccatttc

SEQ ID NO: 221649 - DNA, 25 bp, SARS Virus
gtacaagactctaagtaccatttcg

SEQ ID NO: 221650 - DNA, 25 bp, SARS Virus
tacaagactcttagtaccatttcga

SEQ ID NO: 221651 - DNA, 25 bp, SARS Virus
acaagactcttaataccatttcgaa

SEQ ID NO: 221652 - DNA, 25 bp, SARS Virus
caagactcttagaaccatttcgaat

SEQ ID NO: 221653 - DNA, 25 bp, SARS Virus
aagactcttagtaccatttcgaatg

SEQ ID NO: 221654 - DNA, 25 bp, SARS Virus
agactcttagtaacatttcgaatgg

SEQ ID NO: 221655 - DNA, 25 bp, SARS Virus
gactcttagtacaatttcgaatggt

SEQ ID NO: 221656 - DNA, 25 bp, SARS Virus
actcttagtaccatttcgaatggta

SEQ ID NO: 221657 - DNA, 25 bp, SARS Virus
ctcttagtaccaattcgaatggtaa

SEQ ID NO: 221658 - DNA, 25 bp, SARS Virus
tcttagtaccatatcgaatggtaac

SEQ ID NO: 221659 - DNA, 25 bp, SARS Virus
cttagtaccattacgaatggtaact

SEQ ID NO: 221660 - DNA, 25 bp, SARS Virus
ttagtaccatttagaatggtaacta

SEQ ID NO: 221661 - DNA, 25 bp, SARS Virus
tagtaccatttcaaatggtaactat

SEQ ID NO: 221662 - DNA, 25 bp, SARS Virus
agtaccatttcgaatggtaactata

SEQ ID NO: 221663 - DNA, 25 bp, SARS Virus
gtaccatttcgaatggtaactatag

SEQ ID NO: 221664 - DNA, 25 bp, SARS Virus
taccatttcgaaaggtaactatagt

SEQ ID NO: 221665 - DNA, 25 bp, SARS Virus
accatttcgaatagtaactatagtc

SEQ ID NO: 221666 - DNA, 25 bp, SARS Virus
ccatttcgaatgataactatagtcg

SEQ ID NO: 221667 - DNA, 25 bp, SARS Virus
catttcgaatggaaactatagtcgt

SEQ ID NO: 221668 - DNA, 25 bp, SARS Virus
atttcgaatggtaactatagtcgtt

SEQ ID NO: 221669 - DNA, 25 bp, SARS Virus
tttcgaatggtaactatagtcgttt

SEQ ID NO: 221670 - DNA, 25 bp, SARS Virus
ttcgaatggtaaatatagtcgtttg

SEQ ID NO: 221671 - DNA, 25 bp, SARS Virus
tcgaatggtaacaatagtcgtttgt

SEQ ID NO: 221672 - DNA, 25 bp, SARS Virus
cgaatggtaactatagtcgtttgtt

SEQ ID NO: 221673 - DNA, 25 bp, SARS Virus
gaatggtaactaaagtcgtttgttc

SEQ ID NO: 221674 - DNA, 25 bp, SARS Virus
aatggtaactatagtcgtttgttct

SEQ ID NO: 221675 - DNA, 25 bp, SARS Virus
atggtaactataatcgtttgttctc

SEQ ID NO: 221676 - DNA, 25 bp, SARS Virus
tggtaactatagacgtttgttctca

SEQ ID NO: 221677 - DNA, 25 bp, SARS Virus
ggtaactatagtagtttgttctcat

SEQ ID NO: 221678 - DNA, 25 bp, SARS Virus
gtaactatagtcatttgttctcatt

SEQ ID NO: 221679 - DNA, 25 bp, SARS Virus
taactatagtcgattgttctcattg

SEQ ID NO: 221680 - DNA, 25 bp, SARS Virus
aactatagtcgtatgttctcattga

SEQ ID NO: 221681 - DNA, 25 bp, SARS Virus
actatagtcgttagttctcattgaa

SEQ ID NO: 221682 - DNA, 25 bp, SARS Virus
ctatagtcgtttattctcattgaat

SEQ ID NO: 221683 - DNA, 25 bp, SARS Virus
tatagtcgtttgatctcattgaata

SEQ ID NO: 221684 - DNA, 25 bp, SARS Virus
atagtcgtttgtactcattgaataa

SEQ ID NO: 221685 - DNA, 25 bp, SARS Virus
tagtcgtttgttatcattgaataac

SEQ ID NO: 221686 - DNA, 25 bp, SARS Virus
agtcgtttgttcacattgaataacc

SEQ ID NO: 221687 - DNA, 25 bp, SARS Virus
gtcgtttgttctaattgaataacca

SEQ ID NO: 221688 - DNA, 25 bp, SARS Virus
tcgtttgttctcattgaataaccat

SEQ ID NO: 221689 - DNA, 25 bp, SARS Virus
cgtttgttctcaatgaataaccatt

SEQ ID NO: 221690 - DNA, 25 bp, SARS Virus
gtttgttctcatagaataaccattc

SEQ ID NO: 221691 - DNA, 25 bp, SARS Virus
tttgttctcattaaataaccattct

SEQ ID NO: 221692 - DNA, 25 bp, SARS Virus
ttgttctcattgaataaccattctt

SEQ ID NO: 221693 - DNA, 25 bp, SARS Virus
tgttctcattgaataaccattcttt

SEQ ID NO: 221694 - DNA, 25 bp, SARS Virus
gttctcattgaaaaaccattctttg

SEQ ID NO: 221695 - DNA, 25 bp, SARS Virus
ttctcattgaataaccattctttga

SEQ ID NO: 221696 - DNA, 25 bp, SARS Virus
tctcattgaataaccattctttgaa

SEQ ID NO: 221697 - DNA, 25 bp, SARS Virus
ctcattgaataaacattctttgaat

SEQ ID NO: 221698 - DNA, 25 bp, SARS Virus
tcattgaataacaattctttgaatc

SEQ ID NO: 221699 - DNA, 25 bp, SARS Virus
cattgaataaccattctttgaatca

SEQ ID NO: 221700 - DNA, 25 bp, SARS Virus
attgaataaccaatctttgaatcaa

SEQ ID NO: 221701 - DNA, 25 bp, SARS Virus
ttgaataaccatactttgaatcaaa

SEQ ID NO: 221702 - DNA, 25 bp, SARS Virus
tgaataaccattatttgaatcaaag

SEQ ID NO: 221703 - DNA, 25 bp, SARS Virus
gaataaccattcattgaatcaaaga

SEQ ID NO: 221704 - DNA, 25 bp, SARS Virus
aataaccattctatgaatcaaagaa

SEQ ID NO: 221705 - DNA, 25 bp, SARS Virus
ataaccattcttagaatcaaagaag

SEQ ID NO: 221706 - DNA, 25 bp, SARS Virus
taaccattctttaaatcaaagaagg

SEQ ID NO: 221707 - DNA, 25 bp, SARS Virus
aaccattctttgaatcaaagaaggt

SEQ ID NO: 221708 - DNA, 25 bp, SARS Virus
accattctttgaatcaaagaaggtc

SEQ ID NO: 221709 - DNA, 25 bp, SARS Virus
ccattctttgaaacaaagaaggtca

SEQ ID NO: 221710 - DNA, 25 bp, SARS Virus
cattctttgaataaaagaaggtcac

SEQ ID NO: 221711 - DNA, 25 bp, SARS Virus
attctttgaatcaaagaaggtcaca

SEQ ID NO: 221712 - DNA, 25 bp, SARS Virus
ttctttgaatcaaagaaggtcacaa

SEQ ID NO: 221713 - DNA, 25 bp, SARS Virus
tctttgaatcaaagaaggtcacaac

SEQ ID NO: 221714 - DNA, 25 bp, SARS Virus
ctttgaatcaaaaaaggtcacaaca

SEQ ID NO: 221715 - DNA, 25 bp, SARS Virus
tttgaatcaaagaaggtcacaacac

SEQ ID NO: 221716 - DNA, 25 bp, SARS Virus
ttgaatcaaagaaggtcacaacacc

SEQ ID NO: 221717 - DNA, 25 bp, SARS Virus
tgaatcaaagaaagtcacaacacca

SEQ ID NO: 221718 - DNA, 25 bp, SARS Virus
gaatcaaagaagatcacaacaccat

SEQ ID NO: 221719 - DNA, 25 bp, SARS Virus
aatcaaagaaggacacaacaccatt

SEQ ID NO: 221720 - DNA, 25 bp, SARS Virus
atcaaagaaggtaacaacaccattg

SEQ ID NO: 221721 - DNA, 25 bp, SARS Virus
tcaaagaaggtcacaacaccattgg

SEQ ID NO: 221722 - DNA, 25 bp, SARS Virus
caaagaaggtcaaaacaccattgga

SEQ ID NO: 221723 - DNA, 25 bp, SARS Virus
aaagaaggtcacaacaccattggag

SEQ ID NO: 221724 - DNA, 25 bp, SARS Virus
aagaaggtcacaacaccattggagt

SEQ ID NO: 221725 - DNA, 25 bp, SARS Virus
agaaggtcacaaaaccattggagta

SEQ ID NO: 221726 - DNA, 25 bp, SARS Virus
gaaggtcacaacaccattggagtag

SEQ ID NO: 221727 - DNA, 25 bp, SARS Virus
aaggtcacaacaacattggagtagt

SEQ ID NO: 221728 - DNA, 25 bp, SARS Virus
aggtcacaacacaattggagtagtt

SEQ ID NO: 221729 - DNA, 25 bp, SARS Virus
ggtcacaacaccattggagtagtta

SEQ ID NO: 221730 - DNA, 25 bp, SARS Virus
gtcacaacaccaatggagtagttac

SEQ ID NO: 221731 - DNA, 25 bp, SARS Virus
tcacaacaccataggagtagttacg

SEQ ID NO: 221732 - DNA, 25 bp, SARS Virus
cacaacaccattagagtagttacgt

SEQ ID NO: 221733 - DNA, 25 bp, SARS Virus
acaacaccattgaagtagttacgtc

SEQ ID NO: 221734 - DNA, 25 bp, SARS Virus
caacaccattggagtagttacgtcc

SEQ ID NO: 221735 - DNA, 25 bp, SARS Virus
aacaccattggaatagttacgtccg

SEQ ID NO: 221736 - DNA, 25 bp, SARS Virus
acaccattggagaagttacgtccgg

SEQ ID NO: 221737 - DNA, 25 bp, SARS Virus
caccattggagtagttacgtccgga

SEQ ID NO: 221738 - DNA, 25 bp, SARS Virus
accattggagtaattacgtccggaa

SEQ ID NO: 221739 - DNA, 25 bp, SARS Virus
ccattggagtagatacgtccggaat

SEQ ID NO: 221740 - DNA, 25 bp, SARS Virus
cattggagtagtaacgtccggaatt

SEQ ID NO: 221741 - DNA, 25 bp, SARS Virus
attggagtagttacgtccggaatta

SEQ ID NO: 221742 - DNA, 25 bp, SARS Virus
ttggagtagttaagtccggaattaa

SEQ ID NO: 221743 - DNA, 25 bp, SARS Virus
tggagtagttacatccggaattaaa

SEQ ID NO: 221744 - DNA, 25 bp, SARS Virus
ggagtagttacgaccggaattaaaa

SEQ ID NO: 221745 - DNA, 25 bp, SARS Virus
gagtagttacgtacggaattaaaaa

SEQ ID NO: 221746 - DNA, 25 bp, SARS Virus
agtagttacgtcaggaattaaaaac

SEQ ID NO: 221747 - DNA, 25 bp, SARS Virus
gtagttacgtccagaattaaaaacc

SEQ ID NO: 221748 - DNA, 25 bp, SARS Virus
tagttacgtccgaaattaaaaaccg

SEQ ID NO: 221749 - DNA, 25 bp, SARS Virus
agttacgtccggaattaaaaaccga

SEQ ID NO: 221750 - DNA, 25 bp, SARS Virus
gttacgtccggaattaaaaaccgaa

SEQ ID NO: 221751 - DNA, 25 bp, SARS Virus
ttacgtccggaaataaaaaccgaag

SEQ ID NO: 221752 - DNA, 25 bp, SARS Virus
tacgtccggaataaaaaaccgaagt

SEQ ID NO: 221753 - DNA, 25 bp, SARS Virus
acgtccggaattaaaaaccgaagtg

SEQ ID NO: 221754 - DNA, 25 bp, SARS Virus
cgtccggaattaaaaaccgaagtgt

SEQ ID NO: 221755 - DNA, 25 bp, SARS Virus
gtccggaattaaaaaccgaagtgta

SEQ ID NO: 221756 - DNA, 25 bp, SARS Virus
tccggaattaaaaaccgaagtgtag

SEQ ID NO: 221757 - DNA, 25 bp, SARS Virus
ccggaattaaaaaccgaagtgtagc

SEQ ID NO: 221758 - DNA, 25 bp, SARS Virus
cggaattaaaaaacgaagtgtagct

SEQ ID NO: 221759 - DNA, 25 bp, SARS Virus
ggaattaaaaacagaagtgtagctg

SEQ ID NO: 221760 - DNA, 25 bp, SARS Virus
gaattaaaaaccaaagtgtagctgt

SEQ ID NO: 221761 - DNA, 25 bp, SARS Virus
aattaaaaaccgaagtgtagctgtc

SEQ ID NO: 221762 - DNA, 25 bp, SARS Virus
attaaaaaccgaagtgtagctgtcc

SEQ ID NO: 221763 - DNA, 25 bp, SARS Virus
ttaaaaaccgaaatgtagctgtccg

SEQ ID NO: 221764 - DNA, 25 bp, SARS Virus
taaaaaccgaagagtagctgtccga

SEQ ID NO: 221765 - DNA, 25 bp, SARS Virus
aaaaaccgaagtatagctgtccgaa

SEQ ID NO: 221766 - DNA, 25 bp, SARS Virus
aaaaccgaagtgaagctgtccgaag

SEQ ID NO: 221767 - DNA, 25 bp, SARS Virus
aaaccgaagtgtagctgtccgaaga

SEQ ID NO: 221768 - DNA, 25 bp, SARS Virus
aaccgaagtgtaactgtccgaagac

SEQ ID NO: 221769 - DNA, 25 bp, SARS Virus
accgaagtgtagatgtccgaagaca

SEQ ID NO: 221770 - DNA, 25 bp, SARS Virus
ccgaagtgtagcagtccgaagacat

SEQ ID NO: 221771 - DNA, 25 bp, SARS Virus
cgaagtgtagctatccgaagacatg

SEQ ID NO: 221772 - DNA, 25 bp, SARS Virus
gaagtgtagctgaccgaagacatgc

SEQ ID NO: 221773 - DNA, 25 bp, SARS Virus
aagtgtagctgtacgaagacatgct

SEQ ID NO: 221774 - DNA, 25 bp, SARS Virus
agtgtagctgtcagaagacatgctg

SEQ ID NO: 221775 - DNA, 25 bp, SARS Virus
gtgtagctgtccaaagacatgctgt

SEQ ID NO: 221776 - DNA, 25 bp, SARS Virus
tgtagctgtccgaagacatgctgtc

SEQ ID NO: 221777 - DNA, 25 bp, SARS Virus
gtagctgtccgaagacatgctgtct

SEQ ID NO: 221778 - DNA, 25 bp, SARS Virus
tagctgtccgaaaacatgctgtcta

SEQ ID NO: 221779 - DNA, 25 bp, SARS Virus
agctgtccgaagacatgctgtctaa

SEQ ID NO: 221780 - DNA, 25 bp, SARS Virus
gctgtccgaagaaatgctgtctaaa

SEQ ID NO: 221781 - DNA, 25 bp, SARS Virus
ctgtccgaagacatgctgtctaaag

SEQ ID NO: 221782 - DNA, 25 bp, SARS Virus
tgtccgaagacaagctgtctaaaga

SEQ ID NO: 221783 - DNA, 25 bp, SARS Virus
gtccgaagacatactgtctaaagag

SEQ ID NO: 221784 - DNA, 25 bp, SARS Virus
tccgaagacatgatgtctaaagagg

SEQ ID NO: 221785 - DNA, 25 bp, SARS Virus
ccgaagacatgcagtctaaagagga

SEQ ID NO: 221786 - DNA, 25 bp, SARS Virus
cgaagacatgctatctaaagaggag

SEQ ID NO: 221787 - DNA, 25 bp, SARS Virus
gaagacatgctgactaaagaggagt

SEQ ID NO: 221788 - DNA, 25 bp, SARS Virus
aagacatgctgtataaagaggagtc

SEQ ID NO: 221789 - DNA, 25 bp, SARS Virus
agacatgctgtcaaaagaggagtca

SEQ ID NO: 221790 - DNA, 25 bp, SARS Virus
gacatgctgtctaaagaggagtcaa

SEQ ID NO: 221791 - DNA, 25 bp, SARS Virus
acatgctgtctaaagaggagtcaaa

SEQ ID NO: 221792 - DNA, 25 bp, SARS Virus
catgctgtctaaagaggagtcaaaa

SEQ ID NO: 221793 - DNA, 25 bp, SARS Virus
atgctgtctaaaaaggagtcaaaac

SEQ ID NO: 221794 - DNA, 25 bp, SARS Virus
tgctgtctaaagaggagtcaaaacc

SEQ ID NO: 221795 - DNA, 25 bp, SARS Virus
gctgtctaaagaagagtcaaaacct

SEQ ID NO: 221796 - DNA, 25 bp, SARS Virus
ctgtctaaagagaagtcaaaacctt

SEQ ID NO: 221797 - DNA, 25 bp, SARS Virus
tgtctaaagaggagtcaaaacctta

SEQ ID NO: 221798 - DNA, 25 bp, SARS Virus
gtctaaagaggaatcaaaaccttag

SEQ ID NO: 221799 - DNA, 25 bp, SARS Virus
tctaaagaggagacaaaaccttaga

SEQ ID NO: 221800 - DNA, 25 bp, SARS Virus
ctaaagaggagtaaaaaccttagaa

SEQ ID NO: 221801 - DNA, 25 bp, SARS Virus
taaagaggagtcaaaaccttagaag

SEQ ID NO: 221802 - DNA, 25 bp, SARS Virus
aaagaggagtcaaaaccttagaaga

SEQ ID NO: 221803 - DNA, 25 bp, SARS Virus
aagaggagtcaaaaccttagaagac

SEQ ID NO: 221804 - DNA, 25 bp, SARS Virus
agaggagtcaaaaccttagaagaca

SEQ ID NO: 221805 - DNA, 25 bp, SARS Virus
gaggagtcaaaaacttagaagacac

SEQ ID NO: 221806 - DNA, 25 bp, SARS Virus
aggagtcaaaacattagaagacaca

SEQ ID NO: 221807 - DNA, 25 bp, SARS Virus
ggagtcaaaaccatagaagacacaa

SEQ ID NO: 221808 - DNA, 25 bp, SARS Virus
gagtcaaaacctaagaagacacaaa

SEQ ID NO: 221809 - DNA, 25 bp, SARS Virus
agtcaaaaccttagaagacacaaac

SEQ ID NO: 221810 - DNA, 25 bp, SARS Virus
gtcaaaaccttaaaagacacaaacc

SEQ ID NO: 221811 - DNA, 25 bp, SARS Virus
tcaaaaccttagaagacacaaacca

SEQ ID NO: 221812 - DNA, 25 bp, SARS Virus
caaaaccttagaagacacaaaccac

SEQ ID NO: 221813 - DNA, 25 bp, SARS Virus
aaaaccttagaaaacacaaaccacc

SEQ ID NO: 221814 - DNA, 25 bp, SARS Virus
aaaccttagaagacacaaaccaccg

SEQ ID NO: 221815 - DNA, 25 bp, SARS Virus
aaccttagaagaaacaaaccaccga

SEQ ID NO: 221816 - DNA, 25 bp, SARS Virus
accttagaagacacaaaccaccgag

SEQ ID NO: 221817 - DNA, 25 bp, SARS Virus
ccttagaagacaaaaaccaccgagg

SEQ ID NO: 221818 - DNA, 25 bp, SARS Virus
cttagaagacacaaaccaccgagga

SEQ ID NO: 221819 - DNA, 25 bp, SARS Virus
ttagaagacacaaaccaccgaggag

SEQ ID NO: 221820 - DNA, 25 bp, SARS Virus
tagaagacacaaaccaccgaggaga

SEQ ID NO: 221821 - DNA, 25 bp, SARS Virus
agaagacacaaaacaccgaggagaa

SEQ ID NO: 221822 - DNA, 25 bp, SARS Virus
gaagacacaaacaaccgaggagaac

SEQ ID NO: 221823 - DNA, 25 bp, SARS Virus
aagacacaaaccaccgaggagaaca

SEQ ID NO: 221824 - DNA, 25 bp, SARS Virus
agacacaaaccaacgaggagaacaa

SEQ ID NO: 221825 - DNA, 25 bp, SARS Virus
gacacaaaccacagaggagaacaaa

SEQ ID NO: 221826 - DNA, 25 bp, SARS Virus
acacaaaccaccaaggagaacaaat

SEQ ID NO: 221827 - DNA, 25 bp, SARS Virus
cacaaaccaccgaggagaacaaatc

SEQ ID NO: 221828 - DNA, 25 bp, SARS Virus
acaaaccaccgaagagaacaaatcc

SEQ ID NO: 221829 - DNA, 25 bp, SARS Virus
caaaccaccgagaagaacaaatcca

SEQ ID NO: 221830 - DNA, 25 bp, SARS Virus
aaaccaccgaggagaacaaatccac

SEQ ID NO: 221831 - DNA, 25 bp, SARS Virus
aaccaccgaggaaaacaaatccacg

SEQ ID NO: 221832 - DNA, 25 bp, SARS Virus
accaccgaggagaacaaatccacga

SEQ ID NO: 221833 - DNA, 25 bp, SARS Virus
ccaccgaggagaacaaatccacgaa

SEQ ID NO: 221834 - DNA, 25 bp, SARS Virus
caccgaggagaaaaaatccacgaag

SEQ ID NO: 221835 - DNA, 25 bp, SARS Virus
accgaggagaacaaatccacgaagg

SEQ ID NO: 221836 - DNA, 25 bp, SARS Virus
ccgaggagaacaaatccacgaaggt

SEQ ID NO: 221837 - DNA, 25 bp, SARS Virus
cgaggagaacaaatccacgaaggtg

SEQ ID NO: 221838 - DNA, 25 bp, SARS Virus
gaggagaacaaaaccacgaaggtga

SEQ ID NO: 221839 - DNA, 25 bp, SARS Virus
aggagaacaaatacacgaaggtgag

SEQ ID NO: 221840 - DNA, 25 bp, SARS Virus
ggagaacaaatcaacgaaggtgaga

SEQ ID NO: 221841 - DNA, 25 bp, SARS Virus
gagaacaaatccacgaaggtgagat

SEQ ID NO: 221842 - DNA, 25 bp, SARS Virus
agaacaaatccaagaaggtgagatc

SEQ ID NO: 221843 - DNA, 25 bp, SARS Virus
gaacaaatccacaaaggtgagatcc

SEQ ID NO: 221844 - DNA, 25 bp, SARS Virus
aacaaatccacgaaggtgagatccg

SEQ ID NO: 221845 - DNA, 25 bp, SARS Virus
acaaatccacgaaggtgagatccga

SEQ ID NO: 221846 - DNA, 25 bp, SARS Virus
caaatccacgaaagtgagatccgaa

SEQ ID NO: 221847 - DNA, 25 bp, SARS Virus
aaatccacgaagatgagatccgaag

SEQ ID NO: 221848 - DNA, 25 bp, SARS Virus
aatccacgaaggagagatccgaagt

SEQ ID NO: 221849 - DNA, 25 bp, SARS Virus
atccacgaaggtaagatccgaagtc

SEQ ID NO: 221850 - DNA, 25 bp, SARS Virus
tccacgaaggtgagatccgaagtcc

SEQ ID NO: 221851 - DNA, 25 bp, SARS Virus
ccacgaaggtgaaatccgaagtcca

SEQ ID NO: 221852 - DNA, 25 bp, SARS Virus
cacgaaggtgagatccgaagtccaa

SEQ ID NO: 221853 - DNA, 25 bp, SARS Virus
acgaaggtgagaaccgaagtccaat

SEQ ID NO: 221854 - DNA, 25 bp, SARS Virus
cgaaggtgagatacgaagtccaata

SEQ ID NO: 221855 - DNA, 25 bp, SARS Virus
gaaggtgagatcagaagtccaatag

SEQ ID NO: 221856 - DNA, 25 bp, SARS Virus
aaggtgagatccaaagtccaatagt

SEQ ID NO: 221857 - DNA, 25 bp, SARS Virus
aggtgagatccgaagtccaatagtt

SEQ ID NO: 221858 - DNA, 25 bp, SARS Virus
ggtgagatccgaagtccaatagttc

SEQ ID NO: 221859 - DNA, 25 bp, SARS Virus
gtgagatccgaaatccaatagttct

SEQ ID NO: 221860 - DNA, 25 bp, SARS Virus
tgagatccgaagaccaatagttcta

SEQ ID NO: 221861 - DNA, 25 bp, SARS Virus
gagatccgaagtacaatagttctat

SEQ ID NO: 221862 - DNA, 25 bp, SARS Virus
agatccgaagtcaaatagttctatt

SEQ ID NO: 221863 - DNA, 25 bp, SARS Virus
gatccgaagtccaatagttctatta

SEQ ID NO: 221864 - DNA, 25 bp, SARS Virus
atccgaagtccaatagttctattag

SEQ ID NO: 221865 - DNA, 25 bp, SARS Virus
tccgaagtccaaaagttctattagg

SEQ ID NO: 221866 - DNA, 25 bp, SARS Virus
ccgaagtccaatagttctattaggt

SEQ ID NO: 221867 - DNA, 25 bp, SARS Virus
cgaagtccaataattctattaggta

SEQ ID NO: 221868 - DNA, 25 bp, SARS Virus
gaagtccaatagatctattaggtac

SEQ ID NO: 221869 - DNA, 25 bp, SARS Virus
aagtccaatagtactattaggtact

SEQ ID NO: 221870 - DNA, 25 bp, SARS Virus
agtccaatagttatattaggtactg

SEQ ID NO: 221871 - DNA, 25 bp, SARS Virus
gtccaatagttcaattaggtactgt

SEQ ID NO: 221872 - DNA, 25 bp, SARS Virus
tccaatagttctattaggtactgtt

SEQ ID NO: 221873 - DNA, 25 bp, SARS Virus
ccaatagttctaataggtactgttg

SEQ ID NO: 221874 - DNA, 25 bp, SARS Virus
caatagttctataaggtactgttgg

SEQ ID NO: 221875 - DNA, 25 bp, SARS Virus
aatagttctattaggtactgttgga

SEQ ID NO: 221876 - DNA, 25 bp, SARS Virus
atagttctattaagtactgttggac

SEQ ID NO: 221877 - DNA, 25 bp, SARS Virus
tagttctattagatactgttggacg

SEQ ID NO: 221878 - DNA, 25 bp, SARS Virus
agttctattaggaactgttggacga

SEQ ID NO: 221879 - DNA, 25 bp, SARS Virus
gttctattaggtactgttggacgag

SEQ ID NO: 221880 - DNA, 25 bp, SARS Virus
ttctattaggtaatgttggacgagt

SEQ ID NO: 221881 - DNA, 25 bp, SARS Virus
tctattaggtacagttggacgagta

SEQ ID NO: 221882 - DNA, 25 bp, SARS Virus
ctattaggtactattggacgagtat

SEQ ID NO: 221883 - DNA, 25 bp, SARS Virus
tattaggtactgatggacgagtatt

SEQ ID NO: 221884 - DNA, 25 bp, SARS Virus
attaggtactgtaggacgagtattt

SEQ ID NO: 221885 - DNA, 25 bp, SARS Virus
ttaggtactgttagacgagtatttc

SEQ ID NO: 221886 - DNA, 25 bp, SARS Virus
taggtactgttgaacgagtatttct

SEQ ID NO: 221887 - DNA, 25 bp, SARS Virus
aggtactgttggacgagtatttctc

SEQ ID NO: 221888 - DNA, 25 bp, SARS Virus
ggtactgttggaagagtatttctcg

SEQ ID NO: 221889 - DNA, 25 bp, SARS Virus
gtactgttggacaagtatttctcga

SEQ ID NO: 221890 - DNA, 25 bp, SARS Virus
tactgttggacgagtatttctcgaa

SEQ ID NO: 221891 - DNA, 25 bp, SARS Virus
actgttggacgaatatttctcgaaa

SEQ ID NO: 221892 - DNA, 25 bp, SARS Virus
ctgttggacgagaatttctcgaaac

SEQ ID NO: 221893 - DNA, 25 bp, SARS Virus
tgttggacgagtatttctcgaaaca

SEQ ID NO: 221894 - DNA, 25 bp, SARS Virus
gttggacgagtaattctcgaaacag

SEQ ID NO: 221895 - DNA, 25 bp, SARS Virus
ttggacgagtatatctcgaaacagt

SEQ ID NO: 221896 - DNA, 25 bp, SARS Virus
tggacgagtattactcgaaacagta

SEQ ID NO: 221897 - DNA, 25 bp, SARS Virus
ggacgagtatttatcgaaacagtaa

SEQ ID NO: 221898 - DNA, 25 bp, SARS Virus
gacgagtatttcacgaaacagtaac

SEQ ID NO: 221899 - DNA, 25 bp, SARS Virus
acgagtatttctagaaacagtaact

SEQ ID NO: 221900 - DNA, 25 bp, SARS Virus
cgagtatttctcaaaacagtaactg

SEQ ID NO: 221901 - DNA, 25 bp, SARS Virus
gagtatttctcgaaacagtaactga

SEQ ID NO: 221902 - DNA, 25 bp, SARS Virus
agtatttctcgaaacagtaactgac

SEQ ID NO: 221903 - DNA, 25 bp, SARS Virus
gtatttctcgaaacagtaactgacg

SEQ ID NO: 221904 - DNA, 25 bp, SARS Virus
tatttctcgaaaaagtaactgacgt

SEQ ID NO: 221905 - DNA, 25 bp, SARS Virus
atttctcgaaacagtaactgacgtt

SEQ ID NO: 221906 - DNA, 25 bp, SARS Virus
tttctcgaaacaataactgacgtta

SEQ ID NO: 221907 - DNA, 25 bp, SARS Virus
ttctcgaaacagaaactgacgttat

SEQ ID NO: 221908 - DNA, 25 bp, SARS Virus
tctcgaaacagtaactgacgttata

SEQ ID NO: 221909 - DNA, 25 bp, SARS Virus
ctcgaaacagtaactgacgttatat

SEQ ID NO: 221910 - DNA, 25 bp, SARS Virus
tcgaaacagtaaatgacgttatatt

SEQ ID NO: 221911 - DNA, 25 bp, SARS Virus
cgaaacagtaacagacgttatattt

SEQ ID NO: 221912 - DNA, 25 bp, SARS Virus
gaaacagtaactaacgttatatttg

SEQ ID NO: 221913 - DNA, 25 bp, SARS Virus
aaacagtaactgacgttatatttgg

SEQ ID NO: 221914 - DNA, 25 bp, SARS Virus
aacagtaactgaagttatatttgga

SEQ ID NO: 221915 - DNA, 25 bp, SARS Virus
acagtaactgacattatatttggac

SEQ ID NO: 221916 - DNA, 25 bp, SARS Virus
cagtaactgacgatatatttggaca

SEQ ID NO: 221917 - DNA, 25 bp, SARS Virus
agtaactgacgtaatatttggacac

SEQ ID NO: 221918 - DNA, 25 bp, SARS Virus
gtaactgacgttatatttggacaca

SEQ ID NO: 221919 - DNA, 25 bp, SARS Virus
taactgacgttaaatttggacacat

SEQ ID NO: 221920 - DNA, 25 bp, SARS Virus
aactgacgttatatttggacacatg

SEQ ID NO: 221921 - DNA, 25 bp, SARS Virus
actgacgttataattggacacatgc

SEQ ID NO: 221922 - DNA, 25 bp, SARS Virus
ctgacgttatatatggacacatgct

SEQ ID NO: 221923 - DNA, 25 bp, SARS Virus
tgacgttatattaggacacatgctt

SEQ ID NO: 221924 - DNA, 25 bp, SARS Virus
gacgttatatttagacacatgcttg

SEQ ID NO: 221925 - DNA, 25 bp, SARS Virus
acgttatatttgaacacatgcttgg

SEQ ID NO: 221926 - DNA, 25 bp, SARS Virus
cgttatatttggacacatgcttggc

SEQ ID NO: 221927 - DNA, 25 bp, SARS Virus
gttatatttggaaacatgcttggca

SEQ ID NO: 221928 - DNA, 25 bp, SARS Virus
ttatatttggacacatgcttggcag

SEQ ID NO: 221929 - DNA, 25 bp, SARS Virus
tatatttggacaaatgcttggcaga

SEQ ID NO: 221930 - DNA, 25 bp, SARS Virus
atatttggacacatgcttggcagac

SEQ ID NO: 221931 - DNA, 25 bp, SARS Virus
tatttggacacaagcttggcagacg

SEQ ID NO: 221932 - DNA, 25 bp, SARS Virus
atttggacacatacttggcagacgt

SEQ ID NO: 221933 - DNA, 25 bp, SARS Virus
tttggacacatgattggcagacgtg

SEQ ID NO: 221934 - DNA, 25 bp, SARS Virus
ttggacacatgcatggcagacgtgc

SEQ ID NO: 221935 - DNA, 25 bp, SARS Virus
tggacacatgctaggcagacgtgcg

SEQ ID NO: 221936 - DNA, 25 bp, SARS Virus
ggacacatgcttagcagacgtgcgt

SEQ ID NO: 221937 - DNA, 25 bp, SARS Virus
gacacatgcttgacagacgtgcgtg

SEQ ID NO: 221938 - DNA, 25 bp, SARS Virus
acacatgcttggaagacgtgcgtgt

SEQ ID NO: 221939 - DNA, 25 bp, SARS Virus
cacatgcttggcagacgtgcgtgtg

SEQ ID NO: 221940 - DNA, 25 bp, SARS Virus
acatgcttggcaaacgtgcgtgtga

SEQ ID NO: 221941 - DNA, 25 bp, SARS Virus
catgcttggcagacgtgcgtgtgaa

SEQ ID NO: 221942 - DNA, 25 bp, SARS Virus
atgcttggcagaagtgcgtgtgaac

SEQ ID NO: 221943 - DNA, 25 bp, SARS Virus
tgcttggcagacatgcgtgtgaaca

SEQ ID NO: 221944 - DNA, 25 bp, SARS Virus
gcttggcagacgagcgtgtgaacat

SEQ ID NO: 221945 - DNA, 25 bp, SARS Virus
cttggcagacgtacgtgtgaacatt

SEQ ID NO: 221946 - DNA, 25 bp, SARS Virus
ttggcagacgtgagtgtgaacattt

SEQ ID NO: 221947 - DNA, 25 bp, SARS Virus
tggcagacgtgcatgtgaacatttc

SEQ ID NO: 221948 - DNA, 25 bp, SARS Virus
ggcagacgtgcgagtgaacatttct

SEQ ID NO: 221949 - DNA, 25 bp, SARS Virus
gcagacgtgcgtatgaacatttctg

SEQ ID NO: 221950 - DNA, 25 bp, SARS Virus
cagacgtgcgtgagaacatttctga

SEQ ID NO: 221951 - DNA, 25 bp, SARS Virus
agacgtgcgtgtaaacatttctgac

SEQ ID NO: 221952 - DNA, 25 bp, SARS Virus
gacgtgcgtgtgaacatttctgact

SEQ ID NO: 221953 - DNA, 25 bp, SARS Virus
acgtgcgtgtgaacatttctgactt

SEQ ID NO: 221954 - DNA, 25 bp, SARS Virus
cgtgcgtgtgaaaatttctgacttc

SEQ ID NO: 221955 - DNA, 25 bp, SARS Virus
gtgcgtgtgaacatttctgacttca

SEQ ID NO: 221956 - DNA, 25 bp, SARS Virus
tgcgtgtgaacaattctgacttcac

SEQ ID NO: 221957 - DNA, 25 bp, SARS Virus
gcgtgtgaacatatctgacttcacc

SEQ ID NO: 221958 - DNA, 25 bp, SARS Virus
cgtgtgaacattactgacttcacca

SEQ ID NO: 221959 - DNA, 25 bp, SARS Virus
gtgtgaacatttatgacttcaccaa

SEQ ID NO: 221960 - DNA, 25 bp, SARS Virus
tgtgaacatttcagacttcaccaaa

SEQ ID NO: 221961 - DNA, 25 bp, SARS Virus
gtgaacatttctaacttcaccaaat

SEQ ID NO: 221962 - DNA, 25 bp, SARS Virus
tgaacatttctgacttcaccaaatc

SEQ ID NO: 221963 - DNA, 25 bp, SARS Virus
gaacatttctgaattcaccaaatcg

SEQ ID NO: 221964 - DNA, 25 bp, SARS Virus
aacatttctgacatcaccaaatcgt

SEQ ID NO: 221965 - DNA, 25 bp, SARS Virus
acatttctgactacaccaaatcgtg

SEQ ID NO: 221966 - DNA, 25 bp, SARS Virus
catttctgacttaaccaaatcgtgg

SEQ ID NO: 221967 - DNA, 25 bp, SARS Virus
atttctgacttcaccaaatcgtggt

SEQ ID NO: 221968 - DNA, 25 bp, SARS Virus
tttctgacttcaacaaatcgtggtt

SEQ ID NO: 221969 - DNA, 25 bp, SARS Virus
ttctgacttcacaaaatcgtggttt

SEQ ID NO: 221970 - DNA, 25 bp, SARS Virus
tctgacttcaccaaatcgtggttta

SEQ ID NO: 221971 - DNA, 25 bp, SARS Virus
ctgacttcaccaaatcgtggtttat

SEQ ID NO: 221972 - DNA, 25 bp, SARS Virus
tgacttcaccaaatcgtggtttata

SEQ ID NO: 221973 - DNA, 25 bp, SARS Virus
gacttcaccaaaacgtggtttatac

SEQ ID NO: 221974 - DNA, 25 bp, SARS Virus
acttcaccaaatagtggtttatacg

SEQ ID NO: 221975 - DNA, 25 bp, SARS Virus
cttcaccaaatcatggtttatacgg

SEQ ID NO: 221976 - DNA, 25 bp, SARS Virus
ttcaccaaatcgaggtttatacgga

SEQ ID NO: 221977 - DNA, 25 bp, SARS Virus
tcaccaaatcgtagtttatacggac

SEQ ID NO: 221978 - DNA, 25 bp, SARS Virus
caccaaatcgtgatttatacggacg

SEQ ID NO: 221979 - DNA, 25 bp, SARS Virus
accaaatcgtggattatacggacga

SEQ ID NO: 221980 - DNA, 25 bp, SARS Virus
ccaaatcgtggtatatacggacgac

SEQ ID NO: 221981 - DNA, 25 bp, SARS Virus
caaatcgtggttaatacggacgact

SEQ ID NO: 221982 - DNA, 25 bp, SARS Virus
aaatcgtggtttatacggacgactg

SEQ ID NO: 221983 - DNA, 25 bp, SARS Virus
aatcgtggtttaaacggacgactgt

SEQ ID NO: 221984 - DNA, 25 bp, SARS Virus
atcgtggtttatacggacgactgtt

SEQ ID NO: 221985 - DNA, 25 bp, SARS Virus
tcgtggtttataaggacgactgttg

SEQ ID NO: 221986 - DNA, 25 bp, SARS Virus
cgtggtttatacagacgactgttgt

SEQ ID NO: 221987 - DNA, 25 bp, SARS Virus
gtggtttatacgaacgactgttgtt

SEQ ID NO: 221988 - DNA, 25 bp, SARS Virus
tggtttatacggacgactgttgtta

SEQ ID NO: 221989 - DNA, 25 bp, SARS Virus
ggtttatacggaagactgttgttac

SEQ ID NO: 221990 - DNA, 25 bp, SARS Virus
gtttatacggacaactgttgttacc

SEQ ID NO: 221991 - DNA, 25 bp, SARS Virus
tttatacggacgactgttgttacca

SEQ ID NO: 221992 - DNA, 25 bp, SARS Virus
ttatacggacgaatgttgttaccac

SEQ ID NO: 221993 - DNA, 25 bp, SARS Virus
tatacggacgacagttgttaccacg

SEQ ID NO: 221994 - DNA, 25 bp, SARS Virus
atacggacgactattgttaccacgt

SEQ ID NO: 221995 - DNA, 25 bp, SARS Virus
tacggacgactgatgttaccacgtt

SEQ ID NO: 221996 - DNA, 25 bp, SARS Virus
acggacgactgtagttaccacgttc

SEQ ID NO: 221997 - DNA, 25 bp, SARS Virus
cggacgactgttattaccacgttca

SEQ ID NO: 221998 - DNA, 25 bp, SARS Virus
ggacgactgttgataccacgttcat

SEQ ID NO: 221999 - DNA, 25 bp, SARS Virus
gacgactgttgtaaccacgttcatt

SEQ ID NO: 222000 - DNA, 25 bp, SARS Virus
acgactgttgttaccacgttcattc

SEQ ID NO: 222001 - DNA, 25 bp, SARS Virus
cgactgttgttaacacgttcattct

SEQ ID NO: 222002 - DNA, 25 bp, SARS Virus
gactgttgttacaacgttcattcta

SEQ ID NO: 222003 - DNA, 25 bp, SARS Virus
actgttgttaccacgttcattctac

SEQ ID NO: 222004 - DNA, 25 bp, SARS Virus
ctgttgttaccaagttcattctaca

SEQ ID NO: 222005 - DNA, 25 bp, SARS Virus
tgttgttaccacattcattctacag

SEQ ID NO: 222006 - DNA, 25 bp, SARS Virus
gttgttaccacgatcattctacagg

SEQ ID NO: 222007 - DNA, 25 bp, SARS Virus
ttgttaccacgtacattctacagga

SEQ ID NO: 222008 - DNA, 25 bp, SARS Virus
tgttaccacgttaattctacaggac

SEQ ID NO: 222009 - DNA, 25 bp, SARS Virus
gttaccacgttcattctacaggaca

SEQ ID NO: 222010 - DNA, 25 bp, SARS Virus
ttaccacgttcaatctacaggacac

SEQ ID NO: 222011 - DNA, 25 bp, SARS Virus
taccacgttcatactacaggacact

SEQ ID NO: 222012 - DNA, 25 bp, SARS Virus
accacgttcattatacaggacactt

SEQ ID NO: 222013 - DNA, 25 bp, SARS Virus
ccacgttcattcaacaggacactta

SEQ ID NO: 222014 - DNA, 25 bp, SARS Virus
cacgttcattctacaggacacttaa

SEQ ID NO: 222015 - DNA, 25 bp, SARS Virus
acgttcattctaaaggacacttaac

SEQ ID NO: 222016 - DNA, 25 bp, SARS Virus
cgttcattctacaggacacttaact

SEQ ID NO: 222017 - DNA, 25 bp, SARS Virus
gttcattctacaagacacttaactt

SEQ ID NO: 222018 - DNA, 25 bp, SARS Virus
ttcattctacagaacacttaacttt

SEQ ID NO: 222019 - DNA, 25 bp, SARS Virus
tcattctacaggacacttaacttta

SEQ ID NO: 222020 - DNA, 25 bp, SARS Virus
cattctacaggaaacttaactttaa

SEQ ID NO: 222021 - DNA, 25 bp, SARS Virus
attctacaggacacttaactttaaa

SEQ ID NO: 222022 - DNA, 25 bp, SARS Virus
ttctacaggacaattaactttaaaa

SEQ ID NO: 222023 - DNA, 25 bp, SARS Virus
tctacaggacacataactttaaaag

SEQ ID NO: 222024 - DNA, 25 bp, SARS Virus
ctacaggacactaaactttaaaagt

SEQ ID NO: 222025 - DNA, 25 bp, SARS Virus
tacaggacacttaactttaaaagta

SEQ ID NO: 222026 - DNA, 25 bp, SARS Virus
acaggacacttaactttaaaagtat

SEQ ID NO: 222027 - DNA, 25 bp, SARS Virus
caggacacttaaatttaaaagtata

SEQ ID NO: 222028 - DNA, 25 bp, SARS Virus
aggacacttaacattaaaagtatac

SEQ ID NO: 222029 - DNA, 25 bp, SARS Virus
ggacacttaactataaaagtatacg

SEQ ID NO: 222030 - DNA, 25 bp, SARS Virus
gacacttaacttaaaaagtatacga

SEQ ID NO: 222031 - DNA, 25 bp, SARS Virus
acacttaactttaaaagtatacgac

SEQ ID NO: 222032 - DNA, 25 bp, SARS Virus
cacttaactttaaaagtatacgacg

SEQ ID NO: 222033 - DNA, 25 bp, SARS Virus
acttaactttaaaagtatacgacgg

SEQ ID NO: 222034 - DNA, 25 bp, SARS Virus
cttaactttaaaagtatacgacgga

SEQ ID NO: 222035 - DNA, 25 bp, SARS Virus
ttaactttaaaaatatacgacggaa

SEQ ID NO: 222036 - DNA, 25 bp, SARS Virus
taactttaaaagaatacgacggaat

SEQ ID NO: 222037 - DNA, 25 bp, SARS Virus
aactttaaaagtatacgacggaatt

SEQ ID NO: 222038 - DNA, 25 bp, SARS Virus
actttaaaagtaaacgacggaattc

SEQ ID NO: 222039 - DNA, 25 bp, SARS Virus
ctttaaaagtatacgacggaattct

SEQ ID NO: 222040 - DNA, 25 bp, SARS Virus
tttaaaagtataagacggaattctt

SEQ ID NO: 222041 - DNA, 25 bp, SARS Virus
ttaaaagtatacaacggaattcttc

SEQ ID NO: 222042 - DNA, 25 bp, SARS Virus
taaaagtatacgacggaattcttcg

SEQ ID NO: 222043 - DNA, 25 bp, SARS Virus
aaaagtatacgaaggaattcttcga

SEQ ID NO: 222044 - DNA, 25 bp, SARS Virus
aaagtatacgacagaattcttcgac

SEQ ID NO: 222045 - DNA, 25 bp, SARS Virus
aagtatacgacgaaattcttcgacc

SEQ ID NO: 222046 - DNA, 25 bp, SARS Virus
agtatacgacggaattcttcgacct

SEQ ID NO: 222047 - DNA, 25 bp, SARS Virus
gtatacgacggaattcttcgaccta

SEQ ID NO: 222048 - DNA, 25 bp, SARS Virus
tatacgacggaaatcttcgacctac

SEQ ID NO: 222049 - DNA, 25 bp, SARS Virus
atacgacggaatacttcgacctaca

SEQ ID NO: 222050 - DNA, 25 bp, SARS Virus
tacgacggaattattcgacctacag

SEQ ID NO: 222051 - DNA, 25 bp, SARS Virus
acgacggaattcatcgacctacagg

SEQ ID NO: 222052 - DNA, 25 bp, SARS Virus
cgacggaattctacgacctacagga

SEQ ID NO: 222053 - DNA, 25 bp, SARS Virus
gacggaattcttagacctacaggag

SEQ ID NO: 222054 - DNA, 25 bp, SARS Virus
acggaattcttcaacctacaggagt

SEQ ID NO: 222055 - DNA, 25 bp, SARS Virus
cggaattcttcgacctacaggagtg

SEQ ID NO: 222056 - DNA, 25 bp, SARS Virus
ggaattcttcgaactacaggagtgg

SEQ ID NO: 222057 - DNA, 25 bp, SARS Virus
gaattcttcgacatacaggagtgga

SEQ ID NO: 222058 - DNA, 25 bp, SARS Virus
aattcttcgaccaacaggagtggac

SEQ ID NO: 222059 - DNA, 25 bp, SARS Virus
attcttcgacctacaggagtggacg

SEQ ID NO: 222060 - DNA, 25 bp, SARS Virus
ttcttcgacctaaaggagtggacgt

SEQ ID NO: 222061 - DNA, 25 bp, SARS Virus
tcttcgacctacaggagtggacgta

SEQ ID NO: 222062 - DNA, 25 bp, SARS Virus
cttcgacctacaagagtggacgtaa

SEQ ID NO: 222063 - DNA, 25 bp, SARS Virus
ttcgacctacagaagtggacgtaaa

SEQ ID NO: 222064 - DNA, 25 bp, SARS Virus
tcgacctacaggagtggacgtaaat

SEQ ID NO: 222065 - DNA, 25 bp, SARS Virus
cgacctacaggaatggacgtaaatc

SEQ ID NO: 222066 - DNA, 25 bp, SARS Virus
gacctacaggagaggacgtaaatcc

SEQ ID NO: 222067 - DNA, 25 bp, SARS Virus
acctacaggagtagacgtaaatcca

SEQ ID NO: 222068 - DNA, 25 bp, SARS Virus
cctacaggagtgaacgtaaatccaa

SEQ ID NO: 222069 - DNA, 25 bp, SARS Virus
ctacaggagtggacgtaaatccaat

SEQ ID NO: 222070 - DNA, 25 bp, SARS Virus
tacaggagtggaagtaaatccaatc

SEQ ID NO: 222071 - DNA, 25 bp, SARS Virus
acaggagtggacataaatccaatcc

SEQ ID NO: 222072 - DNA, 25 bp, SARS Virus
caggagtggacgaaaatccaatcca

SEQ ID NO: 222073 - DNA, 25 bp, SARS Virus
actattgtagtgcatggtacattcc

SEQ ID NO: 222074 - DNA, 25 bp, SARS Virus
ctattgtagtggctggtacattcca

SEQ ID NO: 222075 - DNA, 25 bp, SARS Virus
tattgtagtggacggtacattccac

SEQ ID NO: 222076 - DNA, 25 bp, SARS Virus
attgtagtggatcgtacattccacg

SEQ ID NO: 222077 - DNA, 25 bp, SARS Virus
ttgtagtggatgctacattccacgt

SEQ ID NO: 222078 - DNA, 25 bp, SARS Virus
tgtagtggatggcacattccacgta

SEQ ID NO: 222079 - DNA, 25 bp, SARS Virus
gtagtggatggtccattccacgtag

SEQ ID NO: 222080 - DNA, 25 bp, SARS Virus
tagtggatggtacattccacgtagg

SEQ ID NO: 222081 - DNA, 25 bp, SARS Virus
agtggatggtaccttccacgtagga

SEQ ID NO: 222082 - DNA, 25 bp, SARS Virus
gtggatggtacactccacgtaggaa

SEQ ID NO: 222083 - DNA, 25 bp, SARS Virus
tggatggtacatcccacgtaggaag

SEQ ID NO: 222084 - DNA, 25 bp, SARS Virus
ggatggtacattccacgtaggaaga

SEQ ID NO: 222085 - DNA, 25 bp, SARS Virus
gatggtacattccacgtaggaagag

SEQ ID NO: 222086 - DNA, 25 bp, SARS Virus
atggtacattccccgtaggaagagt

SEQ ID NO: 222087 - DNA, 25 bp, SARS Virus
tggtacattccacgtaggaagagtt

SEQ ID NO: 222088 - DNA, 25 bp, SARS Virus
ggtacattccacctaggaagagttc

SEQ ID NO: 222089 - DNA, 25 bp, SARS Virus
gtacattccacgcaggaagagttcc

SEQ ID NO: 222090 - DNA, 25 bp, SARS Virus
tacattccacgtcggaagagttcct

SEQ ID NO: 222091 - DNA, 25 bp, SARS Virus
acattccacgtacgaagagttcctt

SEQ ID NO: 222092 - DNA, 25 bp, SARS Virus
cattccacgtagcaagagttccttt

SEQ ID NO: 222093 - DNA, 25 bp, SARS Virus
attccacgtaggcagagttcctttc

SEQ ID NO: 222094 - DNA, 25 bp, SARS Virus
ttccacgtaggacgagttcctttct

SEQ ID NO: 222095 - DNA, 25 bp, SARS Virus
tccacgtaggaacagttcctttctg

SEQ ID NO: 222096 - DNA, 25 bp, SARS Virus
ccacgtaggaagcgttcctttctgt

SEQ ID NO: 222097 - DNA, 25 bp, SARS Virus
cacgtaggaagacttcctttctgta

SEQ ID NO: 222098 - DNA, 25 bp, SARS Virus
acgtaggaagagctcctttctgtat

SEQ ID NO: 222099 - DNA, 25 bp, SARS Virus
cgtaggaagagtccctttctgtata

SEQ ID NO: 222100 - DNA, 25 bp, SARS Virus
gtaggaagagttcctttctgtatag

SEQ ID NO: 222101 - DNA, 25 bp, SARS Virus
taggaagagttcctttctgtataga

SEQ ID NO: 222102 - DNA, 25 bp, SARS Virus
aggaagagttcccttctgtatagaa

SEQ ID NO: 222103 - DNA, 25 bp, SARS Virus
ggaagagttcctctctgtatagaag

SEQ ID NO: 222104 - DNA, 25 bp, SARS Virus
gaagagttccttcctgtatagaagt

SEQ ID NO: 222105 - DNA, 25 bp, SARS Virus
aagagttcctttctgtatagaagtg

SEQ ID NO: 222106 - DNA, 25 bp, SARS Virus
agagttcctttccgtatagaagtgg

SEQ ID NO: 222107 - DNA, 25 bp, SARS Virus
gagttcctttctctatagaagtgga

SEQ ID NO: 222108 - DNA, 25 bp, SARS Virus
agttcctttctgcatagaagtggag

SEQ ID NO: 222109 - DNA, 25 bp, SARS Virus
gttcctttctgtctagaagtggaga

SEQ ID NO: 222110 - DNA, 25 bp, SARS Virus
ttcctttctgtacagaagtggagat

SEQ ID NO: 222111 - DNA, 25 bp, SARS Virus
tcctttctgtatcgaagtggagatt

SEQ ID NO: 222112 - DNA, 25 bp, SARS Virus
cctttctgtatacaagtggagattc

SEQ ID NO: 222113 - DNA, 25 bp, SARS Virus
ctttctgtatagcagtggagattcg

SEQ ID NO: 222114 - DNA, 25 bp, SARS Virus
tttctgtatagacgtggagattcgt

SEQ ID NO: 222115 - DNA, 25 bp, SARS Virus
ttctgtatagaactggagattcgta

SEQ ID NO: 222116 - DNA, 25 bp, SARS Virus
tctgtatagaagcggagattcgtac

SEQ ID NO: 222117 - DNA, 25 bp, SARS Virus
ctgtatagaagtcgagattcgtaca

SEQ ID NO: 222118 - DNA, 25 bp, SARS Virus
tgtatagaagtgcagattcgtacaa

SEQ ID NO: 222119 - DNA, 25 bp, SARS Virus
gtatagaagtggcgattcgtacaag

SEQ ID NO: 222120 - DNA, 25 bp, SARS Virus
tatagaagtggacattcgtacaaga

SEQ ID NO: 222121 - DNA, 25 bp, SARS Virus
atagaagtggagcttcgtacaagac

SEQ ID NO: 222122 - DNA, 25 bp, SARS Virus
tagaagtggagactcgtacaagact

SEQ ID NO: 222123 - DNA, 25 bp, SARS Virus
agaagtggagatccgtacaagactc

SEQ ID NO: 222124 - DNA, 25 bp, SARS Virus
gaagtggagattcgtacaagactct

SEQ ID NO: 222125 - DNA, 25 bp, SARS Virus
aagtggagattcctacaagactctt

SEQ ID NO: 222126 - DNA, 25 bp, SARS Virus
agtggagattcgcacaagactctta

SEQ ID NO: 222127 - DNA, 25 bp, SARS Virus
gtggagattcgtccaagactcttag

SEQ ID NO: 222128 - DNA, 25 bp, SARS Virus
tggagattcgtacaagactcttagt

SEQ ID NO: 222129 - DNA, 25 bp, SARS Virus
ggagattcgtaccagactcttagta

SEQ ID NO: 222130 - DNA, 25 bp, SARS Virus
gagattcgtacacgactcttagtac

SEQ ID NO: 222131 - DNA, 25 bp, SARS Virus
agattcgtacaacactcttagtacc

SEQ ID NO: 222132 - DNA, 25 bp, SARS Virus
gattcgtacaagcctcttagtacca

SEQ ID NO: 222133 - DNA, 25 bp, SARS Virus
attcgtacaagactcttagtaccat

SEQ ID NO: 222134 - DNA, 25 bp, SARS Virus
ttcgtacaagacccttagtaccatt

SEQ ID NO: 222135 - DNA, 25 bp, SARS Virus
tcgtacaagactcttagtaccattt

SEQ ID NO: 222136 - DNA, 25 bp, SARS Virus
cgtacaagactcctagtaccatttc

SEQ ID NO: 222137 - DNA, 25 bp, SARS Virus
gtacaagactctcagtaccatttcg

SEQ ID NO: 222138 - DNA, 25 bp, SARS Virus
tacaagactcttcgtaccatttcga

SEQ ID NO: 222139 - DNA, 25 bp, SARS Virus
acaagactcttactaccatttcgaa

SEQ ID NO: 222140 - DNA, 25 bp, SARS Virus
caagactcttagcaccatttcgaat

SEQ ID NO: 222141 - DNA, 25 bp, SARS Virus
aagactcttagtcccatttcgaatg

SEQ ID NO: 222142 - DNA, 25 bp, SARS Virus
agactcttagtaccatttcgaatgg

SEQ ID NO: 222143 - DNA, 25 bp, SARS Virus
gactcttagtaccatttcgaatggt

SEQ ID NO: 222144 - DNA, 25 bp, SARS Virus
actcttagtaccctttcgaatggta

SEQ ID NO: 222145 - DNA, 25 bp, SARS Virus
ctcttagtaccacttcgaatggtaa

SEQ ID NO: 222146 - DNA, 25 bp, SARS Virus
tcttagtaccatctcgaatggtaac

SEQ ID NO: 222147 - DNA, 25 bp, SARS Virus
cttagtaccattccgaatggtaact

SEQ ID NO: 222148 - DNA, 25 bp, SARS Virus
ttagtaccatttcgaatggtaacta

SEQ ID NO: 222149 - DNA, 25 bp, SARS Virus
tagtaccatttccaatggtaactat

SEQ ID NO: 222150 - DNA, 25 bp, SARS Virus
agtaccatttcgcatggtaactata

SEQ ID NO: 222151 - DNA, 25 bp, SARS Virus
gtaccatttcgactggtaactatag

SEQ ID NO: 222152 - DNA, 25 bp, SARS Virus
taccatttcgaacggtaactatagt

SEQ ID NO: 222153 - DNA, 25 bp, SARS Virus
accatttcgaatcgtaactatagtc

SEQ ID NO: 222154 - DNA, 25 bp, SARS Virus
ccatttcgaatgctaactatagtcg

SEQ ID NO: 222155 - DNA, 25 bp, SARS Virus
catttcgaatggcaactatagtcgt

SEQ ID NO: 222156 - DNA, 25 bp, SARS Virus
atttcgaatggtcactatagtcgtt

SEQ ID NO: 222157 - DNA, 25 bp, SARS Virus
tttcgaatggtacctatagtcgttt

SEQ ID NO: 222158 - DNA, 25 bp, SARS Virus
ttcgaatggtaactatagtcgtttg

SEQ ID NO: 222159 - DNA, 25 bp, SARS Virus
tcgaatggtaaccatagtcgtttgt

SEQ ID NO: 222160 - DNA, 25 bp, SARS Virus
cgaatggtaactctagtcgtttgtt

SEQ ID NO: 222161 - DNA, 25 bp, SARS Virus
gaatggtaactacagtcgtttgttc

SEQ ID NO: 222162 - DNA, 25 bp, SARS Virus
aatggtaactatcgtcgtttgttct

SEQ ID NO: 222163 - DNA, 25 bp, SARS Virus
atggtaactatactcgtttgttctc

SEQ ID NO: 222164 - DNA, 25 bp, SARS Virus
tggtaactatagccgtttgttctca

SEQ ID NO: 222165 - DNA, 25 bp, SARS Virus
ggtaactatagtcgtttgttctcat

SEQ ID NO: 222166 - DNA, 25 bp, SARS Virus
gtaactatagtcctttgttctcatt

SEQ ID NO: 222167 - DNA, 25 bp, SARS Virus
taactatagtcgcttgttctcattg

SEQ ID NO: 222168 - DNA, 25 bp, SARS Virus
aactatagtcgtctgttctcattga

SEQ ID NO: 222169 - DNA, 25 bp, SARS Virus
actatagtcgttcgttctcattgaa

SEQ ID NO: 222170 - DNA, 25 bp, SARS Virus
ctatagtcgtttcttctcattgaat

SEQ ID NO: 222171 - DNA, 25 bp, SARS Virus
tatagtcgtttgctctcattgaata

SEQ ID NO: 222172 - DNA, 25 bp, SARS Virus
atagtcgtttgtcctcattgaataa

SEQ ID NO: 222173 - DNA, 25 bp, SARS Virus
tagtcgtttgttctcattgaataac

SEQ ID NO: 222174 - DNA, 25 bp, SARS Virus
agtcgtttgttcccattgaataacc

SEQ ID NO: 222175 - DNA, 25 bp, SARS Virus
gtcgtttgttctcattgaataacca

SEQ ID NO: 222176 - DNA, 25 bp, SARS Virus
tcgtttgttctccttgaataaccat

SEQ ID NO: 222177 - DNA, 25 bp, SARS Virus
cgtttgttctcactgaataaccatt

SEQ ID NO: 222178 - DNA, 25 bp, SARS Virus
gtttgttctcatcgaataaccattc

SEQ ID NO: 222179 - DNA, 25 bp, SARS Virus
tttgttctcattcaataaccattct

SEQ ID NO: 222180 - DNA, 25 bp, SARS Virus
ttgttctcattgcataaccattctt

SEQ ID NO: 222181 - DNA, 25 bp, SARS Virus
tgttctcattgactaaccattcttt

SEQ ID NO: 222182 - DNA, 25 bp, SARS Virus
gttctcattgaacaaccattctttg

SEQ ID NO: 222183 - DNA, 25 bp, SARS Virus
ttctcattgaatcaccattctttga

SEQ ID NO: 222184 - DNA, 25 bp, SARS Virus
tctcattgaatacccattctttgaa

SEQ ID NO: 222185 - DNA, 25 bp, SARS Virus
ctcattgaataaccattctttgaat

SEQ ID NO: 222186 - DNA, 25 bp, SARS Virus
tcattgaataaccattctttgaatc

SEQ ID NO: 222187 - DNA, 25 bp, SARS Virus
cattgaataacccttctttgaatca

SEQ ID NO: 222188 - DNA, 25 bp, SARS Virus
attgaataaccactctttgaatcaa

SEQ ID NO: 222189 - DNA, 25 bp, SARS Virus
ttgaataaccatcctttgaatcaaa

SEQ ID NO: 222190 - DNA, 25 bp, SARS Virus
tgaataaccattctttgaatcaaag

SEQ ID NO: 222191 - DNA, 25 bp, SARS Virus
gaataaccattccttgaatcaaaga

SEQ ID NO: 222192 - DNA, 25 bp, SARS Virus
aataaccattctctgaatcaaagaa

SEQ ID NO: 222193 - DNA, 25 bp, SARS Virus
ataaccattcttcgaatcaaagaag

SEQ ID NO: 222194 - DNA, 25 bp, SARS Virus
taaccattctttcaatcaaagaagg

SEQ ID NO: 222195 - DNA, 25 bp, SARS Virus
aaccattctttgcatcaaagaaggt

SEQ ID NO: 222196 - DNA, 25 bp, SARS Virus
accattctttgactcaaagaaggtc

SEQ ID NO: 222197 - DNA, 25 bp, SARS Virus
ccattctttgaaccaaagaaggtca

SEQ ID NO: 222198 - DNA, 25 bp, SARS Virus
cattctttgaatcaaagaaggtcac

SEQ ID NO: 222199 - DNA, 25 bp, SARS Virus
attctttgaatccaagaaggtcaca

SEQ ID NO: 222200 - DNA, 25 bp, SARS Virus
ttctttgaatcacagaaggtcacaa

SEQ ID NO: 222201 - DNA, 25 bp, SARS Virus
tctttgaatcaacgaaggtcacaac

SEQ ID NO: 222202 - DNA, 25 bp, SARS Virus
ctttgaatcaaacaaggtcacaaca

SEQ ID NO: 222203 - DNA, 25 bp, SARS Virus
tttgaatcaaagcaggtcacaacac

SEQ ID NO: 222204 - DNA, 25 bp, SARS Virus
ttgaatcaaagacggtcacaacacc

SEQ ID NO: 222205 - DNA, 25 bp, SARS Virus
tgaatcaaagaacgtcacaacacca

SEQ ID NO: 222206 - DNA, 25 bp, SARS Virus
gaatcaaagaagctcacaacaccat

SEQ ID NO: 222207 - DNA, 25 bp, SARS Virus
aatcaaagaaggccacaacaccatt

SEQ ID NO: 222208 - DNA, 25 bp, SARS Virus
atcaaagaaggtcacaacaccattg

SEQ ID NO: 222209 - DNA, 25 bp, SARS Virus
tcaaagaaggtcccaacaccattgg

SEQ ID NO: 222210 - DNA, 25 bp, SARS Virus
caaagaaggtcacaacaccattgga

SEQ ID NO: 222211 - DNA, 25 bp, SARS Virus
aaagaaggtcaccacaccattggag

SEQ ID NO: 222212 - DNA, 25 bp, SARS Virus
aagaaggtcacaccaccattggagt

SEQ ID NO: 222213 - DNA, 25 bp, SARS Virus
agaaggtcacaacaccattggagta

SEQ ID NO: 222214 - DNA, 25 bp, SARS Virus
gaaggtcacaaccccattggagtag

SEQ ID NO: 222215 - DNA, 25 bp, SARS Virus
aaggtcacaacaccattggagtagt

SEQ ID NO: 222216 - DNA, 25 bp, SARS Virus
aggtcacaacaccattggagtagtt

SEQ ID NO: 222217 - DNA, 25 bp, SARS Virus
ggtcacaacacccttggagtagtta

SEQ ID NO: 222218 - DNA, 25 bp, SARS Virus
gtcacaacaccactggagtagttac

SEQ ID NO: 222219 - DNA, 25 bp, SARS Virus
tcacaacaccatcggagtagttacg

SEQ ID NO: 222220 - DNA, 25 bp, SARS Virus
cacaacaccattcgagtagttacgt

SEQ ID NO: 222221 - DNA, 25 bp, SARS Virus
acaacaccattgcagtagttacgtc

SEQ ID NO: 222222 - DNA, 25 bp, SARS Virus
caacaccattggcgtagttacgtcc

SEQ ID NO: 222223 - DNA, 25 bp, SARS Virus
aacaccattggactagttacgtccg

SEQ ID NO: 222224 - DNA, 25 bp, SARS Virus
acaccattggagcagttacgtccgg

SEQ ID NO: 222225 - DNA, 25 bp, SARS Virus
caccattggagtcgttacgtccgga

SEQ ID NO: 222226 - DNA, 25 bp, SARS Virus
accattggagtacttacgtccggaa

SEQ ID NO: 222227 - DNA, 25 bp, SARS Virus
ccattggagtagctacgtccggaat

SEQ ID NO: 222228 - DNA, 25 bp, SARS Virus
cattggagtagtcacgtccggaatt

SEQ ID NO: 222229 - DNA, 25 bp, SARS Virus
attggagtagttccgtccggaatta

SEQ ID NO: 222230 - DNA, 25 bp, SARS Virus
ttggagtagttacgtccggaattaa

SEQ ID NO: 222231 - DNA, 25 bp, SARS Virus
tggagtagttacctccggaattaaa

SEQ ID NO: 222232 - DNA, 25 bp, SARS Virus
ggagtagttacgcccggaattaaaa

SEQ ID NO: 222233 - DNA, 25 bp, SARS Virus
gagtagttacgtccggaattaaaaa

SEQ ID NO: 222234 - DNA, 25 bp, SARS Virus
agtagttacgtccggaattaaaaac

SEQ ID NO: 222235 - DNA, 25 bp, SARS Virus
gtagttacgtcccgaattaaaaacc

SEQ ID NO: 222236 - DNA, 25 bp, SARS Virus
tagttacgtccgcaattaaaaaccg

SEQ ID NO: 222237 - DNA, 25 bp, SARS Virus
agttacgtccggcattaaaaaccga

SEQ ID NO: 222238 - DNA, 25 bp, SARS Virus
gttacgtccggacttaaaaaccgaa

SEQ ID NO: 222239 - DNA, 25 bp, SARS Virus
ttacgtccggaactaaaaaccgaag

SEQ ID NO: 222240 - DNA, 25 bp, SARS Virus
tacgtccggaatcaaaaaccgaagt

SEQ ID NO: 222241 - DNA, 25 bp, SARS Virus
acgtccggaattcaaaaccgaagtg

SEQ ID NO: 222242 - DNA, 25 bp, SARS Virus
cgtccggaattacaaaccgaagtgt

SEQ ID NO: 222243 - DNA, 25 bp, SARS Virus
gtccggaattaacaaccgaagtgta

SEQ ID NO: 222244 - DNA, 25 bp, SARS Virus
tccggaattaaacaccgaagtgtag

SEQ ID NO: 222245 - DNA, 25 bp, SARS Virus
ccggaattaaaacccgaagtgtagc

SEQ ID NO: 222246 - DNA, 25 bp, SARS Virus
cggaattaaaaaccgaagtgtagct

SEQ ID NO: 222247 - DNA, 25 bp, SARS Virus
ggaattaaaaaccgaagtgtagctg

SEQ ID NO: 222248 - DNA, 25 bp, SARS Virus
gaattaaaaacccaagtgtagctgt

SEQ ID NO: 222249 - DNA, 25 bp, SARS Virus
aattaaaaaccgcagtgtagctgtc

SEQ ID NO: 222250 - DNA, 25 bp, SARS Virus
attaaaaaccgacgtgtagctgtcc

SEQ ID NO: 222251 - DNA, 25 bp, SARS Virus
ttaaaaaccgaactgtagctgtccg

SEQ ID NO: 222252 - DNA, 25 bp, SARS Virus
taaaaaccgaagcgtagctgtccga

SEQ ID NO: 222253 - DNA, 25 bp, SARS Virus
aaaaaccgaagtctagctgtccgaa

SEQ ID NO: 222254 - DNA, 25 bp, SARS Virus
aaaaccgaagtgcagctgtccgaag

SEQ ID NO: 222255 - DNA, 25 bp, SARS Virus
aaaccgaagtgtcgctgtccgaaga

SEQ ID NO: 222256 - DNA, 25 bp, SARS Virus
aaccgaagtgtacctgtccgaagac

SEQ ID NO: 222257 - DNA, 25 bp, SARS Virus
accgaagtgtagctgtccgaagaca

SEQ ID NO: 222258 - DNA, 25 bp, SARS Virus
ccgaagtgtagccgtccgaagacat

SEQ ID NO: 222259 - DNA, 25 bp, SARS Virus
cgaagtgtagctctccgaagacatg

SEQ ID NO: 222260 - DNA, 25 bp, SARS Virus
gaagtgtagctgcccgaagacatgc

SEQ ID NO: 222261 - DNA, 25 bp, SARS Virus
aagtgtagctgtccgaagacatgct

SEQ ID NO: 222262 - DNA, 25 bp, SARS Virus
agtgtagctgtccgaagacatgctg

SEQ ID NO: 222263 - DNA, 25 bp, SARS Virus
gtgtagctgtcccaagacatgctgt

SEQ ID NO: 222264 - DNA, 25 bp, SARS Virus
tgtagctgtccgcagacatgctgtc

SEQ ID NO: 222265 - DNA, 25 bp, SARS Virus
gtagctgtccgacgacatgctgtct

SEQ ID NO: 222266 - DNA, 25 bp, SARS Virus
tagctgtccgaacacatgctgtcta

SEQ ID NO: 222267 - DNA, 25 bp, SARS Virus
agctgtccgaagccatgctgtctaa

SEQ ID NO: 222268 - DNA, 25 bp, SARS Virus
gctgtccgaagacatgctgtctaaa

SEQ ID NO: 222269 - DNA, 25 bp, SARS Virus
ctgtccgaagacctgctgtctaaag

SEQ ID NO: 222270 - DNA, 25 bp, SARS Virus
tgtccgaagacacgctgtctaaaga

SEQ ID NO: 222271 - DNA, 25 bp, SARS Virus
gtccgaagacatcctgtctaaagag

SEQ ID NO: 222272 - DNA, 25 bp, SARS Virus
tccgaagacatgctgtctaaagagg

SEQ ID NO: 222273 - DNA, 25 bp, SARS Virus
ccgaagacatgccgtctaaagagga

SEQ ID NO: 222274 - DNA, 25 bp, SARS Virus
cgaagacatgctctctaaagaggag

SEQ ID NO: 222275 - DNA, 25 bp, SARS Virus
gaagacatgctgcctaaagaggagt

SEQ ID NO: 222276 - DNA, 25 bp, SARS Virus
aagacatgctgtctaaagaggagtc

SEQ ID NO: 222277 - DNA, 25 bp, SARS Virus
agacatgctgtccaaagaggagtca

SEQ ID NO: 222278 - DNA, 25 bp, SARS Virus
gacatgctgtctcaagaggagtcaa

SEQ ID NO: 222279 - DNA, 25 bp, SARS Virus
acatgctgtctacagaggagtcaaa

SEQ ID NO: 222280 - DNA, 25 bp, SARS Virus
catgctgtctaacgaggagtcaaaa

SEQ ID NO: 222281 - DNA, 25 bp, SARS Virus
atgctgtctaaacaggagtcaaaac

SEQ ID NO: 222282 - DNA, 25 bp, SARS Virus
tgctgtctaaagcggagtcaaaacc

SEQ ID NO: 222283 - DNA, 25 bp, SARS Virus
gctgtctaaagacgagtcaaaacct

SEQ ID NO: 222284 - DNA, 25 bp, SARS Virus
ctgtctaaagagcagtcaaaacctt

SEQ ID NO: 222285 - DNA, 25 bp, SARS Virus
tgtctaaagaggcgtcaaaacctta

SEQ ID NO: 222286 - DNA, 25 bp, SARS Virus
gtctaaagaggactcaaaaccttag

SEQ ID NO: 222287 - DNA, 25 bp, SARS Virus
tctaaagaggagccaaaaccttaga

SEQ ID NO: 222288 - DNA, 25 bp, SARS Virus
ctaaagaggagtcaaaaccttagaa

SEQ ID NO: 222289 - DNA, 25 bp, SARS Virus
taaagaggagtccaaaccttagaag

SEQ ID NO: 222290 - DNA, 25 bp, SARS Virus
aaagaggagtcacaaccttagaaga

SEQ ID NO: 222291 - DNA, 25 bp, SARS Virus
aagaggagtcaacaccttagaagac

SEQ ID NO: 222292 - DNA, 25 bp, SARS Virus
agaggagtcaaacccttagaagaca

SEQ ID NO: 222293 - DNA, 25 bp, SARS Virus
gaggagtcaaaaccttagaagacac

SEQ ID NO: 222294 - DNA, 25 bp, SARS Virus
aggagtcaaaaccttagaagacaca

SEQ ID NO: 222295 - DNA, 25 bp, SARS Virus
ggagtcaaaaccctagaagacacaa

SEQ ID NO: 222296 - DNA, 25 bp, SARS Virus
gagtcaaaacctcagaagacacaaa

SEQ ID NO: 222297 - DNA, 25 bp, SARS Virus
agtcaaaaccttcgaagacacaaac

SEQ ID NO: 222298 - DNA, 25 bp, SARS Virus
gtcaaaaccttacaagacacaaacc

SEQ ID NO: 222299 - DNA, 25 bp, SARS Virus
tcaaaaccttagcagacacaaacca

SEQ ID NO: 222300 - DNA, 25 bp, SARS Virus
caaaaccttagacgacacaaaccac

SEQ ID NO: 222301 - DNA, 25 bp, SARS Virus
aaaaccttagaacacacaaaccacc

SEQ ID NO: 222302 - DNA, 25 bp, SARS Virus
aaaccttagaagccacaaaccaccg

SEQ ID NO: 222303 - DNA, 25 bp, SARS Virus
aaccttagaagacacaaaccaccga

SEQ ID NO: 222304 - DNA, 25 bp, SARS Virus
accttagaagacccaaaccaccgag

SEQ ID NO: 222305 - DNA, 25 bp, SARS Virus
ccttagaagacacaaaccaccgagg

SEQ ID NO: 222306 - DNA, 25 bp, SARS Virus
cttagaagacaccaaccaccgagga

SEQ ID NO: 222307 - DNA, 25 bp, SARS Virus
ttagaagacacacaccaccgaggag

SEQ ID NO: 222308 - DNA, 25 bp, SARS Virus
tagaagacacaacccaccgaggaga

SEQ ID NO: 222309 - DNA, 25 bp, SARS Virus
agaagacacaaaccaccgaggagaa

SEQ ID NO: 222310 - DNA, 25 bp, SARS Virus
gaagacacaaaccaccgaggagaac

SEQ ID NO: 222311 - DNA, 25 bp, SARS Virus
aagacacaaacccccgaggagaaca

SEQ ID NO: 222312 - DNA, 25 bp, SARS Virus
agacacaaaccaccgaggagaacaa

SEQ ID NO: 222313 - DNA, 25 bp, SARS Virus
gacacaaaccaccgaggagaacaaa

SEQ ID NO: 222314 - DNA, 25 bp, SARS Virus
acacaaaccacccaggagaacaaat

SEQ ID NO: 222315 - DNA, 25 bp, SARS Virus
cacaaaccaccgcggagaacaaatc

SEQ ID NO: 222316 - DNA, 25 bp, SARS Virus
acaaaccaccgacgagaacaaatcc

SEQ ID NO: 222317 - DNA, 25 bp, SARS Virus
caaaccaccgagcagaacaaatcca

SEQ ID NO: 222318 - DNA, 25 bp, SARS Virus
aaaccaccgaggcgaacaaatccac

SEQ ID NO: 222319 - DNA, 25 bp, SARS Virus
aaccaccgaggacaacaaatccacg

SEQ ID NO: 222320 - DNA, 25 bp, SARS Virus
accaccgaggagcacaaatccacga

SEQ ID NO: 222321 - DNA, 25 bp, SARS Virus
ccaccgaggagaccaaatccacgaa

SEQ ID NO: 222322 - DNA, 25 bp, SARS Virus
caccgaggagaacaaatccacgaag

SEQ ID NO: 222323 - DNA, 25 bp, SARS Virus
accgaggagaaccaatccacgaagg

SEQ ID NO: 222324 - DNA, 25 bp, SARS Virus
ccgaggagaacacatccacgaaggt

SEQ ID NO: 222325 - DNA, 25 bp, SARS Virus
cgaggagaacaactccacgaaggtg

SEQ ID NO: 222326 - DNA, 25 bp, SARS Virus
gaggagaacaaacccacgaaggtga

SEQ ID NO: 222327 - DNA, 25 bp, SARS Virus
aggagaacaaatccacgaaggtgag

SEQ ID NO: 222328 - DNA, 25 bp, SARS Virus
ggagaacaaatccacgaaggtgaga

SEQ ID NO: 222329 - DNA, 25 bp, SARS Virus
gagaacaaatccccgaaggtgagat

SEQ ID NO: 222330 - DNA, 25 bp, SARS Virus
agaacaaatccacgaaggtgagatc

SEQ ID NO: 222331 - DNA, 25 bp, SARS Virus
gaacaaatccaccaaggtgagatcc

SEQ ID NO: 222332 - DNA, 25 bp, SARS Virus
aacaaatccacgcaggtgagatccg

SEQ ID NO: 222333 - DNA, 25 bp, SARS Virus
acaaatccacgacggtgagatccga

SEQ ID NO: 222334 - DNA, 25 bp, SARS Virus
caaatccacgaacgtgagatccgaa

SEQ ID NO: 222335 - DNA, 25 bp, SARS Virus
aaatccacgaagctgagatccgaag

SEQ ID NO: 222336 - DNA, 25 bp, SARS Virus
aatccacgaaggcgagatccgaagt

SEQ ID NO: 222337 - DNA, 25 bp, SARS Virus
atccacgaaggtcagatccgaagtc

SEQ ID NO: 222338 - DNA, 25 bp, SARS Virus
tccacgaaggtgcgatccgaagtcc

SEQ ID NO: 222339 - DNA, 25 bp, SARS Virus
ccacgaaggtgacatccgaagtcca

SEQ ID NO: 222340 - DNA, 25 bp, SARS Virus
cacgaaggtgagctccgaagtccaa

SEQ ID NO: 222341 - DNA, 25 bp, SARS Virus
acgaaggtgagacccgaagtccaat

SEQ ID NO: 222342 - DNA, 25 bp, SARS Virus
cgaaggtgagatccgaagtccaata

SEQ ID NO: 222343 - DNA, 25 bp, SARS Virus
gaaggtgagatccgaagtccaatag

SEQ ID NO: 222344 - DNA, 25 bp, SARS Virus
aaggtgagatcccaagtccaatagt

SEQ ID NO: 222345 - DNA, 25 bp, SARS Virus
aggtgagatccgcagtccaatagtt

SEQ ID NO: 222346 - DNA, 25 bp, SARS Virus
ggtgagatccgacgtccaatagttc

SEQ ID NO: 222347 - DNA, 25 bp, SARS Virus
gtgagatccgaactccaatagttct

SEQ ID NO: 222348 - DNA, 25 bp, SARS Virus
tgagatccgaagcccaatagttcta

SEQ ID NO: 222349 - DNA, 25 bp, SARS Virus
gagatccgaagtccaatagttctat

SEQ ID NO: 222350 - DNA, 25 bp, SARS Virus
agatccgaagtccaatagttctatt

SEQ ID NO: 222351 - DNA, 25 bp, SARS Virus
gatccgaagtcccatagttctatta

SEQ ID NO: 222352 - DNA, 25 bp, SARS Virus
atccgaagtccactagttctattag

SEQ ID NO: 222353 - DNA, 25 bp, SARS Virus
tccgaagtccaacagttctattagg

SEQ ID NO: 222354 - DNA, 25 bp, SARS Virus
ccgaagtccaatcgttctattaggt

SEQ ID NO: 222355 - DNA, 25 bp, SARS Virus
cgaagtccaatacttctattaggta

SEQ ID NO: 222356 - DNA, 25 bp, SARS Virus
gaagtccaatagctctattaggtac

SEQ ID NO: 222357 - DNA, 25 bp, SARS Virus
aagtccaatagtcctattaggtact

SEQ ID NO: 222358 - DNA, 25 bp, SARS Virus
agtccaatagttctattaggtactg

SEQ ID NO: 222359 - DNA, 25 bp, SARS Virus
gtccaatagttccattaggtactgt

SEQ ID NO: 222360 - DNA, 25 bp, SARS Virus
tccaatagttctcttaggtactgtt

SEQ ID NO: 222361 - DNA, 25 bp, SARS Virus
ccaatagttctactaggtactgttg

SEQ ID NO: 222362 - DNA, 25 bp, SARS Virus
caatagttctatcaggtactgttgg

SEQ ID NO: 222363 - DNA, 25 bp, SARS Virus
aatagttctattcggtactgttgga

SEQ ID NO: 222364 - DNA, 25 bp, SARS Virus
atagttctattacgtactgttggac

SEQ ID NO: 222365 - DNA, 25 bp, SARS Virus
tagttctattagctactgttggacg

SEQ ID NO: 222366 - DNA, 25 bp, SARS Virus
agttctattaggcactgttggacga

SEQ ID NO: 222367 - DNA, 25 bp, SARS Virus
gttctattaggtcctgttggacgag

SEQ ID NO: 222368 - DNA, 25 bp, SARS Virus
ttctattaggtactgttggacgagt

SEQ ID NO: 222369 - DNA, 25 bp, SARS Virus
tctattaggtaccgttggacgagta

SEQ ID NO: 222370 - DNA, 25 bp, SARS Virus
ctattaggtactcttggacgagtat

SEQ ID NO: 222371 - DNA, 25 bp, SARS Virus
tattaggtactgctggacgagtatt

SEQ ID NO: 222372 - DNA, 25 bp, SARS Virus
attaggtactgtcggacgagtattt

SEQ ID NO: 222373 - DNA, 25 bp, SARS Virus
ttaggtactgttcgacgagtatttc

SEQ ID NO: 222374 - DNA, 25 bp, SARS Virus
taggtactgttgcacgagtatttct

SEQ ID NO: 222375 - DNA, 25 bp, SARS Virus
aggtactgttggccgagtatttctc

SEQ ID NO: 222376 - DNA, 25 bp, SARS Virus
ggtactgttggacgagtatttctcg

SEQ ID NO: 222377 - DNA, 25 bp, SARS Virus
gtactgttggaccagtatttctcga

SEQ ID NO: 222378 - DNA, 25 bp, SARS Virus
tactgttggacgcgtatttctcgaa

SEQ ID NO: 222379 - DNA, 25 bp, SARS Virus
actgttggacgactatttctcgaaa

SEQ ID NO: 222380 - DNA, 25 bp, SARS Virus
ctgttggacgagcatttctcgaaac

SEQ ID NO: 222381 - DNA, 25 bp, SARS Virus
tgttggacgagtctttctcgaaaca

SEQ ID NO: 222382 - DNA, 25 bp, SARS Virus
gttggacgagtacttctcgaaacag

SEQ ID NO: 222383 - DNA, 25 bp, SARS Virus
ttggacgagtatctctcgaaacagt

SEQ ID NO: 222384 - DNA, 25 bp, SARS Virus
tggacgagtattcctcgaaacagta

SEQ ID NO: 222385 - DNA, 25 bp, SARS Virus
ggacgagtatttctcgaaacagtaa

SEQ ID NO: 222386 - DNA, 25 bp, SARS Virus
gacgagtatttcccgaaacagtaac

SEQ ID NO: 222387 - DNA, 25 bp, SARS Virus
acgagtatttctcgaaacagtaact

SEQ ID NO: 222388 - DNA, 25 bp, SARS Virus
cgagtatttctccaaacagtaactg

SEQ ID NO: 222389 - DNA, 25 bp, SARS Virus
gagtatttctcgcaacagtaactga

SEQ ID NO: 222390 - DNA, 25 bp, SARS Virus
agtatttctcgacacagtaactgac

SEQ ID NO: 222391 - DNA, 25 bp, SARS Virus
gtatttctcgaaccagtaactgacg

SEQ ID NO: 222392 - DNA, 25 bp, SARS Virus
tatttctcgaaacagtaactgacgt

SEQ ID NO: 222393 - DNA, 25 bp, SARS Virus
atttctcgaaaccgtaactgacgtt

SEQ ID NO: 222394 - DNA, 25 bp, SARS Virus
tttctcgaaacactaactgacgtta

SEQ ID NO: 222395 - DNA, 25 bp, SARS Virus
ttctcgaaacagcaactgacgttat

SEQ ID NO: 222396 - DNA, 25 bp, SARS Virus
tctcgaaacagtcactgacgttata

SEQ ID NO: 222397 - DNA, 25 bp, SARS Virus
ctcgaaacagtacctgacgttatat

SEQ ID NO: 222398 - DNA, 25 bp, SARS Virus
tcgaaacagtaactgacgttatatt

SEQ ID NO: 222399 - DNA, 25 bp, SARS Virus
cgaaacagtaaccgacgttatattt

SEQ ID NO: 222400 - DNA, 25 bp, SARS Virus
gaaacagtaactcacgttatatttg

SEQ ID NO: 222401 - DNA, 25 bp, SARS Virus
aaacagtaactgccgttatatttgg

SEQ ID NO: 222402 - DNA, 25 bp, SARS Virus
aacagtaactgacgttatatttgga

SEQ ID NO: 222403 - DNA, 25 bp, SARS Virus
acagtaactgaccttatatttggac

SEQ ID NO: 222404 - DNA, 25 bp, SARS Virus
cagtaactgacgctatatttggaca

SEQ ID NO: 222405 - DNA, 25 bp, SARS Virus
agtaactgacgtcatatttggacac

SEQ ID NO: 222406 - DNA, 25 bp, SARS Virus
gtaactgacgttctatttggacaca

SEQ ID NO: 222407 - DNA, 25 bp, SARS Virus
taactgacgttacatttggacacat

SEQ ID NO: 222408 - DNA, 25 bp, SARS Virus
aactgacgttatctttggacacatg

SEQ ID NO: 222409 - DNA, 25 bp, SARS Virus
actgacgttatacttggacacatgc

SEQ ID NO: 222410 - DNA, 25 bp, SARS Virus
ctgacgttatatctggacacatgct

SEQ ID NO: 222411 - DNA, 25 bp, SARS Virus
tgacgttatattcggacacatgctt

SEQ ID NO: 222412 - DNA, 25 bp, SARS Virus
gacgttatatttcgacacatgcttg

SEQ ID NO: 222413 - DNA, 25 bp, SARS Virus
acgttatatttgcacacatgcttgg

SEQ ID NO: 222414 - DNA, 25 bp, SARS Virus
cgttatatttggccacatgcttggc

SEQ ID NO: 222415 - DNA, 25 bp, SARS Virus
gttatatttggacacatgcttggca

SEQ ID NO: 222416 - DNA, 25 bp, SARS Virus
ttatatttggacccatgcttggcag

SEQ ID NO: 222417 - DNA, 25 bp, SARS Virus
tatatttggacacatgcttggcaga

SEQ ID NO: 222418 - DNA, 25 bp, SARS Virus
atatttggacacctgcttggcagac

SEQ ID NO: 222419 - DNA, 25 bp, SARS Virus
tatttggacacacgcttggcagacg

SEQ ID NO: 222420 - DNA, 25 bp, SARS Virus
atttggacacatccttggcagacgt

SEQ ID NO: 222421 - DNA, 25 bp, SARS Virus
tttggacacatgcttggcagacgtg

SEQ ID NO: 222422 - DNA, 25 bp, SARS Virus
ttggacacatgcctggcagacgtgc

SEQ ID NO: 222423 - DNA, 25 bp, SARS Virus
tggacacatgctcggcagacgtgcg

SEQ ID NO: 222424 - DNA, 25 bp, SARS Virus
ggacacatgcttcgcagacgtgcgt

SEQ ID NO: 222425 - DNA, 25 bp, SARS Virus
gacacatgcttgccagacgtgcgtg

SEQ ID NO: 222426 - DNA, 25 bp, SARS Virus
acacatgcttggcagacgtgcgtgt

SEQ ID NO: 222427 - DNA, 25 bp, SARS Virus
cacatgcttggccgacgtgcgtgtg

SEQ ID NO: 222428 - DNA, 25 bp, SARS Virus
acatgcttggcacacgtgcgtgtga

SEQ ID NO: 222429 - DNA, 25 bp, SARS Virus
catgcttggcagccgtgcgtgtgaa

SEQ ID NO: 222430 - DNA, 25 bp, SARS Virus
atgcttggcagacgtgcgtgtgaac

SEQ ID NO: 222431 - DNA, 25 bp, SARS Virus
tgcttggcagacctgcgtgtgaaca

SEQ ID NO: 222432 - DNA, 25 bp, SARS Virus
gcttggcagacgcgcgtgtgaacat

SEQ ID NO: 222433 - DNA, 25 bp, SARS Virus
cttggcagacgtccgtgtgaacatt

SEQ ID NO: 222434 - DNA, 25 bp, SARS Virus
ttggcagacgtgcgtgtgaacattt

SEQ ID NO: 222435 - DNA, 25 bp, SARS Virus
tggcagacgtgcctgtgaacatttc

SEQ ID NO: 222436 - DNA, 25 bp, SARS Virus
ggcagacgtgcgcgtgaacatttct

SEQ ID NO: 222437 - DNA, 25 bp, SARS Virus
gcagacgtgcgtctgaacatttctg

SEQ ID NO: 222438 - DNA, 25 bp, SARS Virus
cagacgtgcgtgcgaacatttctga

SEQ ID NO: 222439 - DNA, 25 bp, SARS Virus
agacgtgcgtgtcaacatttctgac

SEQ ID NO: 222440 - DNA, 25 bp, SARS Virus
gacgtgcgtgtgcacatttctgact

SEQ ID NO: 222441 - DNA, 25 bp, SARS Virus
acgtgcgtgtgaccatttctgactt

SEQ ID NO: 222442 - DNA, 25 bp, SARS Virus
cgtgcgtgtgaacatttctgacttc

SEQ ID NO: 222443 - DNA, 25 bp, SARS Virus
gtgcgtgtgaacctttctgacttca

SEQ ID NO: 222444 - DNA, 25 bp, SARS Virus
tgcgtgtgaacacttctgacttcac

SEQ ID NO: 222445 - DNA, 25 bp, SARS Virus
gcgtgtgaacatctctgacttcacc

SEQ ID NO: 222446 - DNA, 25 bp, SARS Virus
cgtgtgaacattcctgacttcacca

SEQ ID NO: 222447 - DNA, 25 bp, SARS Virus
gtgtgaacatttctgacttcaccaa

SEQ ID NO: 222448 - DNA, 25 bp, SARS Virus
tgtgaacatttccgacttcaccaaa

SEQ ID NO: 222449 - DNA, 25 bp, SARS Virus
gtgaacatttctcacttcaccaaat

SEQ ID NO: 222450 - DNA, 25 bp, SARS Virus
tgaacatttctgccttcaccaaatc

SEQ ID NO: 222451 - DNA, 25 bp, SARS Virus
gaacatttctgacttcaccaaatcg

SEQ ID NO: 222452 - DNA, 25 bp, SARS Virus
aacatttctgacctcaccaaatcgt

SEQ ID NO: 222453 - DNA, 25 bp, SARS Virus
acatttctgactccaccaaatcgtg

SEQ ID NO: 222454 - DNA, 25 bp, SARS Virus
catttctgacttcaccaaatcgtgg

SEQ ID NO: 222455 - DNA, 25 bp, SARS Virus
atttctgacttccccaaatcgtggt

SEQ ID NO: 222456 - DNA, 25 bp, SARS Virus
tttctgacttcaccaaatcgtggtt

SEQ ID NO: 222457 - DNA, 25 bp, SARS Virus
ttctgacttcaccaaatcgtggttt

SEQ ID NO: 222458 - DNA, 25 bp, SARS Virus
tctgacttcacccaatcgtggttta

SEQ ID NO: 222459 - DNA, 25 bp, SARS Virus
ctgacttcaccacatcgtggtttat

SEQ ID NO: 222460 - DNA, 25 bp, SARS Virus
tgacttcaccaactcgtggtttata

SEQ ID NO: 222461 - DNA, 25 bp, SARS Virus
gacttcaccaaaccgtggtttatac

SEQ ID NO: 222462 - DNA, 25 bp, SARS Virus
acttcaccaaatcgtggtttatacg

SEQ ID NO: 222463 - DNA, 25 bp, SARS Virus
cttcaccaaatcctggtttatacgg

SEQ ID NO: 222464 - DNA, 25 bp, SARS Virus
ttcaccaaatcgcggtttatacgga

SEQ ID NO: 222465 - DNA, 25 bp, SARS Virus
tcaccaaatcgtcgtttatacggac

SEQ ID NO: 222466 - DNA, 25 bp, SARS Virus
caccaaatcgtgctttatacggacg

SEQ ID NO: 222467 - DNA, 25 bp, SARS Virus
accaaatcgtggcttatacggacga

SEQ ID NO: 222468 - DNA, 25 bp, SARS Virus
ccaaatcgtggtctatacggacgac

SEQ ID NO: 222469 - DNA, 25 bp, SARS Virus
caaatcgtggttcatacggacgact

SEQ ID NO: 222470 - DNA, 25 bp, SARS Virus
aaatcgtggtttctacggacgactg

SEQ ID NO: 222471 - DNA, 25 bp, SARS Virus
aatcgtggtttacacggacgactgt

SEQ ID NO: 222472 - DNA, 25 bp, SARS Virus
atcgtggtttatccggacgactgtt

SEQ ID NO: 222473 - DNA, 25 bp, SARS Virus
tcgtggtttatacggacgactgttg

SEQ ID NO: 222474 - DNA, 25 bp, SARS Virus
cgtggtttataccgacgactgttgt

SEQ ID NO: 222475 - DNA, 25 bp, SARS Virus
gtggtttatacgcacgactgttgtt

SEQ ID NO: 222476 - DNA, 25 bp, SARS Virus
tggtttatacggccgactgttgtta

SEQ ID NO: 222477 - DNA, 25 bp, SARS Virus
ggtttatacggacgactgttgttac

SEQ ID NO: 222478 - DNA, 25 bp, SARS Virus
gtttatacggaccactgttgttacc

SEQ ID NO: 222479 - DNA, 25 bp, SARS Virus
tttatacggacgcctgttgttacca

SEQ ID NO: 222480 - DNA, 25 bp, SARS Virus
ttatacggacgactgttgttaccac

SEQ ID NO: 222481 - DNA, 25 bp, SARS Virus
tatacggacgaccgttgttaccacg

SEQ ID NO: 222482 - DNA, 25 bp, SARS Virus
atacggacgactcttgttaccacgt

SEQ ID NO: 222483 - DNA, 25 bp, SARS Virus
tacggacgactgctgttaccacgtt

SEQ ID NO: 222484 - DNA, 25 bp, SARS Virus
acggacgactgtcgttaccacgttc

SEQ ID NO: 222485 - DNA, 25 bp, SARS Virus
cggacgactgttcttaccacgttca

SEQ ID NO: 222486 - DNA, 25 bp, SARS Virus
ggacgactgttgctaccacgttcat

SEQ ID NO: 222487 - DNA, 25 bp, SARS Virus
gacgactgttgtcaccacgttcatt

SEQ ID NO: 222488 - DNA, 25 bp, SARS Virus
acgactgttgttcccacgttcattc

SEQ ID NO: 222489 - DNA, 25 bp, SARS Virus
cgactgttgttaccacgttcattct

SEQ ID NO: 222490 - DNA, 25 bp, SARS Virus
gactgttgttaccacgttcattcta

SEQ ID NO: 222491 - DNA, 25 bp, SARS Virus
actgttgttaccccgttcattctac

SEQ ID NO: 222492 - DNA, 25 bp, SARS Virus
ctgttgttaccacgttcattctaca

SEQ ID NO: 222493 - DNA, 25 bp, SARS Virus
tgttgttaccaccttcattctacag

SEQ ID NO: 222494 - DNA, 25 bp, SARS Virus
gttgttaccacgctcattctacagg

SEQ ID NO: 222495 - DNA, 25 bp, SARS Virus
ttgttaccacgtccattctacagga

SEQ ID NO: 222496 - DNA, 25 bp, SARS Virus
tgttaccacgttcattctacaggac

SEQ ID NO: 222497 - DNA, 25 bp, SARS Virus
gttaccacgttccttctacaggaca

SEQ ID NO: 222498 - DNA, 25 bp, SARS Virus
ttaccacgttcactctacaggacac

SEQ ID NO: 222499 - DNA, 25 bp, SARS Virus
taccacgttcatcctacaggacact

SEQ ID NO: 222500 - DNA, 25 bp, SARS Virus
accacgttcattctacaggacactt

SEQ ID NO: 222501 - DNA, 25 bp, SARS Virus
ccacgttcattccacaggacactta

SEQ ID NO: 222502 - DNA, 25 bp, SARS Virus
cacgttcattctccaggacacttaa

SEQ ID NO: 222503 - DNA, 25 bp, SARS Virus
acgttcattctacaggacacttaac

SEQ ID NO: 222504 - DNA, 25 bp, SARS Virus
cgttcattctaccggacacttaact

SEQ ID NO: 222505 - DNA, 25 bp, SARS Virus
gttcattctacacgacacttaactt

SEQ ID NO: 222506 - DNA, 25 bp, SARS Virus
ttcattctacagcacacttaacttt

SEQ ID NO: 222507 - DNA, 25 bp, SARS Virus
tcattctacaggccacttaacttta

SEQ ID NO: 222508 - DNA, 25 bp, SARS Virus
cattctacaggacacttaactttaa

SEQ ID NO: 222509 - DNA, 25 bp, SARS Virus
attctacaggacccttaactttaaa

SEQ ID NO: 222510 - DNA, 25 bp, SARS Virus
ttctacaggacacttaactttaaaa

SEQ ID NO: 222511 - DNA, 25 bp, SARS Virus
tctacaggacacctaactttaaaag

SEQ ID NO: 222512 - DNA, 25 bp, SARS Virus
ctacaggacactcaactttaaaagt

SEQ ID NO: 222513 - DNA, 25 bp, SARS Virus
tacaggacacttcactttaaaagta

SEQ ID NO: 222514 - DNA, 25 bp, SARS Virus
acaggacacttacctttaaaagtat

SEQ ID NO: 222515 - DNA, 25 bp, SARS Virus
caggacacttaactttaaaagtata

SEQ ID NO: 222516 - DNA, 25 bp, SARS Virus
aggacacttaaccttaaaagtatac

SEQ ID NO: 222517 - DNA, 25 bp, SARS Virus
ggacacttaactctaaaagtatacg

SEQ ID NO: 222518 - DNA, 25 bp, SARS Virus
gacacttaacttcaaaagtatacga

SEQ ID NO: 222519 - DNA, 25 bp, SARS Virus
acacttaactttcaaagtatacgac

SEQ ID NO: 222520 - DNA, 25 bp, SARS Virus
cacttaactttacaagtatacgacg

SEQ ID NO: 222521 - DNA, 25 bp, SARS Virus
acttaactttaacagtatacgacgg

SEQ ID NO: 222522 - DNA, 25 bp, SARS Virus
cttaactttaaacgtatacgacgga

SEQ ID NO: 222523 - DNA, 25 bp, SARS Virus
ttaactttaaaactatacgacggaa

SEQ ID NO: 222524 - DNA, 25 bp, SARS Virus
taactttaaaagcatacgacggaat

SEQ ID NO: 222525 - DNA, 25 bp, SARS Virus
aactttaaaagtctacgacggaatt

SEQ ID NO: 222526 - DNA, 25 bp, SARS Virus
actttaaaagtacacgacggaattc

SEQ ID NO: 222527 - DNA, 25 bp, SARS Virus
ctttaaaagtatccgacggaattct

SEQ ID NO: 222528 - DNA, 25 bp, SARS Virus
tttaaaagtatacgacggaattctt

SEQ ID NO: 222529 - DNA, 25 bp, SARS Virus
ttaaaagtataccacggaattcttc

SEQ ID NO: 222530 - DNA, 25 bp, SARS Virus
taaaagtatacgccggaattcttcg

SEQ ID NO: 222531 - DNA, 25 bp, SARS Virus
aaaagtatacgacggaattcttcga

SEQ ID NO: 222532 - DNA, 25 bp, SARS Virus
aaagtatacgaccgaattcttcgac

SEQ ID NO: 222533 - DNA, 25 bp, SARS Virus
aagtatacgacgcaattcttcgacc

SEQ ID NO: 222534 - DNA, 25 bp, SARS Virus
agtatacgacggcattcttcgacct

SEQ ID NO: 222535 - DNA, 25 bp, SARS Virus
gtatacgacggacttcttcgaccta

SEQ ID NO: 222536 - DNA, 25 bp, SARS Virus
tatacgacggaactcttcgacctac

SEQ ID NO: 222537 - DNA, 25 bp, SARS Virus
atacgacggaatccttcgacctaca

SEQ ID NO: 222538 - DNA, 25 bp, SARS Virus
tacgacggaattcttcgacctacag

SEQ ID NO: 222539 - DNA, 25 bp, SARS Virus
acgacggaattcctcgacctacagg

SEQ ID NO: 222540 - DNA, 25 bp, SARS Virus
cgacggaattctccgacctacagga

SEQ ID NO: 222541 - DNA, 25 bp, SARS Virus
gacggaattcttcgacctacaggag

SEQ ID NO: 222542 - DNA, 25 bp, SARS Virus
acggaattcttccacctacaggagt

SEQ ID NO: 222543 - DNA, 25 bp, SARS Virus
cggaattcttcgccctacaggagtg

SEQ ID NO: 222544 - DNA, 25 bp, SARS Virus
ggaattcttcgacctacaggagtgg

SEQ ID NO: 222545 - DNA, 25 bp, SARS Virus
gaattcttcgacctacaggagtgga

SEQ ID NO: 222546 - DNA, 25 bp, SARS Virus
aattcttcgacccacaggagtggac

SEQ ID NO: 222547 - DNA, 25 bp, SARS Virus
attcttcgacctccaggagtggacg

SEQ ID NO: 222548 - DNA, 25 bp, SARS Virus
ttcttcgacctacaggagtggacgt

SEQ ID NO: 222549 - DNA, 25 bp, SARS Virus
tcttcgacctaccggagtggacgta

SEQ ID NO: 222550 - DNA, 25 bp, SARS Virus
cttcgacctacacgagtggacgtaa

SEQ ID NO: 222551 - DNA, 25 bp, SARS Virus
ttcgacctacagcagtggacgtaaa

SEQ ID NO: 222552 - DNA, 25 bp, SARS Virus
tcgacctacaggcgtggacgtaaat

SEQ ID NO: 222553 - DNA, 25 bp, SARS Virus
cgacctacaggactggacgtaaatc

SEQ ID NO: 222554 - DNA, 25 bp, SARS Virus
gacctacaggagcggacgtaaatcc

SEQ ID NO: 222555 - DNA, 25 bp, SARS Virus
acctacaggagtcgacgtaaatcca

SEQ ID NO: 222556 - DNA, 25 bp, SARS Virus
cctacaggagtgcacgtaaatccaa

SEQ ID NO: 222557 - DNA, 25 bp, SARS Virus
ctacaggagtggccgtaaatccaat

SEQ ID NO: 222558 - DNA, 25 bp, SARS Virus
tacaggagtggacgtaaatccaatc

SEQ ID NO: 222559 - DNA, 25 bp, SARS Virus
acaggagtggacctaaatccaatcc

SEQ ID NO: 222560 - DNA, 25 bp, SARS Virus
caggagtggacgcaaatccaatcca

SEQ ID NO: 222561 - DNA, 25 bp, SARS Virus
actattgtagtggatggtacattcc

SEQ ID NO: 222562 - DNA, 25 bp, SARS Virus
ctattgtagtgggtggtacattcca

SEQ ID NO: 222563 - DNA, 25 bp, SARS Virus
tattgtagtggagggtacattccac

SEQ ID NO: 222564 - DNA, 25 bp, SARS Virus
attgtagtggatggtacattccacg

SEQ ID NO: 222565 - DNA, 25 bp, SARS Virus
ttgtagtggatggtacattccacgt

SEQ ID NO: 222566 - DNA, 25 bp, SARS Virus
tgtagtggatgggacattccacgta

SEQ ID NO: 222567 - DNA, 25 bp, SARS Virus
gtagtggatggtgcattccacgtag

SEQ ID NO: 222568 - DNA, 25 bp, SARS Virus
tagtggatggtagattccacgtagg

SEQ ID NO: 222569 - DNA, 25 bp, SARS Virus
agtggatggtacgttccacgtagga

SEQ ID NO: 222570 - DNA, 25 bp, SARS Virus
gtggatggtacagtccacgtaggaa

SEQ ID NO: 222571 - DNA, 25 bp, SARS Virus
tggatggtacatgccacgtaggaag

SEQ ID NO: 222572 - DNA, 25 bp, SARS Virus
ggatggtacattgcacgtaggaaga

SEQ ID NO: 222573 - DNA, 25 bp, SARS Virus
gatggtacattcgacgtaggaagag

SEQ ID NO: 222574 - DNA, 25 bp, SARS Virus
atggtacattccgcgtaggaagagt

SEQ ID NO: 222575 - DNA, 25 bp, SARS Virus
tggtacattccaggtaggaagagtt

SEQ ID NO: 222576 - DNA, 25 bp, SARS Virus
ggtacattccacgtaggaagagttc

SEQ ID NO: 222577 - DNA, 25 bp, SARS Virus
gtacattccacggaggaagagttcc

SEQ ID NO: 222578 - DNA, 25 bp, SARS Virus
tacattccacgtgggaagagttcct

SEQ ID NO: 222579 - DNA, 25 bp, SARS Virus
acattccacgtaggaagagttcctt

SEQ ID NO: 222580 - DNA, 25 bp, SARS Virus
cattccacgtaggaagagttccttt

SEQ ID NO: 222581 - DNA, 25 bp, SARS Virus
attccacgtagggagagttcctttc

SEQ ID NO: 222582 - DNA, 25 bp, SARS Virus
ttccacgtaggaggagttcctttct

SEQ ID NO: 222583 - DNA, 25 bp, SARS Virus
tccacgtaggaagagttcctttctg

SEQ ID NO: 222584 - DNA, 25 bp, SARS Virus
ccacgtaggaagggttcctttctgt

SEQ ID NO: 222585 - DNA, 25 bp, SARS Virus
cacgtaggaagagttcctttctgta

SEQ ID NO: 222586 - DNA, 25 bp, SARS Virus
acgtaggaagaggtcctttctgtat

SEQ ID NO: 222587 - DNA, 25 bp, SARS Virus
cgtaggaagagtgcctttctgtata

SEQ ID NO: 222588 - DNA, 25 bp, SARS Virus
gtaggaagagttgctttctgtatag

SEQ ID NO: 222589 - DNA, 25 bp, SARS Virus
taggaagagttcgtttctgtataga

SEQ ID NO: 222590 - DNA, 25 bp, SARS Virus
aggaagagttccgttctgtatagaa

SEQ ID NO: 222591 - DNA, 25 bp, SARS Virus
ggaagagttcctgtctgtatagaag

SEQ ID NO: 222592 - DNA, 25 bp, SARS Virus
gaagagttccttgctgtatagaagt

SEQ ID NO: 222593 - DNA, 25 bp, SARS Virus
aagagttcctttgtgtatagaagtg

SEQ ID NO: 222594 - DNA, 25 bp, SARS Virus
agagttcctttcggtatagaagtgg

SEQ ID NO: 222595 - DNA, 25 bp, SARS Virus
gagttcctttctgtatagaagtgga

SEQ ID NO: 222596 - DNA, 25 bp, SARS Virus
agttcctttctggatagaagtggag

SEQ ID NO: 222597 - DNA, 25 bp, SARS Virus
gttcctttctgtgtagaagtggaga

SEQ ID NO: 222598 - DNA, 25 bp, SARS Virus
ttcctttctgtagagaagtggagat

SEQ ID NO: 222599 - DNA, 25 bp, SARS Virus
tcctttctgtatggaagtggagatt

SEQ ID NO: 222600 - DNA, 25 bp, SARS Virus
cctttctgtatagaagtggagattc

SEQ ID NO: 222601 - DNA, 25 bp, SARS Virus
ctttctgtataggagtggagattcg

SEQ ID NO: 222602 - DNA, 25 bp, SARS Virus
tttctgtatagaggtggagattcgt

SEQ ID NO: 222603 - DNA, 25 bp, SARS Virus
ttctgtatagaagtggagattcgta

SEQ ID NO: 222604 - DNA, 25 bp, SARS Virus
tctgtatagaaggggagattcgtac

SEQ ID NO: 222605 - DNA, 25 bp, SARS Virus
ctgtatagaagtggagattcgtaca

SEQ ID NO: 222606 - DNA, 25 bp, SARS Virus
tgtatagaagtggagattcgtacaa

SEQ ID NO: 222607 - DNA, 25 bp, SARS Virus
gtatagaagtggggattcgtacaag

SEQ ID NO: 222608 - DNA, 25 bp, SARS Virus
tatagaagtggagattcgtacaaga

SEQ ID NO: 222609 - DNA, 25 bp, SARS Virus
atagaagtggaggttcgtacaagac

SEQ ID NO: 222610 - DNA, 25 bp, SARS Virus
tagaagtggagagtcgtacaagact

SEQ ID NO: 222611 - DNA, 25 bp, SARS Virus
agaagtggagatgcgtacaagactc

SEQ ID NO: 222612 - DNA, 25 bp, SARS Virus
gaagtggagattggtacaagactct

SEQ ID NO: 222613 - DNA, 25 bp, SARS Virus
aagtggagattcgtacaagactctt

SEQ ID NO: 222614 - DNA, 25 bp, SARS Virus
agtggagattcggacaagactctta

SEQ ID NO: 222615 - DNA, 25 bp, SARS Virus
gtggagattcgtgcaagactcttag

SEQ ID NO: 222616 - DNA, 25 bp, SARS Virus
tggagattcgtagaagactcttagt

SEQ ID NO: 222617 - DNA, 25 bp, SARS Virus
ggagattcgtacgagactcttagta

SEQ ID NO: 222618 - DNA, 25 bp, SARS Virus
gagattcgtacaggactcttagtac

SEQ ID NO: 222619 - DNA, 25 bp, SARS Virus
agattcgtacaagactcttagtacc

SEQ ID NO: 222620 - DNA, 25 bp, SARS Virus
gattcgtacaaggctcttagtacca

SEQ ID NO: 222621 - DNA, 25 bp, SARS Virus
attcgtacaagagtcttagtaccat

SEQ ID NO: 222622 - DNA, 25 bp, SARS Virus
ttcgtacaagacgcttagtaccatt

SEQ ID NO: 222623 - DNA, 25 bp, SARS Virus
tcgtacaagactgttagtaccattt

SEQ ID NO: 222624 - DNA, 25 bp, SARS Virus
cgtacaagactcgtagtaccatttc

SEQ ID NO: 222625 - DNA, 25 bp, SARS Virus
gtacaagactctgagtaccatttcg

SEQ ID NO: 222626 - DNA, 25 bp, SARS Virus
tacaagactcttggtaccatttcga

SEQ ID NO: 222627 - DNA, 25 bp, SARS Virus
acaagactcttagtaccatttcgaa

SEQ ID NO: 222628 - DNA, 25 bp, SARS Virus
caagactcttaggaccatttcgaat

SEQ ID NO: 222629 - DNA, 25 bp, SARS Virus
aagactcttagtgccatttcgaatg

SEQ ID NO: 222630 - DNA, 25 bp, SARS Virus
agactcttagtagcatttcgaatgg

SEQ ID NO: 222631 - DNA, 25 bp, SARS Virus
gactcttagtacgatttcgaatggt

SEQ ID NO: 222632 - DNA, 25 bp, SARS Virus
actcttagtaccgtttcgaatggta

SEQ ID NO: 222633 - DNA, 25 bp, SARS Virus
ctcttagtaccagttcgaatggtaa

SEQ ID NO: 222634 - DNA, 25 bp, SARS Virus
tcttagtaccatgtcgaatggtaac

SEQ ID NO: 222635 - DNA, 25 bp, SARS Virus
cttagtaccattgcgaatggtaact

SEQ ID NO: 222636 - DNA, 25 bp, SARS Virus
ttagtaccatttggaatggtaacta

SEQ ID NO: 222637 - DNA, 25 bp, SARS Virus
tagtaccatttcgaatggtaactat

SEQ ID NO: 222638 - DNA, 25 bp, SARS Virus
agtaccatttcggatggtaactata

SEQ ID NO: 222639 - DNA, 25 bp, SARS Virus
gtaccatttcgagtggtaactatag

SEQ ID NO: 222640 - DNA, 25 bp, SARS Virus
taccatttcgaagggtaactatagt

SEQ ID NO: 222641 - DNA, 25 bp, SARS Virus
accatttcgaatggtaactatagtc

SEQ ID NO: 222642 - DNA, 25 bp, SARS Virus
ccatttcgaatggtaactatagtcg

SEQ ID NO: 222643 - DNA, 25 bp, SARS Virus
catttcgaatgggaactatagtcgt

SEQ ID NO: 222644 - DNA, 25 bp, SARS Virus
atttcgaatggtgactatagtcgtt

SEQ ID NO: 222645 - DNA, 25 bp, SARS Virus
tttcgaatggtagctatagtcgttt

SEQ ID NO: 222646 - DNA, 25 bp, SARS Virus
ttcgaatggtaagtatagtcgtttg

SEQ ID NO: 222647 - DNA, 25 bp, SARS Virus
tcgaatggtaacgatagtcgtttgt

SEQ ID NO: 222648 - DNA, 25 bp, SARS Virus
cgaatggtaactgtagtcgtttgtt

SEQ ID NO: 222649 - DNA, 25 bp, SARS Virus
gaatggtaactagagtcgtttgttc

SEQ ID NO: 222650 - DNA, 25 bp, SARS Virus
aatggtaactatggtcgtttgttct

SEQ ID NO: 222651 - DNA, 25 bp, SARS Virus
atggtaactatagtcgtttgttctc

SEQ ID NO: 222652 - DNA, 25 bp, SARS Virus
tggtaactataggcgtttgttctca

SEQ ID NO: 222653 - DNA, 25 bp, SARS Virus
ggtaactatagtggtttgttctcat

SEQ ID NO: 222654 - DNA, 25 bp, SARS Virus
gtaactatagtcgtttgttctcatt

SEQ ID NO: 222655 - DNA, 25 bp, SARS Virus
taactatagtcggttgttctcattg

SEQ ID NO: 222656 - DNA, 25 bp, SARS Virus
aactatagtcgtgtgttctcattga

SEQ ID NO: 222657 - DNA, 25 bp, SARS Virus
actatagtcgttggttctcattgaa

SEQ ID NO: 222658 - DNA, 25 bp, SARS Virus
ctatagtcgtttgttctcattgaat

SEQ ID NO: 222659 - DNA, 25 bp, SARS Virus
tatagtcgtttggtctcattgaata

SEQ ID NO: 222660 - DNA, 25 bp, SARS Virus
atagtcgtttgtgctcattgaataa

SEQ ID NO: 222661 - DNA, 25 bp, SARS Virus
tagtcgtttgttgtcattgaataac

SEQ ID NO: 222662 - DNA, 25 bp, SARS Virus
agtcgtttgttcgcattgaataacc

SEQ ID NO: 222663 - DNA, 25 bp, SARS Virus
gtcgtttgttctgattgaataacca

SEQ ID NO: 222664 - DNA, 25 bp, SARS Virus
tcgtttgttctcgttgaataaccat

SEQ ID NO: 222665 - DNA, 25 bp, SARS Virus
cgtttgttctcagtgaataaccatt

SEQ ID NO: 222666 - DNA, 25 bp, SARS Virus
gtttgttctcatggaataaccattc

SEQ ID NO: 222667 - DNA, 25 bp, SARS Virus
tttgttctcattgaataaccattct

SEQ ID NO: 222668 - DNA, 25 bp, SARS Virus
ttgttctcattggataaccattctt

SEQ ID NO: 222669 - DNA, 25 bp, SARS Virus
tgttctcattgagtaaccattcttt

SEQ ID NO: 222670 - DNA, 25 bp, SARS Virus
gttctcattgaagaaccattctttg

SEQ ID NO: 222671 - DNA, 25 bp, SARS Virus
ttctcattgaatgaccattctttga

SEQ ID NO: 222672 - DNA, 25 bp, SARS Virus
tctcattgaatagccattctttgaa

SEQ ID NO: 222673 - DNA, 25 bp, SARS Virus
ctcattgaataagcattctttgaat

SEQ ID NO: 222674 - DNA, 25 bp, SARS Virus
tcattgaataacgattctttgaatc

SEQ ID NO: 222675 - DNA, 25 bp, SARS Virus
cattgaataaccgttctttgaatca

SEQ ID NO: 222676 - DNA, 25 bp, SARS Virus
attgaataaccagtctttgaatcaa

SEQ ID NO: 222677 - DNA, 25 bp, SARS Virus
ttgaataaccatgctttgaatcaaa

SEQ ID NO: 222678 - DNA, 25 bp, SARS Virus
tgaataaccattgtttgaatcaaag

SEQ ID NO: 222679 - DNA, 25 bp, SARS Virus
gaataaccattcgttgaatcaaaga

SEQ ID NO: 222680 - DNA, 25 bp, SARS Virus
aataaccattctgtgaatcaaagaa

SEQ ID NO: 222681 - DNA, 25 bp, SARS Virus
ataaccattcttggaatcaaagaag

SEQ ID NO: 222682 - DNA, 25 bp, SARS Virus
taaccattctttgaatcaaagaagg

SEQ ID NO: 222683 - DNA, 25 bp, SARS Virus
aaccattctttggatcaaagaaggt

SEQ ID NO: 222684 - DNA, 25 bp, SARS Virus
accattctttgagtcaaagaaggtc

SEQ ID NO: 222685 - DNA, 25 bp, SARS Virus
ccattctttgaagcaaagaaggtca

SEQ ID NO: 222686 - DNA, 25 bp, SARS Virus
cattctttgaatgaaagaaggtcac

SEQ ID NO: 222687 - DNA, 25 bp, SARS Virus
attctttgaatcgaagaaggtcaca

SEQ ID NO: 222688 - DNA, 25 bp, SARS Virus
ttctttgaatcagagaaggtcacaa

SEQ ID NO: 222689 - DNA, 25 bp, SARS Virus
tctttgaatcaaggaaggtcacaac

SEQ ID NO: 222690 - DNA, 25 bp, SARS Virus
ctttgaatcaaagaaggtcacaaca

SEQ ID NO: 222691 - DNA, 25 bp, SARS Virus
tttgaatcaaaggaggtcacaacac

SEQ ID NO: 222692 - DNA, 25 bp, SARS Virus
ttgaatcaaagagggtcacaacacc

SEQ ID NO: 222693 - DNA, 25 bp, SARS Virus
tgaatcaaagaaggtcacaacacca

SEQ ID NO: 222694 - DNA, 25 bp, SARS Virus
gaatcaaagaaggtcacaacaccat

SEQ ID NO: 222695 - DNA, 25 bp, SARS Virus
aatcaaagaagggcacaacaccatt

SEQ ID NO: 222696 - DNA, 25 bp, SARS Virus
atcaaagaaggtgacaacaccattg

SEQ ID NO: 222697 - DNA, 25 bp, SARS Virus
tcaaagaaggtcgcaacaccattgg

SEQ ID NO: 222698 - DNA, 25 bp, SARS Virus
caaagaaggtcagaacaccattgga

SEQ ID NO: 222699 - DNA, 25 bp, SARS Virus
aaagaaggtcacgacaccattggag

SEQ ID NO: 222700 - DNA, 25 bp, SARS Virus
aagaaggtcacagcaccattggagt

SEQ ID NO: 222701 - DNA, 25 bp, SARS Virus
agaaggtcacaagaccattggagta

SEQ ID NO: 222702 - DNA, 25 bp, SARS Virus
gaaggtcacaacgccattggagtag

SEQ ID NO: 222703 - DNA, 25 bp, SARS Virus
aaggtcacaacagcattggagtagt

SEQ ID NO: 222704 - DNA, 25 bp, SARS Virus
aggtcacaacacgattggagtagtt

SEQ ID NO: 222705 - DNA, 25 bp, SARS Virus
ggtcacaacaccgttggagtagtta

SEQ ID NO: 222706 - DNA, 25 bp, SARS Virus
gtcacaacaccagtggagtagttac

SEQ ID NO: 222707 - DNA, 25 bp, SARS Virus
tcacaacaccatgggagtagttacg

SEQ ID NO: 222708 - DNA, 25 bp, SARS Virus
cacaacaccattggagtagttacgt

SEQ ID NO: 222709 - DNA, 25 bp, SARS Virus
acaacaccattggagtagttacgtc

SEQ ID NO: 222710 - DNA, 25 bp, SARS Virus
caacaccattggggtagttacgtcc

SEQ ID NO: 222711 - DNA, 25 bp, SARS Virus
aacaccattggagtagttacgtccg

SEQ ID NO: 222712 - DNA, 25 bp, SARS Virus
acaccattggaggagttacgtccgg

SEQ ID NO: 222713 - DNA, 25 bp, SARS Virus
caccattggagtggttacgtccgga

SEQ ID NO: 222714 - DNA, 25 bp, SARS Virus
accattggagtagttacgtccggaa

SEQ ID NO: 222715 - DNA, 25 bp, SARS Virus
ccattggagtaggtacgtccggaat

SEQ ID NO: 222716 - DNA, 25 bp, SARS Virus
cattggagtagtgacgtccggaatt

SEQ ID NO: 222717 - DNA, 25 bp, SARS Virus
attggagtagttgcgtccggaatta

SEQ ID NO: 222718 - DNA, 25 bp, SARS Virus
ttggagtagttaggtccggaattaa

SEQ ID NO: 222719 - DNA, 25 bp, SARS Virus
tggagtagttacgtccggaattaaa

SEQ ID NO: 222720 - DNA, 25 bp, SARS Virus
ggagtagttacggccggaattaaaa

SEQ ID NO: 222721 - DNA, 25 bp, SARS Virus
gagtagttacgtgcggaattaaaaa

SEQ ID NO: 222722 - DNA, 25 bp, SARS Virus
agtagttacgtcgggaattaaaaac

SEQ ID NO: 222723 - DNA, 25 bp, SARS Virus
gtagttacgtccggaattaaaaacc

SEQ ID NO: 222724 - DNA, 25 bp, SARS Virus
tagttacgtccggaattaaaaaccg

SEQ ID NO: 222725 - DNA, 25 bp, SARS Virus
agttacgtccgggattaaaaaccga

SEQ ID NO: 222726 - DNA, 25 bp, SARS Virus
gttacgtccggagttaaaaaccgaa

SEQ ID NO: 222727 - DNA, 25 bp, SARS Virus
ttacgtccggaagtaaaaaccgaag

SEQ ID NO: 222728 - DNA, 25 bp, SARS Virus
tacgtccggaatgaaaaaccgaagt

SEQ ID NO: 222729 - DNA, 25 bp, SARS Virus
acgtccggaattgaaaaccgaagtg

SEQ ID NO: 222730 - DNA, 25 bp, SARS Virus
cgtccggaattagaaaccgaagtgt

SEQ ID NO: 222731 - DNA, 25 bp, SARS Virus
gtccggaattaagaaccgaagtgta

SEQ ID NO: 222732 - DNA, 25 bp, SARS Virus
tccggaattaaagaccgaagtgtag

SEQ ID NO: 222733 - DNA, 25 bp, SARS Virus
ccggaattaaaagccgaagtgtagc

SEQ ID NO: 222734 - DNA, 25 bp, SARS Virus
cggaattaaaaagcgaagtgtagct

SEQ ID NO: 222735 - DNA, 25 bp, SARS Virus
ggaattaaaaacggaagtgtagctg

SEQ ID NO: 222736 - DNA, 25 bp, SARS Virus
gaattaaaaaccgaagtgtagctgt

SEQ ID NO: 222737 - DNA, 25 bp, SARS Virus
aattaaaaaccggagtgtagctgtc

SEQ ID NO: 222738 - DNA, 25 bp, SARS Virus
attaaaaaccgaggtgtagctgtcc

SEQ ID NO: 222739 - DNA, 25 bp, SARS Virus
ttaaaaaccgaagtgtagctgtccg

SEQ ID NO: 222740 - DNA, 25 bp, SARS Virus
taaaaaccgaagggtagctgtccga

SEQ ID NO: 222741 - DNA, 25 bp, SARS Virus
aaaaaccgaagtgtagctgtccgaa

SEQ ID NO: 222742 - DNA, 25 bp, SARS Virus
aaaaccgaagtggagctgtccgaag

SEQ ID NO: 222743 - DNA, 25 bp, SARS Virus
aaaccgaagtgtggctgtccgaaga

SEQ ID NO: 222744 - DNA, 25 bp, SARS Virus
aaccgaagtgtagctgtccgaagac

SEQ ID NO: 222745 - DNA, 25 bp, SARS Virus
accgaagtgtaggtgtccgaagaca

SEQ ID NO: 222746 - DNA, 25 bp, SARS Virus
ccgaagtgtagcggtccgaagacat

SEQ ID NO: 222747 - DNA, 25 bp, SARS Virus
cgaagtgtagctgtccgaagacatg

SEQ ID NO: 222748 - DNA, 25 bp, SARS Virus
gaagtgtagctggccgaagacatgc

SEQ ID NO: 222749 - DNA, 25 bp, SARS Virus
aagtgtagctgtgcgaagacatgct

SEQ ID NO: 222750 - DNA, 25 bp, SARS Virus
agtgtagctgtcggaagacatgctg

SEQ ID NO: 222751 - DNA, 25 bp, SARS Virus
gtgtagctgtccgaagacatgctgt

SEQ ID NO: 222752 - DNA, 25 bp, SARS Virus
tgtagctgtccggagacatgctgtc

SEQ ID NO: 222753 - DNA, 25 bp, SARS Virus
gtagctgtccgaggacatgctgtct

SEQ ID NO: 222754 - DNA, 25 bp, SARS Virus
tagctgtccgaagacatgctgtcta

SEQ ID NO: 222755 - DNA, 25 bp, SARS Virus
agctgtccgaaggcatgctgtctaa

SEQ ID NO: 222756 - DNA, 25 bp, SARS Virus
gctgtccgaagagatgctgtctaaa

SEQ ID NO: 222757 - DNA, 25 bp, SARS Virus
ctgtccgaagacgtgctgtctaaag

SEQ ID NO: 222758 - DNA, 25 bp, SARS Virus
tgtccgaagacaggctgtctaaaga

SEQ ID NO: 222759 - DNA, 25 bp, SARS Virus
gtccgaagacatgctgtctaaagag

SEQ ID NO: 222760 - DNA, 25 bp, SARS Virus
tccgaagacatggtgtctaaagagg

SEQ ID NO: 222761 - DNA, 25 bp, SARS Virus
ccgaagacatgcggtctaaagagga

SEQ ID NO: 222762 - DNA, 25 bp, SARS Virus
cgaagacatgctgtctaaagaggag

SEQ ID NO: 222763 - DNA, 25 bp, SARS Virus
gaagacatgctggctaaagaggagt

SEQ ID NO: 222764 - DNA, 25 bp, SARS Virus
aagacatgctgtgtaaagaggagtc

SEQ ID NO: 222765 - DNA, 25 bp, SARS Virus
agacatgctgtcgaaagaggagtca

SEQ ID NO: 222766 - DNA, 25 bp, SARS Virus
gacatgctgtctgaagaggagtcaa

SEQ ID NO: 222767 - DNA, 25 bp, SARS Virus
acatgctgtctagagaggagtcaaa

SEQ ID NO: 222768 - DNA, 25 bp, SARS Virus
catgctgtctaaggaggagtcaaaa

SEQ ID NO: 222769 - DNA, 25 bp, SARS Virus
atgctgtctaaagaggagtcaaaac

SEQ ID NO: 222770 - DNA, 25 bp, SARS Virus
tgctgtctaaaggggagtcaaaacc

SEQ ID NO: 222771 - DNA, 25 bp, SARS Virus
gctgtctaaagaggagtcaaaacct

SEQ ID NO: 222772 - DNA, 25 bp, SARS Virus
ctgtctaaagaggagtcaaaacctt

SEQ ID NO: 222773 - DNA, 25 bp, SARS Virus
tgtctaaagaggggtcaaaacctta

SEQ ID NO: 222774 - DNA, 25 bp, SARS Virus
gtctaaagaggagtcaaaaccttag

SEQ ID NO: 222775 - DNA, 25 bp, SARS Virus
tctaaagaggaggcaaaaccttaga

SEQ ID NO: 222776 - DNA, 25 bp, SARS Virus
ctaaagaggagtgaaaaccttagaa

SEQ ID NO: 222777 - DNA, 25 bp, SARS Virus
taaagaggagtcgaaaccttagaag

SEQ ID NO: 222778 - DNA, 25 bp, SARS Virus
aaagaggagtcagaaccttagaaga

SEQ ID NO: 222779 - DNA, 25 bp, SARS Virus
aagaggagtcaagaccttagaagac

SEQ ID NO: 222780 - DNA, 25 bp, SARS Virus
agaggagtcaaagccttagaagaca

SEQ ID NO: 222781 - DNA, 25 bp, SARS Virus
gaggagtcaaaagcttagaagacac

SEQ ID NO: 222782 - DNA, 25 bp, SARS Virus
aggagtcaaaacgttagaagacaca

SEQ ID NO: 222783 - DNA, 25 bp, SARS Virus
ggagtcaaaaccgtagaagacacaa

SEQ ID NO: 222784 - DNA, 25 bp, SARS Virus
gagtcaaaacctgagaagacacaaa

SEQ ID NO: 222785 - DNA, 25 bp, SARS Virus
agtcaaaaccttggaagacacaaac

SEQ ID NO: 222786 - DNA, 25 bp, SARS Virus
gtcaaaaccttagaagacacaaacc

SEQ ID NO: 222787 - DNA, 25 bp, SARS Virus
tcaaaaccttaggagacacaaacca

SEQ ID NO: 222788 - DNA, 25 bp, SARS Virus
caaaaccttagaggacacaaaccac

SEQ ID NO: 222789 - DNA, 25 bp, SARS Virus
aaaaccttagaagacacaaaccacc

SEQ ID NO: 222790 - DNA, 25 bp, SARS Virus
aaaccttagaaggcacaaaccaccg

SEQ ID NO: 222791 - DNA, 25 bp, SARS Virus
aaccttagaagagacaaaccaccga

SEQ ID NO: 222792 - DNA, 25 bp, SARS Virus
accttagaagacgcaaaccaccgag

SEQ ID NO: 222793 - DNA, 25 bp, SARS Virus
ccttagaagacagaaaccaccgagg

SEQ ID NO: 222794 - DNA, 25 bp, SARS Virus
cttagaagacacgaaccaccgagga

SEQ ID NO: 222795 - DNA, 25 bp, SARS Virus
ttagaagacacagaccaccgaggag

SEQ ID NO: 222796 - DNA, 25 bp, SARS Virus
tagaagacacaagccaccgaggaga

SEQ ID NO: 222797 - DNA, 25 bp, SARS Virus
agaagacacaaagcaccgaggagaa

SEQ ID NO: 222798 - DNA, 25 bp, SARS Virus
gaagacacaaacgaccgaggagaac

SEQ ID NO: 222799 - DNA, 25 bp, SARS Virus
aagacacaaaccgccgaggagaaca

SEQ ID NO: 222800 - DNA, 25 bp, SARS Virus
agacacaaaccagcgaggagaacaa

SEQ ID NO: 222801 - DNA, 25 bp, SARS Virus
gacacaaaccacggaggagaacaaa

SEQ ID NO: 222802 - DNA, 25 bp, SARS Virus
acacaaaccaccgaggagaacaaat

SEQ ID NO: 222803 - DNA, 25 bp, SARS Virus
cacaaaccaccggggagaacaaatc

SEQ ID NO: 222804 - DNA, 25 bp, SARS Virus
acaaaccaccgaggagaacaaatcc

SEQ ID NO: 222805 - DNA, 25 bp, SARS Virus
caaaccaccgaggagaacaaatcca

SEQ ID NO: 222806 - DNA, 25 bp, SARS Virus
aaaccaccgaggggaacaaatccac

SEQ ID NO: 222807 - DNA, 25 bp, SARS Virus
aaccaccgaggagaacaaatccacg

SEQ ID NO: 222808 - DNA, 25 bp, SARS Virus
accaccgaggaggacaaatccacga

SEQ ID NO: 222809 - DNA, 25 bp, SARS Virus
ccaccgaggagagcaaatccacgaa

SEQ ID NO: 222810 - DNA, 25 bp, SARS Virus
caccgaggagaagaaatccacgaag

SEQ ID NO: 222811 - DNA, 25 bp, SARS Virus
accgaggagaacgaatccacgaagg

SEQ ID NO: 222812 - DNA, 25 bp, SARS Virus
ccgaggagaacagatccacgaaggt

SEQ ID NO: 222813 - DNA, 25 bp, SARS Virus
cgaggagaacaagtccacgaaggtg

SEQ ID NO: 222814 - DNA, 25 bp, SARS Virus
gaggagaacaaagccacgaaggtga

SEQ ID NO: 222815 - DNA, 25 bp, SARS Virus
aggagaacaaatgcacgaaggtgag

SEQ ID NO: 222816 - DNA, 25 bp, SARS Virus
ggagaacaaatcgacgaaggtgaga

SEQ ID NO: 222817 - DNA, 25 bp, SARS Virus
gagaacaaatccgcgaaggtgagat

SEQ ID NO: 222818 - DNA, 25 bp, SARS Virus
agaacaaatccaggaaggtgagatc

SEQ ID NO: 222819 - DNA, 25 bp, SARS Virus
gaacaaatccacgaaggtgagatcc

SEQ ID NO: 222820 - DNA, 25 bp, SARS Virus
aacaaatccacggaggtgagatccg

SEQ ID NO: 222821 - DNA, 25 bp, SARS Virus
acaaatccacgagggtgagatccga

SEQ ID NO: 222822 - DNA, 25 bp, SARS Virus
caaatccacgaaggtgagatccgaa

SEQ ID NO: 222823 - DNA, 25 bp, SARS Virus
aaatccacgaaggtgagatccgaag

SEQ ID NO: 222824 - DNA, 25 bp, SARS Virus
aatccacgaaggggagatccgaagt

SEQ ID NO: 222825 - DNA, 25 bp, SARS Virus
atccacgaaggtgagatccgaagtc

SEQ ID NO: 222826 - DNA, 25 bp, SARS Virus
tccacgaaggtgggatccgaagtcc

SEQ ID NO: 222827 - DNA, 25 bp, SARS Virus
ccacgaaggtgagatccgaagtcca

SEQ ID NO: 222828 - DNA, 25 bp, SARS Virus
cacgaaggtgaggtccgaagtccaa

SEQ ID NO: 222829 - DNA, 25 bp, SARS Virus
acgaaggtgagagccgaagtccaat

SEQ ID NO: 222830 - DNA, 25 bp, SARS Virus
cgaaggtgagatgcgaagtccaata

SEQ ID NO: 222831 - DNA, 25 bp, SARS Virus
gaaggtgagatcggaagtccaatag

SEQ ID NO: 222832 - DNA, 25 bp, SARS Virus
aaggtgagatccgaagtccaatagt

SEQ ID NO: 222833 - DNA, 25 bp, SARS Virus
aggtgagatccggagtccaatagtt

SEQ ID NO: 222834 - DNA, 25 bp, SARS Virus
ggtgagatccgaggtccaatagttc

SEQ ID NO: 222835 - DNA, 25 bp, SARS Virus
gtgagatccgaagtccaatagttct

SEQ ID NO: 222836 - DNA, 25 bp, SARS Virus
tgagatccgaaggccaatagttcta

SEQ ID NO: 222837 - DNA, 25 bp, SARS Virus
gagatccgaagtgcaatagttctat

SEQ ID NO: 222838 - DNA, 25 bp, SARS Virus
agatccgaagtcgaatagttctatt

SEQ ID NO: 222839 - DNA, 25 bp, SARS Virus
gatccgaagtccgatagttctatta

SEQ ID NO: 222840 - DNA, 25 bp, SARS Virus
atccgaagtccagtagttctattag

SEQ ID NO: 222841 - DNA, 25 bp, SARS Virus
tccgaagtccaagagttctattagg

SEQ ID NO: 222842 - DNA, 25 bp, SARS Virus
ccgaagtccaatggttctattaggt

SEQ ID NO: 222843 - DNA, 25 bp, SARS Virus
cgaagtccaatagttctattaggta

SEQ ID NO: 222844 - DNA, 25 bp, SARS Virus
gaagtccaataggtctattaggtac

SEQ ID NO: 222845 - DNA, 25 bp, SARS Virus
aagtccaatagtgctattaggtact

SEQ ID NO: 222846 - DNA, 25 bp, SARS Virus
agtccaatagttgtattaggtactg

SEQ ID NO: 222847 - DNA, 25 bp, SARS Virus
gtccaatagttcgattaggtactgt

SEQ ID NO: 222848 - DNA, 25 bp, SARS Virus
tccaatagttctgttaggtactgtt

SEQ ID NO: 222849 - DNA, 25 bp, SARS Virus
ccaatagttctagtaggtactgttg

SEQ ID NO: 222850 - DNA, 25 bp, SARS Virus
caatagttctatgaggtactgttgg

SEQ ID NO: 222851 - DNA, 25 bp, SARS Virus
aatagttctattgggtactgttgga

SEQ ID NO: 222852 - DNA, 25 bp, SARS Virus
atagttctattaggtactgttggac

SEQ ID NO: 222853 - DNA, 25 bp, SARS Virus
tagttctattaggtactgttggacg

SEQ ID NO: 222854 - DNA, 25 bp, SARS Virus
agttctattagggactgttggacga

SEQ ID NO: 222855 - DNA, 25 bp, SARS Virus
gttctattaggtgctgttggacgag

SEQ ID NO: 222856 - DNA, 25 bp, SARS Virus
ttctattaggtagtgttggacgagt

SEQ ID NO: 222857 - DNA, 25 bp, SARS Virus
tctattaggtacggttggacgagta

SEQ ID NO: 222858 - DNA, 25 bp, SARS Virus
ctattaggtactgttggacgagtat

SEQ ID NO: 222859 - DNA, 25 bp, SARS Virus
tattaggtactggtggacgagtatt

SEQ ID NO: 222860 - DNA, 25 bp, SARS Virus
attaggtactgtgggacgagtattt

SEQ ID NO: 222861 - DNA, 25 bp, SARS Virus
ttaggtactgttggacgagtatttc

SEQ ID NO: 222862 - DNA, 25 bp, SARS Virus
taggtactgttggacgagtatttct

SEQ ID NO: 222863 - DNA, 25 bp, SARS Virus
aggtactgttgggcgagtatttctc

SEQ ID NO: 222864 - DNA, 25 bp, SARS Virus
ggtactgttggaggagtatttctcg

SEQ ID NO: 222865 - DNA, 25 bp, SARS Virus
gtactgttggacgagtatttctcga

SEQ ID NO: 222866 - DNA, 25 bp, SARS Virus
tactgttggacgggtatttctcgaa

SEQ ID NO: 222867 - DNA, 25 bp, SARS Virus
actgttggacgagtatttctcgaaa

SEQ ID NO: 222868 - DNA, 25 bp, SARS Virus
ctgttggacgaggatttctcgaaac

SEQ ID NO: 222869 - DNA, 25 bp, SARS Virus
tgttggacgagtgtttctcgaaaca

SEQ ID NO: 222870 - DNA, 25 bp, SARS Virus
gttggacgagtagttctcgaaacag

SEQ ID NO: 222871 - DNA, 25 bp, SARS Virus
ttggacgagtatgtctcgaaacagt

SEQ ID NO: 222872 - DNA, 25 bp, SARS Virus
tggacgagtattgctcgaaacagta

SEQ ID NO: 222873 - DNA, 25 bp, SARS Virus
ggacgagtatttgtcgaaacagtaa

SEQ ID NO: 222874 - DNA, 25 bp, SARS Virus
gacgagtatttcgcgaaacagtaac

SEQ ID NO: 222875 - DNA, 25 bp, SARS Virus
acgagtatttctggaaacagtaact

SEQ ID NO: 222876 - DNA, 25 bp, SARS Virus
cgagtatttctcgaaacagtaactg

SEQ ID NO: 222877 - DNA, 25 bp, SARS Virus
gagtatttctcggaacagtaactga

SEQ ID NO: 222878 - DNA, 25 bp, SARS Virus
agtatttctcgagacagtaactgac

SEQ ID NO: 222879 - DNA, 25 bp, SARS Virus
gtatttctcgaagcagtaactgacg

SEQ ID NO: 222880 - DNA, 25 bp, SARS Virus
tatttctcgaaagagtaactgacgt

SEQ ID NO: 222881 - DNA, 25 bp, SARS Virus
atttctcgaaacggtaactgacgtt

SEQ ID NO: 222882 - DNA, 25 bp, SARS Virus
tttctcgaaacagtaactgacgtta

SEQ ID NO: 222883 - DNA, 25 bp, SARS Virus
ttctcgaaacaggaactgacgttat

SEQ ID NO: 222884 - DNA, 25 bp, SARS Virus
tctcgaaacagtgactgacgttata

SEQ ID NO: 222885 - DNA, 25 bp, SARS Virus
ctcgaaacagtagctgacgttatat

SEQ ID NO: 222886 - DNA, 25 bp, SARS Virus
tcgaaacagtaagtgacgttatatt

SEQ ID NO: 222887 - DNA, 25 bp, SARS Virus
cgaaacagtaacggacgttatattt

SEQ ID NO: 222888 - DNA, 25 bp, SARS Virus
gaaacagtaactgacgttatatttg

SEQ ID NO: 222889 - DNA, 25 bp, SARS Virus
aaacagtaactggcgttatatttgg

SEQ ID NO: 222890 - DNA, 25 bp, SARS Virus
aacagtaactgaggttatatttgga

SEQ ID NO: 222891 - DNA, 25 bp, SARS Virus
acagtaactgacgttatatttggac

SEQ ID NO: 222892 - DNA, 25 bp, SARS Virus
cagtaactgacggtatatttggaca

SEQ ID NO: 222893 - DNA, 25 bp, SARS Virus
agtaactgacgtgatatttggacac

SEQ ID NO: 222894 - DNA, 25 bp, SARS Virus
gtaactgacgttgtatttggacaca

SEQ ID NO: 222895 - DNA, 25 bp, SARS Virus
taactgacgttagatttggacacat

SEQ ID NO: 222896 - DNA, 25 bp, SARS Virus
aactgacgttatgtttggacacatg

SEQ ID NO: 222897 - DNA, 25 bp, SARS Virus
actgacgttatagttggacacatgc

SEQ ID NO: 222898 - DNA, 25 bp, SARS Virus
ctgacgttatatgtggacacatgct

SEQ ID NO: 222899 - DNA, 25 bp, SARS Virus
tgacgttatattgggacacatgctt

SEQ ID NO: 222900 - DNA, 25 bp, SARS Virus
gacgttatatttggacacatgcttg

SEQ ID NO: 222901 - DNA, 25 bp, SARS Virus
acgttatatttggacacatgcttgg

SEQ ID NO: 222902 - DNA, 25 bp, SARS Virus
cgttatatttgggcacatgcttggc

SEQ ID NO: 222903 - DNA, 25 bp, SARS Virus
gttatatttggagacatgcttggca

SEQ ID NO: 222904 - DNA, 25 bp, SARS Virus
ttatatttggacgcatgcttggcag

SEQ ID NO: 222905 - DNA, 25 bp, SARS Virus
tatatttggacagatgcttggcaga

SEQ ID NO: 222906 - DNA, 25 bp, SARS Virus
atatttggacacgtgcttggcagac

SEQ ID NO: 222907 - DNA, 25 bp, SARS Virus
tatttggacacaggcttggcagacg

SEQ ID NO: 222908 - DNA, 25 bp, SARS Virus
atttggacacatgcttggcagacgt

SEQ ID NO: 222909 - DNA, 25 bp, SARS Virus
tttggacacatggttggcagacgtg

SEQ ID NO: 222910 - DNA, 25 bp, SARS Virus
ttggacacatgcgtggcagacgtgc

SEQ ID NO: 222911 - DNA, 25 bp, SARS Virus
tggacacatgctgggcagacgtgcg

SEQ ID NO: 222912 - DNA, 25 bp, SARS Virus
ggacacatgcttggcagacgtgcgt

SEQ ID NO: 222913 - DNA, 25 bp, SARS Virus
gacacatgcttggcagacgtgcgtg

SEQ ID NO: 222914 - DNA, 25 bp, SARS Virus
acacatgcttgggagacgtgcgtgt

SEQ ID NO: 222915 - DNA, 25 bp, SARS Virus
cacatgcttggcggacgtgcgtgtg

SEQ ID NO: 222916 - DNA, 25 bp, SARS Virus
acatgcttggcagacgtgcgtgtga

SEQ ID NO: 222917 - DNA, 25 bp, SARS Virus
catgcttggcaggcgtgcgtgtgaa

SEQ ID NO: 222918 - DNA, 25 bp, SARS Virus
atgcttggcagaggtgcgtgtgaac

SEQ ID NO: 222919 - DNA, 25 bp, SARS Virus
tgcttggcagacgtgcgtgtgaaca

SEQ ID NO: 222920 - DNA, 25 bp, SARS Virus
gcttggcagacgggcgtgtgaacat

SEQ ID NO: 222921 - DNA, 25 bp, SARS Virus
cttggcagacgtgcgtgtgaacatt

SEQ ID NO: 222922 - DNA, 25 bp, SARS Virus
ttggcagacgtgggtgtgaacattt

SEQ ID NO: 222923 - DNA, 25 bp, SARS Virus
tggcagacgtgcgtgtgaacatttc

SEQ ID NO: 222924 - DNA, 25 bp, SARS Virus
ggcagacgtgcgggtgaacatttct

SEQ ID NO: 222925 - DNA, 25 bp, SARS Virus
gcagacgtgcgtgtgaacatttctg

SEQ ID NO: 222926 - DNA, 25 bp, SARS Virus
cagacgtgcgtgggaacatttctga

SEQ ID NO: 222927 - DNA, 25 bp, SARS Virus
agacgtgcgtgtgaacatttctgac

SEQ ID NO: 222928 - DNA, 25 bp, SARS Virus
gacgtgcgtgtggacatttctgact

SEQ ID NO: 222929 - DNA, 25 bp, SARS Virus
acgtgcgtgtgagcatttctgactt

SEQ ID NO: 222930 - DNA, 25 bp, SARS Virus
cgtgcgtgtgaagatttctgacttc

SEQ ID NO: 222931 - DNA, 25 bp, SARS Virus
gtgcgtgtgaacgtttctgacttca

SEQ ID NO: 222932 - DNA, 25 bp, SARS Virus
tgcgtgtgaacagttctgacttcac

SEQ ID NO: 222933 - DNA, 25 bp, SARS Virus
gcgtgtgaacatgtctgacttcacc

SEQ ID NO: 222934 - DNA, 25 bp, SARS Virus
cgtgtgaacattgctgacttcacca

SEQ ID NO: 222935 - DNA, 25 bp, SARS Virus
gtgtgaacatttgtgacttcaccaa

SEQ ID NO: 222936 - DNA, 25 bp, SARS Virus
tgtgaacatttcggacttcaccaaa

SEQ ID NO: 222937 - DNA, 25 bp, SARS Virus
gtgaacatttctgacttcaccaaat

SEQ ID NO: 222938 - DNA, 25 bp, SARS Virus
tgaacatttctggcttcaccaaatc

SEQ ID NO: 222939 - DNA, 25 bp, SARS Virus
gaacatttctgagttcaccaaatcg

SEQ ID NO: 222940 - DNA, 25 bp, SARS Virus
aacatttctgacgtcaccaaatcgt

SEQ ID NO: 222941 - DNA, 25 bp, SARS Virus
acatttctgactgcaccaaatcgtg

SEQ ID NO: 222942 - DNA, 25 bp, SARS Virus
catttctgacttgaccaaatcgtgg

SEQ ID NO: 222943 - DNA, 25 bp, SARS Virus
atttctgacttcgccaaatcgtggt

SEQ ID NO: 222944 - DNA, 25 bp, SARS Virus
tttctgacttcagcaaatcgtggtt

SEQ ID NO: 222945 - DNA, 25 bp, SARS Virus
ttctgacttcacgaaatcgtggttt

SEQ ID NO: 222946 - DNA, 25 bp, SARS Virus
tctgacttcaccgaatcgtggttta

SEQ ID NO: 222947 - DNA, 25 bp, SARS Virus
ctgacttcaccagatcgtggtttat

SEQ ID NO: 222948 - DNA, 25 bp, SARS Virus
tgacttcaccaagtcgtggtttata

SEQ ID NO: 222949 - DNA, 25 bp, SARS Virus
gacttcaccaaagcgtggtttatac

SEQ ID NO: 222950 - DNA, 25 bp, SARS Virus
acttcaccaaatggtggtttatacg

SEQ ID NO: 222951 - DNA, 25 bp, SARS Virus
cttcaccaaatcgtggtttatacgg

SEQ ID NO: 222952 - DNA, 25 bp, SARS Virus
ttcaccaaatcggggtttatacgga

SEQ ID NO: 222953 - DNA, 25 bp, SARS Virus
tcaccaaatcgtggtttatacggac

SEQ ID NO: 222954 - DNA, 25 bp, SARS Virus
caccaaatcgtggtttatacggacg

SEQ ID NO: 222955 - DNA, 25 bp, SARS Virus
accaaatcgtgggttatacggacga

SEQ ID NO: 222956 - DNA, 25 bp, SARS Virus
ccaaatcgtggtgtatacggacgac

SEQ ID NO: 222957 - DNA, 25 bp, SARS Virus
caaatcgtggttgatacggacgact

SEQ ID NO: 222958 - DNA, 25 bp, SARS Virus
aaatcgtggtttgtacggacgactg

SEQ ID NO: 222959 - DNA, 25 bp, SARS Virus
aatcgtggtttagacggacgactgt

SEQ ID NO: 222960 - DNA, 25 bp, SARS Virus
atcgtggtttatgcggacgactgtt

SEQ ID NO: 222961 - DNA, 25 bp, SARS Virus
tcgtggtttatagggacgactgttg

SEQ ID NO: 222962 - DNA, 25 bp, SARS Virus
cgtggtttatacggacgactgttgt

SEQ ID NO: 222963 - DNA, 25 bp, SARS Virus
gtggtttatacggacgactgttgtt

SEQ ID NO: 222964 - DNA, 25 bp, SARS Virus
tggtttatacgggcgactgttgtta

SEQ ID NO: 222965 - DNA, 25 bp, SARS Virus
ggtttatacggaggactgttgttac

SEQ ID NO: 222966 - DNA, 25 bp, SARS Virus
gtttatacggacgactgttgttacc

SEQ ID NO: 222967 - DNA, 25 bp, SARS Virus
tttatacggacggctgttgttacca

SEQ ID NO: 222968 - DNA, 25 bp, SARS Virus
ttatacggacgagtgttgttaccac

SEQ ID NO: 222969 - DNA, 25 bp, SARS Virus
tatacggacgacggttgttaccacg

SEQ ID NO: 222970 - DNA, 25 bp, SARS Virus
atacggacgactgttgttaccacgt

SEQ ID NO: 222971 - DNA, 25 bp, SARS Virus
tacggacgactggtgttaccacgtt

SEQ ID NO: 222972 - DNA, 25 bp, SARS Virus
acggacgactgtggttaccacgttc

SEQ ID NO: 222973 - DNA, 25 bp, SARS Virus
cggacgactgttgttaccacgttca

SEQ ID NO: 222974 - DNA, 25 bp, SARS Virus
ggacgactgttggtaccacgttcat

SEQ ID NO: 222975 - DNA, 25 bp, SARS Virus
gacgactgttgtgaccacgttcatt

SEQ ID NO: 222976 - DNA, 25 bp, SARS Virus
acgactgttgttgccacgttcattc

SEQ ID NO: 222977 - DNA, 25 bp, SARS Virus
cgactgttgttagcacgttcattct

SEQ ID NO: 222978 - DNA, 25 bp, SARS Virus
gactgttgttacgacgttcattcta

SEQ ID NO: 222979 - DNA, 25 bp, SARS Virus
actgttgttaccgcgttcattctac

SEQ ID NO: 222980 - DNA, 25 bp, SARS Virus
ctgttgttaccaggttcattctaca

SEQ ID NO: 222981 - DNA, 25 bp, SARS Virus
tgttgttaccacgttcattctacag

SEQ ID NO: 222982 - DNA, 25 bp, SARS Virus
gttgttaccacggtcattctacagg

SEQ ID NO: 222983 - DNA, 25 bp, SARS Virus
ttgttaccacgtgcattctacagga

SEQ ID NO: 222984 - DNA, 25 bp, SARS Virus
tgttaccacgttgattctacaggac

SEQ ID NO: 222985 - DNA, 25 bp, SARS Virus
gttaccacgttcgttctacaggaca

SEQ ID NO: 222986 - DNA, 25 bp, SARS Virus
ttaccacgttcagtctacaggacac

SEQ ID NO: 222987 - DNA, 25 bp, SARS Virus
taccacgttcatgctacaggacact

SEQ ID NO: 222988 - DNA, 25 bp, SARS Virus
accacgttcattgtacaggacactt

SEQ ID NO: 222989 - DNA, 25 bp, SARS Virus
ccacgttcattcgacaggacactta

SEQ ID NO: 222990 - DNA, 25 bp, SARS Virus
cacgttcattctgcaggacacttaa

SEQ ID NO: 222991 - DNA, 25 bp, SARS Virus
acgttcattctagaggacacttaac

SEQ ID NO: 222992 - DNA, 25 bp, SARS Virus
cgttcattctacgggacacttaact

SEQ ID NO: 222993 - DNA, 25 bp, SARS Virus
gttcattctacaggacacttaactt

SEQ ID NO: 222994 - DNA, 25 bp, SARS Virus
ttcattctacaggacacttaacttt

SEQ ID NO: 222995 - DNA, 25 bp, SARS Virus
tcattctacagggcacttaacttta

SEQ ID NO: 222996 - DNA, 25 bp, SARS Virus
cattctacaggagacttaactttaa

SEQ ID NO: 222997 - DNA, 25 bp, SARS Virus
attctacaggacgcttaactttaaa

SEQ ID NO: 222998 - DNA, 25 bp, SARS Virus
ttctacaggacagttaactttaaaa

SEQ ID NO: 222999 - DNA, 25 bp, SARS Virus
tctacaggacacgtaactttaaaag

SEQ ID NO: 223000 - DNA, 25 bp, SARS Virus
ctacaggacactgaactttaaaagt

SEQ ID NO: 223001 - DNA, 25 bp, SARS Virus
tacaggacacttgactttaaaagta

SEQ ID NO: 223002 - DNA, 25 bp, SARS Virus
acaggacacttagctttaaaagtat

SEQ ID NO: 223003 - DNA, 25 bp, SARS Virus
caggacacttaagtttaaaagtata

SEQ ID NO: 223004 - DNA, 25 bp, SARS Virus
aggacacttaacgttaaaagtatac

SEQ ID NO: 223005 - DNA, 25 bp, SARS Virus
ggacacttaactgtaaaagtatacg

SEQ ID NO: 223006 - DNA, 25 bp, SARS Virus
gacacttaacttgaaaagtatacga

SEQ ID NO: 223007 - DNA, 25 bp, SARS Virus
acacttaactttgaaagtatacgac

SEQ ID NO: 223008 - DNA, 25 bp, SARS Virus
cacttaactttagaagtatacgacg

SEQ ID NO: 223009 - DNA, 25 bp, SARS Virus
acttaactttaagagtatacgacgg

SEQ ID NO: 223010 - DNA, 25 bp, SARS Virus
cttaactttaaaggtatacgacgga

SEQ ID NO: 223011 - DNA, 25 bp, SARS Virus
ttaactttaaaagtatacgacggaa

SEQ ID NO: 223012 - DNA, 25 bp, SARS Virus
taactttaaaaggatacgacggaat

SEQ ID NO: 223013 - DNA, 25 bp, SARS Virus
aactttaaaagtgtacgacggaatt

SEQ ID NO: 223014 - DNA, 25 bp, SARS Virus
actttaaaagtagacgacggaattc

SEQ ID NO: 223015 - DNA, 25 bp, SARS Virus
ctttaaaagtatgcgacggaattct

SEQ ID NO: 223016 - DNA, 25 bp, SARS Virus
tttaaaagtataggacggaattctt

SEQ ID NO: 223017 - DNA, 25 bp, SARS Virus
ttaaaagtatacgacggaattcttc

SEQ ID NO: 223018 - DNA, 25 bp, SARS Virus
taaaagtatacggcggaattcttcg

SEQ ID NO: 223019 - DNA, 25 bp, SARS Virus
aaaagtatacgagggaattcttcga

SEQ ID NO: 223020 - DNA, 25 bp, SARS Virus
aaagtatacgacggaattcttcgac

SEQ ID NO: 223021 - DNA, 25 bp, SARS Virus
aagtatacgacggaattcttcgacc

SEQ ID NO: 223022 - DNA, 25 bp, SARS Virus
agtatacgacgggattcttcgacct

SEQ ID NO: 223023 - DNA, 25 bp, SARS Virus
gtatacgacggagttcttcgaccta

SEQ ID NO: 223024 - DNA, 25 bp, SARS Virus
tatacgacggaagtcttcgacctac

SEQ ID NO: 223025 - DNA, 25 bp, SARS Virus
atacgacggaatgcttcgacctaca

SEQ ID NO: 223026 - DNA, 25 bp, SARS Virus
tacgacggaattgttcgacctacag

SEQ ID NO: 223027 - DNA, 25 bp, SARS Virus
acgacggaattcgtcgacctacagg

SEQ ID NO: 223028 - DNA, 25 bp, SARS Virus
cgacggaattctgcgacctacagga

SEQ ID NO: 223029 - DNA, 25 bp, SARS Virus
gacggaattcttggacctacaggag

SEQ ID NO: 223030 - DNA, 25 bp, SARS Virus
acggaattcttcgacctacaggagt

SEQ ID NO: 223031 - DNA, 25 bp, SARS Virus
cggaattcttcggcctacaggagtg

SEQ ID NO: 223032 - DNA, 25 bp, SARS Virus
ggaattcttcgagctacaggagtgg

SEQ ID NO: 223033 - DNA, 25 bp, SARS Virus
gaattcttcgacgtacaggagtgga

SEQ ID NO: 223034 - DNA, 25 bp, SARS Virus
aattcttcgaccgacaggagtggac

SEQ ID NO: 223035 - DNA, 25 bp, SARS Virus
attcttcgacctgcaggagtggacg

SEQ ID NO: 223036 - DNA, 25 bp, SARS Virus
ttcttcgacctagaggagtggacgt

SEQ ID NO: 223037 - DNA, 25 bp, SARS Virus
tcttcgacctacgggagtggacgta

SEQ ID NO: 223038 - DNA, 25 bp, SARS Virus
cttcgacctacaggagtggacgtaa

SEQ ID NO: 223039 - DNA, 25 bp, SARS Virus
ttcgacctacaggagtggacgtaaa

SEQ ID NO: 223040 - DNA, 25 bp, SARS Virus
tcgacctacaggggtggacgtaaat

SEQ ID NO: 223041 - DNA, 25 bp, SARS Virus
cgacctacaggagtggacgtaaatc

SEQ ID NO: 223042 - DNA, 25 bp, SARS Virus
gacctacaggaggggacgtaaatcc

SEQ ID NO: 223043 - DNA, 25 bp, SARS Virus
acctacaggagtggacgtaaatcca

SEQ ID NO: 223044 - DNA, 25 bp, SARS Virus
cctacaggagtggacgtaaatccaa

SEQ ID NO: 223045 - DNA, 25 bp, SARS Virus
ctacaggagtgggcgtaaatccaat

SEQ ID NO: 223046 - DNA, 25 bp, SARS Virus
tacaggagtggaggtaaatccaatc

SEQ ID NO: 223047 - DNA, 25 bp, SARS Virus
acaggagtggacgtaaatccaatcc

SEQ ID NO: 223048 - DNA, 25 bp, SARS Virus
caggagtggacggaaatccaatcca

SEQ ID NO: 223049 - DNA, 25 bp, SARS Virus
actattgtagtgtatggtacattcc

SEQ ID NO: 223050 - DNA, 25 bp, SARS Virus
ctattgtagtggttggtacattcca

SEQ ID NO: 223051 - DNA, 25 bp, SARS Virus
tattgtagtggatggtacattccac

SEQ ID NO: 223052 - DNA, 25 bp, SARS Virus
attgtagtggattgtacattccacg

SEQ ID NO: 223053 - DNA, 25 bp, SARS Virus
ttgtagtggatgttacattccacgt

SEQ ID NO: 223054 - DNA, 25 bp, SARS Virus
tgtagtggatggtacattccacgta

SEQ ID NO: 223055 - DNA, 25 bp, SARS Virus
gtagtggatggttcattccacgtag

SEQ ID NO: 223056 - DNA, 25 bp, SARS Virus
tagtggatggtatattccacgtagg

SEQ ID NO: 223057 - DNA, 25 bp, SARS Virus
agtggatggtactttccacgtagga

SEQ ID NO: 223058 - DNA, 25 bp, SARS Virus
gtggatggtacattccacgtaggaa

SEQ ID NO: 223059 - DNA, 25 bp, SARS Virus
tggatggtacattccacgtaggaag

SEQ ID NO: 223060 - DNA, 25 bp, SARS Virus
ggatggtacatttcacgtaggaaga

SEQ ID NO: 223061 - DNA, 25 bp, SARS Virus
gatggtacattctacgtaggaagag

SEQ ID NO: 223062 - DNA, 25 bp, SARS Virus
atggtacattcctcgtaggaagagt

SEQ ID NO: 223063 - DNA, 25 bp, SARS Virus
tggtacattccatgtaggaagagtt

SEQ ID NO: 223064 - DNA, 25 bp, SARS Virus
ggtacattccacttaggaagagttc

SEQ ID NO: 223065 - DNA, 25 bp, SARS Virus
gtacattccacgtaggaagagttcc

SEQ ID NO: 223066 - DNA, 25 bp, SARS Virus
tacattccacgttggaagagttcct

SEQ ID NO: 223067 - DNA, 25 bp, SARS Virus
acattccacgtatgaagagttcctt

SEQ ID NO: 223068 - DNA, 25 bp, SARS Virus
cattccacgtagtaagagttccttt

SEQ ID NO: 223069 - DNA, 25 bp, SARS Virus
attccacgtaggtagagttcctttc

SEQ ID NO: 223070 - DNA, 25 bp, SARS Virus
ttccacgtaggatgagttcctttct

SEQ ID NO: 223071 - DNA, 25 bp, SARS Virus
tccacgtaggaatagttcctttctg

SEQ ID NO: 223072 - DNA, 25 bp, SARS Virus
ccacgtaggaagtgttcctttctgt

SEQ ID NO: 223073 - DNA, 25 bp, SARS Virus
cacgtaggaagatttcctttctgta

SEQ ID NO: 223074 - DNA, 25 bp, SARS Virus
acgtaggaagagttcctttctgtat

SEQ ID NO: 223075 - DNA, 25 bp, SARS Virus
cgtaggaagagttcctttctgtata

SEQ ID NO: 223076 - DNA, 25 bp, SARS Virus
gtaggaagagtttctttctgtatag

SEQ ID NO: 223077 - DNA, 25 bp, SARS Virus
taggaagagttcttttctgtataga

SEQ ID NO: 223078 - DNA, 25 bp, SARS Virus
aggaagagttcctttctgtatagaa

SEQ ID NO: 223079 - DNA, 25 bp, SARS Virus
ggaagagttcctttctgtatagaag

SEQ ID NO: 223080 - DNA, 25 bp, SARS Virus
gaagagttcctttctgtatagaagt

SEQ ID NO: 223081 - DNA, 25 bp, SARS Virus
aagagttcctttttgtatagaagtg

SEQ ID NO: 223082 - DNA, 25 bp, SARS Virus
agagttcctttctgtatagaagtgg

SEQ ID NO: 223083 - DNA, 25 bp, SARS Virus
gagttcctttctttatagaagtgga

SEQ ID NO: 223084 - DNA, 25 bp, SARS Virus
agttcctttctgtatagaagtggag

SEQ ID NO: 223085 - DNA, 25 bp, SARS Virus
gttcctttctgtttagaagtggaga

SEQ ID NO: 223086 - DNA, 25 bp, SARS Virus
ttcctttctgtatagaagtggagat

SEQ ID NO: 223087 - DNA, 25 bp, SARS Virus
tcctttctgtattgaagtggagatt

SEQ ID NO: 223088 - DNA, 25 bp, SARS Virus
cctttctgtatataagtggagattc

SEQ ID NO: 223089 - DNA, 25 bp, SARS Virus
ctttctgtatagtagtggagattcg

SEQ ID NO: 223090 - DNA, 25 bp, SARS Virus
tttctgtatagatgtggagattcgt

SEQ ID NO: 223091 - DNA, 25 bp, SARS Virus
ttctgtatagaattggagattcgta

SEQ ID NO: 223092 - DNA, 25 bp, SARS Virus
tctgtatagaagtggagattcgtac

SEQ ID NO: 223093 - DNA, 25 bp, SARS Virus
ctgtatagaagttgagattcgtaca

SEQ ID NO: 223094 - DNA, 25 bp, SARS Virus
tgtatagaagtgtagattcgtacaa

SEQ ID NO: 223095 - DNA, 25 bp, SARS Virus
gtatagaagtggtgattcgtacaag

SEQ ID NO: 223096 - DNA, 25 bp, SARS Virus
tatagaagtggatattcgtacaaga

SEQ ID NO: 223097 - DNA, 25 bp, SARS Virus
atagaagtggagtttcgtacaagac

SEQ ID NO: 223098 - DNA, 25 bp, SARS Virus
tagaagtggagattcgtacaagact

SEQ ID NO: 223099 - DNA, 25 bp, SARS Virus
agaagtggagattcgtacaagactc

SEQ ID NO: 223100 - DNA, 25 bp, SARS Virus
gaagtggagatttgtacaagactct

SEQ ID NO: 223101 - DNA, 25 bp, SARS Virus
aagtggagattcttacaagactctt

SEQ ID NO: 223102 - DNA, 25 bp, SARS Virus
agtggagattcgtacaagactctta

SEQ ID NO: 223103 - DNA, 25 bp, SARS Virus
gtggagattcgttcaagactcttag

SEQ ID NO: 223104 - DNA, 25 bp, SARS Virus
tggagattcgtataagactcttagt

SEQ ID NO: 223105 - DNA, 25 bp, SARS Virus
ggagattcgtactagactcttagta

SEQ ID NO: 223106 - DNA, 25 bp, SARS Virus
gagattcgtacatgactcttagtac

SEQ ID NO: 223107 - DNA, 25 bp, SARS Virus
agattcgtacaatactcttagtacc

SEQ ID NO: 223108 - DNA, 25 bp, SARS Virus
gattcgtacaagtctcttagtacca

SEQ ID NO: 223109 - DNA, 25 bp, SARS Virus
attcgtacaagattcttagtaccat

SEQ ID NO: 223110 - DNA, 25 bp, SARS Virus
ttcgtacaagactcttagtaccatt

SEQ ID NO: 223111 - DNA, 25 bp, SARS Virus
tcgtacaagacttttagtaccattt

SEQ ID NO: 223112 - DNA, 25 bp, SARS Virus
cgtacaagactcttagtaccatttc

SEQ ID NO: 223113 - DNA, 25 bp, SARS Virus
gtacaagactcttagtaccatttcg

SEQ ID NO: 223114 - DNA, 25 bp, SARS Virus
tacaagactctttgtaccatttcga

SEQ ID NO: 223115 - DNA, 25 bp, SARS Virus
acaagactcttattaccatttcgaa

SEQ ID NO: 223116 - DNA, 25 bp, SARS Virus
caagactcttagtaccatttcgaat

SEQ ID NO: 223117 - DNA, 25 bp, SARS Virus
aagactcttagttccatttcgaatg

SEQ ID NO: 223118 - DNA, 25 bp, SARS Virus
agactcttagtatcatttcgaatgg

SEQ ID NO: 223119 - DNA, 25 bp, SARS Virus
gactcttagtactatttcgaatggt

SEQ ID NO: 223120 - DNA, 25 bp, SARS Virus
actcttagtaccttttcgaatggta

SEQ ID NO: 223121 - DNA, 25 bp, SARS Virus
ctcttagtaccatttcgaatggtaa

SEQ ID NO: 223122 - DNA, 25 bp, SARS Virus
tcttagtaccatttcgaatggtaac

SEQ ID NO: 223123 - DNA, 25 bp, SARS Virus
cttagtaccatttcgaatggtaact

SEQ ID NO: 223124 - DNA, 25 bp, SARS Virus
ttagtaccattttgaatggtaacta

SEQ ID NO: 223125 - DNA, 25 bp, SARS Virus
tagtaccatttctaatggtaactat

SEQ ID NO: 223126 - DNA, 25 bp, SARS Virus
agtaccatttcgtatggtaactata

SEQ ID NO: 223127 - DNA, 25 bp, SARS Virus
gtaccatttcgattggtaactatag

SEQ ID NO: 223128 - DNA, 25 bp, SARS Virus
taccatttcgaatggtaactatagt

SEQ ID NO: 223129 - DNA, 25 bp, SARS Virus
accatttcgaattgtaactatagtc

SEQ ID NO: 223130 - DNA, 25 bp, SARS Virus
ccatttcgaatgttaactatagtcg

SEQ ID NO: 223131 - DNA, 25 bp, SARS Virus
catttcgaatggtaactatagtcgt

SEQ ID NO: 223132 - DNA, 25 bp, SARS Virus
atttcgaatggttactatagtcgtt

SEQ ID NO: 223133 - DNA, 25 bp, SARS Virus
tttcgaatggtatctatagtcgttt

SEQ ID NO: 223134 - DNA, 25 bp, SARS Virus
ttcgaatggtaattatagtcgtttg

SEQ ID NO: 223135 - DNA, 25 bp, SARS Virus
tcgaatggtaactatagtcgtttgt

SEQ ID NO: 223136 - DNA, 25 bp, SARS Virus
cgaatggtaactttagtcgtttgtt

SEQ ID NO: 223137 - DNA, 25 bp, SARS Virus
gaatggtaactatagtcgtttgttc

SEQ ID NO: 223138 - DNA, 25 bp, SARS Virus
aatggtaactattgtcgtttgttct

SEQ ID NO: 223139 - DNA, 25 bp, SARS Virus
atggtaactatattcgtttgttctc

SEQ ID NO: 223140 - DNA, 25 bp, SARS Virus
tggtaactatagtcgtttgttctca

SEQ ID NO: 223141 - DNA, 25 bp, SARS Virus
ggtaactatagttgtttgttctcat

SEQ ID NO: 223142 - DNA, 25 bp, SARS Virus
gtaactatagtcttttgttctcatt

SEQ ID NO: 223143 - DNA, 25 bp, SARS Virus
taactatagtcgtttgttctcattg

SEQ ID NO: 223144 - DNA, 25 bp, SARS Virus
aactatagtcgtttgttctcattga

SEQ ID NO: 223145 - DNA, 25 bp, SARS Virus
actatagtcgtttgttctcattgaa

SEQ ID NO: 223146 - DNA, 25 bp, SARS Virus
ctatagtcgttttttctcattgaat

SEQ ID NO: 223147 - DNA, 25 bp, SARS Virus
tatagtcgtttgttctcattgaata

SEQ ID NO: 223148 - DNA, 25 bp, SARS Virus
atagtcgtttgttctcattgaataa

SEQ ID NO: 223149 - DNA, 25 bp, SARS Virus
tagtcgtttgttttcattgaataac

SEQ ID NO: 223150 - DNA, 25 bp, SARS Virus
agtcgtttgttctcattgaataacc

SEQ ID NO: 223151 - DNA, 25 bp, SARS Virus
gtcgtttgttcttattgaataacca

SEQ ID NO: 223152 - DNA, 25 bp, SARS Virus
tcgtttgttctctttgaataaccat

SEQ ID NO: 223153 - DNA, 25 bp, SARS Virus
cgtttgttctcattgaataaccatt

SEQ ID NO: 223154 - DNA, 25 bp, SARS Virus
gtttgttctcattgaataaccattc

SEQ ID NO: 223155 - DNA, 25 bp, SARS Virus
tttgttctcatttaataaccattct

SEQ ID NO: 223156 - DNA, 25 bp, SARS Virus
ttgttctcattgtataaccattctt

SEQ ID NO: 223157 - DNA, 25 bp, SARS Virus
tgttctcattgattaaccattcttt

SEQ ID NO: 223158 - DNA, 25 bp, SARS Virus
gttctcattgaataaccattctttg

SEQ ID NO: 223159 - DNA, 25 bp, SARS Virus
ttctcattgaattaccattctttga

SEQ ID NO: 223160 - DNA, 25 bp, SARS Virus
tctcattgaatatccattctttgaa

SEQ ID NO: 223161 - DNA, 25 bp, SARS Virus
ctcattgaataatcattctttgaat

SEQ ID NO: 223162 - DNA, 25 bp, SARS Virus
tcattgaataactattctttgaatc

SEQ ID NO: 223163 - DNA, 25 bp, SARS Virus
cattgaataacctttctttgaatca

SEQ ID NO: 223164 - DNA, 25 bp, SARS Virus
attgaataaccattctttgaatcaa

SEQ ID NO: 223165 - DNA, 25 bp, SARS Virus
ttgaataaccattctttgaatcaaa

SEQ ID NO: 223166 - DNA, 25 bp, SARS Virus
tgaataaccattttttgaatcaaag

SEQ ID NO: 223167 - DNA, 25 bp, SARS Virus
gaataaccattctttgaatcaaaga

SEQ ID NO: 223168 - DNA, 25 bp, SARS Virus
aataaccattctttgaatcaaagaa

SEQ ID NO: 223169 - DNA, 25 bp, SARS Virus
ataaccattctttgaatcaaagaag

SEQ ID NO: 223170 - DNA, 25 bp, SARS Virus
taaccattcttttaatcaaagaagg

SEQ ID NO: 223171 - DNA, 25 bp, SARS Virus
aaccattctttgtatcaaagaaggt

SEQ ID NO: 223172 - DNA, 25 bp, SARS Virus
accattctttgattcaaagaaggtc

SEQ ID NO: 223173 - DNA, 25 bp, SARS Virus
ccattctttgaatcaaagaaggtca

SEQ ID NO: 223174 - DNA, 25 bp, SARS Virus
cattctttgaattaaagaaggtcac

SEQ ID NO: 223175 - DNA, 25 bp, SARS Virus
attctttgaatctaagaaggtcaca

SEQ ID NO: 223176 - DNA, 25 bp, SARS Virus
ttctttgaatcatagaaggtcacaa

SEQ ID NO: 223177 - DNA, 25 bp, SARS Virus
tctttgaatcaatgaaggtcacaac

SEQ ID NO: 223178 - DNA, 25 bp, SARS Virus
ctttgaatcaaataaggtcacaaca

SEQ ID NO: 223179 - DNA, 25 bp, SARS Virus
tttgaatcaaagtaggtcacaacac

SEQ ID NO: 223180 - DNA, 25 bp, SARS Virus
ttgaatcaaagatggtcacaacacc

SEQ ID NO: 223181 - DNA, 25 bp, SARS Virus
tgaatcaaagaatgtcacaacacca

SEQ ID NO: 223182 - DNA, 25 bp, SARS Virus
gaatcaaagaagttcacaacaccat

SEQ ID NO: 223183 - DNA, 25 bp, SARS Virus
aatcaaagaaggtcacaacaccatt

SEQ ID NO: 223184 - DNA, 25 bp, SARS Virus
atcaaagaaggttacaacaccattg

SEQ ID NO: 223185 - DNA, 25 bp, SARS Virus
tcaaagaaggtctcaacaccattgg

SEQ ID NO: 223186 - DNA, 25 bp, SARS Virus
caaagaaggtcataacaccattgga

SEQ ID NO: 223187 - DNA, 25 bp, SARS Virus
aaagaaggtcactacaccattggag

SEQ ID NO: 223188 - DNA, 25 bp, SARS Virus
aagaaggtcacatcaccattggagt

SEQ ID NO: 223189 - DNA, 25 bp, SARS Virus
agaaggtcacaataccattggagta

SEQ ID NO: 223190 - DNA, 25 bp, SARS Virus
gaaggtcacaactccattggagtag

SEQ ID NO: 223191 - DNA, 25 bp, SARS Virus
aaggtcacaacatcattggagtagt

SEQ ID NO: 223192 - DNA, 25 bp, SARS Virus
aggtcacaacactattggagtagtt

SEQ ID NO: 223193 - DNA, 25 bp, SARS Virus
ggtcacaacacctttggagtagtta

SEQ ID NO: 223194 - DNA, 25 bp, SARS Virus
gtcacaacaccattggagtagttac

SEQ ID NO: 223195 - DNA, 25 bp, SARS Virus
tcacaacaccattggagtagttacg

SEQ ID NO: 223196 - DNA, 25 bp, SARS Virus
cacaacaccatttgagtagttacgt

SEQ ID NO: 223197 - DNA, 25 bp, SARS Virus
acaacaccattgtagtagttacgtc

SEQ ID NO: 223198 - DNA, 25 bp, SARS Virus
caacaccattggtgtagttacgtcc

SEQ ID NO: 223199 - DNA, 25 bp, SARS Virus
aacaccattggattagttacgtccg

SEQ ID NO: 223200 - DNA, 25 bp, SARS Virus
acaccattggagtagttacgtccgg

SEQ ID NO: 223201 - DNA, 25 bp, SARS Virus
caccattggagttgttacgtccgga

SEQ ID NO: 223202 - DNA, 25 bp, SARS Virus
accattggagtatttacgtccggaa

SEQ ID NO: 223203 - DNA, 25 bp, SARS Virus
ccattggagtagttacgtccggaat

SEQ ID NO: 223204 - DNA, 25 bp, SARS Virus
cattggagtagttacgtccggaatt

SEQ ID NO: 223205 - DNA, 25 bp, SARS Virus
attggagtagtttcgtccggaatta

SEQ ID NO: 223206 - DNA, 25 bp, SARS Virus
ttggagtagttatgtccggaattaa

SEQ ID NO: 223207 - DNA, 25 bp, SARS Virus
tggagtagttacttccggaattaaa

SEQ ID NO: 223208 - DNA, 25 bp, SARS Virus
ggagtagttacgtccggaattaaaa

SEQ ID NO: 223209 - DNA, 25 bp, SARS Virus
gagtagttacgttcggaattaaaaa

SEQ ID NO: 223210 - DNA, 25 bp, SARS Virus
agtagttacgtctggaattaaaaac

SEQ ID NO: 223211 - DNA, 25 bp, SARS Virus
gtagttacgtcctgaattaaaaacc

SEQ ID NO: 223212 - DNA, 25 bp, SARS Virus
tagttacgtccgtaattaaaaaccg

SEQ ID NO: 223213 - DNA, 25 bp, SARS Virus
agttacgtccggtattaaaaaccga

SEQ ID NO: 223214 - DNA, 25 bp, SARS Virus
gttacgtccggatttaaaaaccgaa

SEQ ID NO: 223215 - DNA, 25 bp, SARS Virus
ttacgtccggaattaaaaaccgaag

SEQ ID NO: 223216 - DNA, 25 bp, SARS Virus
tacgtccggaattaaaaaccgaagt

SEQ ID NO: 223217 - DNA, 25 bp, SARS Virus
acgtccggaatttaaaaccgaagtg

SEQ ID NO: 223218 - DNA, 25 bp, SARS Virus
cgtccggaattataaaccgaagtgt

SEQ ID NO: 223219 - DNA, 25 bp, SARS Virus
gtccggaattaataaccgaagtgta

SEQ ID NO: 223220 - DNA, 25 bp, SARS Virus
tccggaattaaataccgaagtgtag

SEQ ID NO: 223221 - DNA, 25 bp, SARS Virus
ccggaattaaaatccgaagtgtagc

SEQ ID NO: 223222 - DNA, 25 bp, SARS Virus
cggaattaaaaatcgaagtgtagct

SEQ ID NO: 223223 - DNA, 25 bp, SARS Virus
ggaattaaaaactgaagtgtagctg

SEQ ID NO: 223224 - DNA, 25 bp, SARS Virus
gaattaaaaacctaagtgtagctgt

SEQ ID NO: 223225 - DNA, 25 bp, SARS Virus
aattaaaaaccgtagtgtagctgtc

SEQ ID NO: 223226 - DNA, 25 bp, SARS Virus
attaaaaaccgatgtgtagctgtcc

SEQ ID NO: 223227 - DNA, 25 bp, SARS Virus
ttaaaaaccgaattgtagctgtccg

SEQ ID NO: 223228 - DNA, 25 bp, SARS Virus
taaaaaccgaagtgtagctgtccga

SEQ ID NO: 223229 - DNA, 25 bp, SARS Virus
aaaaaccgaagtttagctgtccgaa

SEQ ID NO: 223230 - DNA, 25 bp, SARS Virus
aaaaccgaagtgtagctgtccgaag

SEQ ID NO: 223231 - DNA, 25 bp, SARS Virus
aaaccgaagtgttgctgtccgaaga

SEQ ID NO: 223232 - DNA, 25 bp, SARS Virus
aaccgaagtgtatctgtccgaagac

SEQ ID NO: 223233 - DNA, 25 bp, SARS Virus
accgaagtgtagttgtccgaagaca

SEQ ID NO: 223234 - DNA, 25 bp, SARS Virus
ccgaagtgtagctgtccgaagacat

SEQ ID NO: 223235 - DNA, 25 bp, SARS Virus
cgaagtgtagctttccgaagacatg

SEQ ID NO: 223236 - DNA, 25 bp, SARS Virus
gaagtgtagctgtccgaagacatgc

SEQ ID NO: 223237 - DNA, 25 bp, SARS Virus
aagtgtagctgttcgaagacatgct

SEQ ID NO: 223238 - DNA, 25 bp, SARS Virus
agtgtagctgtctgaagacatgctg

SEQ ID NO: 223239 - DNA, 25 bp, SARS Virus
gtgtagctgtcctaagacatgctgt

SEQ ID NO: 223240 - DNA, 25 bp, SARS Virus
tgtagctgtccgtagacatgctgtc

SEQ ID NO: 223241 - DNA, 25 bp, SARS Virus
gtagctgtccgatgacatgctgtct

SEQ ID NO: 223242 - DNA, 25 bp, SARS Virus
tagctgtccgaatacatgctgtcta

SEQ ID NO: 223243 - DNA, 25 bp, SARS Virus
agctgtccgaagtcatgctgtctaa

SEQ ID NO: 223244 - DNA, 25 bp, SARS Virus
gctgtccgaagatatgctgtctaaa

SEQ ID NO: 223245 - DNA, 25 bp, SARS Virus
ctgtccgaagacttgctgtctaaag

SEQ ID NO: 223246 - DNA, 25 bp, SARS Virus
tgtccgaagacatgctgtctaaaga

SEQ ID NO: 223247 - DNA, 25 bp, SARS Virus
gtccgaagacattctgtctaaagag

SEQ ID NO: 223248 - DNA, 25 bp, SARS Virus
tccgaagacatgttgtctaaagagg

SEQ ID NO: 223249 - DNA, 25 bp, SARS Virus
ccgaagacatgctgtctaaagagga

SEQ ID NO: 223250 - DNA, 25 bp, SARS Virus
cgaagacatgctttctaaagaggag

SEQ ID NO: 223251 - DNA, 25 bp, SARS Virus
gaagacatgctgtctaaagaggagt

SEQ ID NO: 223252 - DNA, 25 bp, SARS Virus
aagacatgctgtttaaagaggagtc

SEQ ID NO: 223253 - DNA, 25 bp, SARS Virus
agacatgctgtctaaagaggagtca

SEQ ID NO: 223254 - DNA, 25 bp, SARS Virus
gacatgctgtcttaagaggagtcaa

SEQ ID NO: 223255 - DNA, 25 bp, SARS Virus
acatgctgtctatagaggagtcaaa

SEQ ID NO: 223256 - DNA, 25 bp, SARS Virus
catgctgtctaatgaggagtcaaaa

SEQ ID NO: 223257 - DNA, 25 bp, SARS Virus
atgctgtctaaataggagtcaaaac

SEQ ID NO: 223258 - DNA, 25 bp, SARS Virus
tgctgtctaaagtggagtcaaaacc

SEQ ID NO: 223259 - DNA, 25 bp, SARS Virus
gctgtctaaagatgagtcaaaacct

SEQ ID NO: 223260 - DNA, 25 bp, SARS Virus
ctgtctaaagagtagtcaaaacctt

SEQ ID NO: 223261 - DNA, 25 bp, SARS Virus
tgtctaaagaggtgtcaaaacctta

SEQ ID NO: 223262 - DNA, 25 bp, SARS Virus
gtctaaagaggattcaaaaccttag

SEQ ID NO: 223263 - DNA, 25 bp, SARS Virus
tctaaagaggagtcaaaaccttaga

SEQ ID NO: 223264 - DNA, 25 bp, SARS Virus
ctaaagaggagttaaaaccttagaa

SEQ ID NO: 223265 - DNA, 25 bp, SARS Virus
taaagaggagtctaaaccttagaag

SEQ ID NO: 223266 - DNA, 25 bp, SARS Virus
aaagaggagtcataaccttagaaga

SEQ ID NO: 223267 - DNA, 25 bp, SARS Virus
aagaggagtcaataccttagaagac

SEQ ID NO: 223268 - DNA, 25 bp, SARS Virus
agaggagtcaaatccttagaagaca

SEQ ID NO: 223269 - DNA, 25 bp, SARS Virus
gaggagtcaaaatcttagaagacac

SEQ ID NO: 223270 - DNA, 25 bp, SARS Virus
aggagtcaaaactttagaagacaca

SEQ ID NO: 223271 - DNA, 25 bp, SARS Virus
ggagtcaaaaccttagaagacacaa

SEQ ID NO: 223272 - DNA, 25 bp, SARS Virus
gagtcaaaaccttagaagacacaaa

SEQ ID NO: 223273 - DNA, 25 bp, SARS Virus
agtcaaaacctttgaagacacaaac

SEQ ID NO: 223274 - DNA, 25 bp, SARS Virus
gtcaaaaccttataagacacaaacc

SEQ ID NO: 223275 - DNA, 25 bp, SARS Virus
tcaaaaccttagtagacacaaacca

SEQ ID NO: 223276 - DNA, 25 bp, SARS Virus
caaaaccttagatgacacaaaccac

SEQ ID NO: 223277 - DNA, 25 bp, SARS Virus
aaaaccttagaatacacaaaccacc

SEQ ID NO: 223278 - DNA, 25 bp, SARS Virus
aaaccttagaagtcacaaaccaccg

SEQ ID NO: 223279 - DNA, 25 bp, SARS Virus
aaccttagaagatacaaaccaccga

SEQ ID NO: 223280 - DNA, 25 bp, SARS Virus
accttagaagactcaaaccaccgag

SEQ ID NO: 223281 - DNA, 25 bp, SARS Virus
ccttagaagacataaaccaccgagg

SEQ ID NO: 223282 - DNA, 25 bp, SARS Virus
cttagaagacactaaccaccgagga

SEQ ID NO: 223283 - DNA, 25 bp, SARS Virus
ttagaagacacataccaccgaggag

SEQ ID NO: 223284 - DNA, 25 bp, SARS Virus
tagaagacacaatccaccgaggaga

SEQ ID NO: 223285 - DNA, 25 bp, SARS Virus
agaagacacaaatcaccgaggagaa

SEQ ID NO: 223286 - DNA, 25 bp, SARS Virus
gaagacacaaactaccgaggagaac

SEQ ID NO: 223287 - DNA, 25 bp, SARS Virus
aagacacaaacctccgaggagaaca

SEQ ID NO: 223288 - DNA, 25 bp, SARS Virus
agacacaaaccatcgaggagaacaa

SEQ ID NO: 223289 - DNA, 25 bp, SARS Virus
gacacaaaccactgaggagaacaaa

SEQ ID NO: 223290 - DNA, 25 bp, SARS Virus
acacaaaccacctaggagaacaaat

SEQ ID NO: 223291 - DNA, 25 bp, SARS Virus
cacaaaccaccgtggagaacaaatc

SEQ ID NO: 223292 - DNA, 25 bp, SARS Virus
acaaaccaccgatgagaacaaatcc

SEQ ID NO: 223293 - DNA, 25 bp, SARS Virus
caaaccaccgagtagaacaaatcca

SEQ ID NO: 223294 - DNA, 25 bp, SARS Virus
aaaccaccgaggtgaacaaatccac

SEQ ID NO: 223295 - DNA, 25 bp, SARS Virus
aaccaccgaggataacaaatccacg

SEQ ID NO: 223296 - DNA, 25 bp, SARS Virus
accaccgaggagtacaaatccacga

SEQ ID NO: 223297 - DNA, 25 bp, SARS Virus
ccaccgaggagatcaaatccacgaa

SEQ ID NO: 223298 - DNA, 25 bp, SARS Virus
caccgaggagaataaatccacgaag

SEQ ID NO: 223299 - DNA, 25 bp, SARS Virus
accgaggagaactaatccacgaagg

SEQ ID NO: 223300 - DNA, 25 bp, SARS Virus
ccgaggagaacatatccacgaaggt

SEQ ID NO: 223301 - DNA, 25 bp, SARS Virus
cgaggagaacaattccacgaaggtg

SEQ ID NO: 223302 - DNA, 25 bp, SARS Virus
gaggagaacaaatccacgaaggtga

SEQ ID NO: 223303 - DNA, 25 bp, SARS Virus
aggagaacaaattcacgaaggtgag

SEQ ID NO: 223304 - DNA, 25 bp, SARS Virus
ggagaacaaatctacgaaggtgaga

SEQ ID NO: 223305 - DNA, 25 bp, SARS Virus
gagaacaaatcctcgaaggtgagat

SEQ ID NO: 223306 - DNA, 25 bp, SARS Virus
agaacaaatccatgaaggtgagatc

SEQ ID NO: 223307 - DNA, 25 bp, SARS Virus
gaacaaatccactaaggtgagatcc

SEQ ID NO: 223308 - DNA, 25 bp, SARS Virus
aacaaatccacgtaggtgagatccg

SEQ ID NO: 223309 - DNA, 25 bp, SARS Virus
acaaatccacgatggtgagatccga

SEQ ID NO: 223310 - DNA, 25 bp, SARS Virus
caaatccacgaatgtgagatccgaa

SEQ ID NO: 223311 - DNA, 25 bp, SARS Virus
aaatccacgaagttgagatccgaag

SEQ ID NO: 223312 - DNA, 25 bp, SARS Virus
aatccacgaaggtgagatccgaagt

SEQ ID NO: 223313 - DNA, 25 bp, SARS Virus
atccacgaaggttagatccgaagtc

SEQ ID NO: 223314 - DNA, 25 bp, SARS Virus
tccacgaaggtgtgatccgaagtcc

SEQ ID NO: 223315 - DNA, 25 bp, SARS Virus
ccacgaaggtgatatccgaagtcca

SEQ ID NO: 223316 - DNA, 25 bp, SARS Virus
cacgaaggtgagttccgaagtccaa

SEQ ID NO: 223317 - DNA, 25 bp, SARS Virus
acgaaggtgagatccgaagtccaat

SEQ ID NO: 223318 - DNA, 25 bp, SARS Virus
cgaaggtgagattcgaagtccaata

SEQ ID NO: 223319 - DNA, 25 bp, SARS Virus
gaaggtgagatctgaagtccaatag

SEQ ID NO: 223320 - DNA, 25 bp, SARS Virus
aaggtgagatcctaagtccaatagt

SEQ ID NO: 223321 - DNA, 25 bp, SARS Virus
aggtgagatccgtagtccaatagtt

SEQ ID NO: 223322 - DNA, 25 bp, SARS Virus
ggtgagatccgatgtccaatagttc

SEQ ID NO: 223323 - DNA, 25 bp, SARS Virus
gtgagatccgaattccaatagttct

SEQ ID NO: 223324 - DNA, 25 bp, SARS Virus
tgagatccgaagtccaatagttcta

SEQ ID NO: 223325 - DNA, 25 bp, SARS Virus
gagatccgaagttcaatagttctat

SEQ ID NO: 223326 - DNA, 25 bp, SARS Virus
agatccgaagtctaatagttctatt

SEQ ID NO: 223327 - DNA, 25 bp, SARS Virus
gatccgaagtcctatagttctatta

SEQ ID NO: 223328 - DNA, 25 bp, SARS Virus
atccgaagtccattagttctattag

SEQ ID NO: 223329 - DNA, 25 bp, SARS Virus
tccgaagtccaatagttctattagg

SEQ ID NO: 223330 - DNA, 25 bp, SARS Virus
ccgaagtccaattgttctattaggt

SEQ ID NO: 223331 - DNA, 25 bp, SARS Virus
cgaagtccaatatttctattaggta

SEQ ID NO: 223332 - DNA, 25 bp, SARS Virus
gaagtccaatagttctattaggtac

SEQ ID NO: 223333 - DNA, 25 bp, SARS Virus
aagtccaatagttctattaggtact

SEQ ID NO: 223334 - DNA, 25 bp, SARS Virus
agtccaatagttttattaggtactg

SEQ ID NO: 223335 - DNA, 25 bp, SARS Virus
gtccaatagttctattaggtactgt

SEQ ID NO: 223336 - DNA, 25 bp, SARS Virus
tccaatagttcttttaggtactgtt

SEQ ID NO: 223337 - DNA, 25 bp, SARS Virus
ccaatagttctattaggtactgttg

SEQ ID NO: 223338 - DNA, 25 bp, SARS Virus
caatagttctattaggtactgttgg

SEQ ID NO: 223339 - DNA, 25 bp, SARS Virus
aatagttctatttggtactgttgga

SEQ ID NO: 223340 - DNA, 25 bp, SARS Virus
atagttctattatgtactgttggac

SEQ ID NO: 223341 - DNA, 25 bp, SARS Virus
tagttctattagttactgttggacg

SEQ ID NO: 223342 - DNA, 25 bp, SARS Virus
agttctattaggtactgttggacga

SEQ ID NO: 223343 - DNA, 25 bp, SARS Virus
gttctattaggttctgttggacgag

SEQ ID NO: 223344 - DNA, 25 bp, SARS Virus
ttctattaggtattgttggacgagt

SEQ ID NO: 223345 - DNA, 25 bp, SARS Virus
tctattaggtactgttggacgagta

SEQ ID NO: 223346 - DNA, 25 bp, SARS Virus
ctattaggtacttttggacgagtat

SEQ ID NO: 223347 - DNA, 25 bp, SARS Virus
tattaggtactgttggacgagtatt

SEQ ID NO: 223348 - DNA, 25 bp, SARS Virus
attaggtactgttggacgagtattt

SEQ ID NO: 223349 - DNA, 25 bp, SARS Virus
ttaggtactgtttgacgagtatttc

SEQ ID NO: 223350 - DNA, 25 bp, SARS Virus
taggtactgttgtacgagtatttct

SEQ ID NO: 223351 - DNA, 25 bp, SARS Virus
aggtactgttggtcgagtatttctc

SEQ ID NO: 223352 - DNA, 25 bp, SARS Virus
ggtactgttggatgagtatttctcg

SEQ ID NO: 223353 - DNA, 25 bp, SARS Virus
gtactgttggactagtatttctcga

SEQ ID NO: 223354 - DNA, 25 bp, SARS Virus
tactgttggacgtgtatttctcgaa

SEQ ID NO: 223355 - DNA, 25 bp, SARS Virus
actgttggacgattatttctcgaaa

SEQ ID NO: 223356 - DNA, 25 bp, SARS Virus
ctgttggacgagtatttctcgaaac

SEQ ID NO: 223357 - DNA, 25 bp, SARS Virus
tgttggacgagtttttctcgaaaca

SEQ ID NO: 223358 - DNA, 25 bp, SARS Virus
gttggacgagtatttctcgaaacag

SEQ ID NO: 223359 - DNA, 25 bp, SARS Virus
ttggacgagtatttctcgaaacagt

SEQ ID NO: 223360 - DNA, 25 bp, SARS Virus
tggacgagtatttctcgaaacagta

SEQ ID NO: 223361 - DNA, 25 bp, SARS Virus
ggacgagtatttttcgaaacagtaa

SEQ ID NO: 223362 - DNA, 25 bp, SARS Virus
gacgagtatttctcgaaacagtaac

SEQ ID NO: 223363 - DNA, 25 bp, SARS Virus
acgagtatttcttgaaacagtaact

SEQ ID NO: 223364 - DNA, 25 bp, SARS Virus
cgagtatttctctaaacagtaactg

SEQ ID NO: 223365 - DNA, 25 bp, SARS Virus
gagtatttctcgtaacagtaactga

SEQ ID NO: 223366 - DNA, 25 bp, SARS Virus
agtatttctcgatacagtaactgac

SEQ ID NO: 223367 - DNA, 25 bp, SARS Virus
gtatttctcgaatcagtaactgacg

SEQ ID NO: 223368 - DNA, 25 bp, SARS Virus
tatttctcgaaatagtaactgacgt

SEQ ID NO: 223369 - DNA, 25 bp, SARS Virus
atttctcgaaactgtaactgacgtt

SEQ ID NO: 223370 - DNA, 25 bp, SARS Virus
tttctcgaaacattaactgacgtta

SEQ ID NO: 223371 - DNA, 25 bp, SARS Virus
ttctcgaaacagtaactgacgttat

SEQ ID NO: 223372 - DNA, 25 bp, SARS Virus
tctcgaaacagttactgacgttata

SEQ ID NO: 223373 - DNA, 25 bp, SARS Virus
ctcgaaacagtatctgacgttatat

SEQ ID NO: 223374 - DNA, 25 bp, SARS Virus
tcgaaacagtaattgacgttatatt

SEQ ID NO: 223375 - DNA, 25 bp, SARS Virus
cgaaacagtaactgacgttatattt

SEQ ID NO: 223376 - DNA, 25 bp, SARS Virus
gaaacagtaacttacgttatatttg

SEQ ID NO: 223377 - DNA, 25 bp, SARS Virus
aaacagtaactgtcgttatatttgg

SEQ ID NO: 223378 - DNA, 25 bp, SARS Virus
aacagtaactgatgttatatttgga

SEQ ID NO: 223379 - DNA, 25 bp, SARS Virus
acagtaactgactttatatttggac

SEQ ID NO: 223380 - DNA, 25 bp, SARS Virus
cagtaactgacgttatatttggaca

SEQ ID NO: 223381 - DNA, 25 bp, SARS Virus
agtaactgacgttatatttggacac

SEQ ID NO: 223382 - DNA, 25 bp, SARS Virus
gtaactgacgttttatttggacaca

SEQ ID NO: 223383 - DNA, 25 bp, SARS Virus
taactgacgttatatttggacacat

SEQ ID NO: 223384 - DNA, 25 bp, SARS Virus
aactgacgttatttttggacacatg

SEQ ID NO: 223385 - DNA, 25 bp, SARS Virus
actgacgttatatttggacacatgc

SEQ ID NO: 223386 - DNA, 25 bp, SARS Virus
ctgacgttatatttggacacatgct

SEQ ID NO: 223387 - DNA, 25 bp, SARS Virus
tgacgttatatttggacacatgctt

SEQ ID NO: 223388 - DNA, 25 bp, SARS Virus
gacgttatattttgacacatgcttg

SEQ ID NO: 223389 - DNA, 25 bp, SARS Virus
acgttatatttgtacacatgcttgg

SEQ ID NO: 223390 - DNA, 25 bp, SARS Virus
cgttatatttggtcacatgcttggc

SEQ ID NO: 223391 - DNA, 25 bp, SARS Virus
gttatatttggatacatgcttggca

SEQ ID NO: 223392 - DNA, 25 bp, SARS Virus
ttatatttggactcatgcttggcag

SEQ ID NO: 223393 - DNA, 25 bp, SARS Virus
tatatttggacatatgcttggcaga

SEQ ID NO: 223394 - DNA, 25 bp, SARS Virus
atatttggacacttgcttggcagac

SEQ ID NO: 223395 - DNA, 25 bp, SARS Virus
tatttggacacatgcttggcagacg

SEQ ID NO: 223396 - DNA, 25 bp, SARS Virus
atttggacacattcttggcagacgt

SEQ ID NO: 223397 - DNA, 25 bp, SARS Virus
tttggacacatgtttggcagacgtg

SEQ ID NO: 223398 - DNA, 25 bp, SARS Virus
ttggacacatgcttggcagacgtgc

SEQ ID NO: 223399 - DNA, 25 bp, SARS Virus
tggacacatgcttggcagacgtgcg

SEQ ID NO: 223400 - DNA, 25 bp, SARS Virus
ggacacatgctttgcagacgtgcgt

SEQ ID NO: 223401 - DNA, 25 bp, SARS Virus
gacacatgcttgtcagacgtgcgtg

SEQ ID NO: 223402 - DNA, 25 bp, SARS Virus
acacatgcttggtagacgtgcgtgt

SEQ ID NO: 223403 - DNA, 25 bp, SARS Virus
cacatgcttggctgacgtgcgtgtg

SEQ ID NO: 223404 - DNA, 25 bp, SARS Virus
acatgcttggcatacgtgcgtgtga

SEQ ID NO: 223405 - DNA, 25 bp, SARS Virus
catgcttggcagtcgtgcgtgtgaa

SEQ ID NO: 223406 - DNA, 25 bp, SARS Virus
atgcttggcagatgtgcgtgtgaac

SEQ ID NO: 223407 - DNA, 25 bp, SARS Virus
tgcttggcagacttgcgtgtgaaca

SEQ ID NO: 223408 - DNA, 25 bp, SARS Virus
gcttggcagacgtgcgtgtgaacat

SEQ ID NO: 223409 - DNA, 25 bp, SARS Virus
cttggcagacgttcgtgtgaacatt

SEQ ID NO: 223410 - DNA, 25 bp, SARS Virus
ttggcagacgtgtgtgtgaacattt

SEQ ID NO: 223411 - DNA, 25 bp, SARS Virus
tggcagacgtgcttgtgaacatttc

SEQ ID NO: 223412 - DNA, 25 bp, SARS Virus
ggcagacgtgcgtgtgaacatttct

SEQ ID NO: 223413 - DNA, 25 bp, SARS Virus
gcagacgtgcgtttgaacatttctg

SEQ ID NO: 223414 - DNA, 25 bp, SARS Virus
cagacgtgcgtgtgaacatttctga

SEQ ID NO: 223415 - DNA, 25 bp, SARS Virus
agacgtgcgtgttaacatttctgac

SEQ ID NO: 223416 - DNA, 25 bp, SARS Virus
gacgtgcgtgtgtacatttctgact

SEQ ID NO: 223417 - DNA, 25 bp, SARS Virus
acgtgcgtgtgatcatttctgactt

SEQ ID NO: 223418 - DNA, 25 bp, SARS Virus
cgtgcgtgtgaatatttctgacttc

SEQ ID NO: 223419 - DNA, 25 bp, SARS Virus
gtgcgtgtgaacttttctgacttca

SEQ ID NO: 223420 - DNA, 25 bp, SARS Virus
tgcgtgtgaacatttctgacttcac

SEQ ID NO: 223421 - DNA, 25 bp, SARS Virus
gcgtgtgaacatttctgacttcacc

SEQ ID NO: 223422 - DNA, 25 bp, SARS Virus
cgtgtgaacatttctgacttcacca

SEQ ID NO: 223423 - DNA, 25 bp, SARS Virus
gtgtgaacatttttgacttcaccaa

SEQ ID NO: 223424 - DNA, 25 bp, SARS Virus
tgtgaacatttctgacttcaccaaa

SEQ ID NO: 223425 - DNA, 25 bp, SARS Virus
gtgaacatttcttacttcaccaaat

SEQ ID NO: 223426 - DNA, 25 bp, SARS Virus
tgaacatttctgtcttcaccaaatc

SEQ ID NO: 223427 - DNA, 25 bp, SARS Virus
gaacatttctgatttcaccaaatcg

SEQ ID NO: 223428 - DNA, 25 bp, SARS Virus
aacatttctgacttcaccaaatcgt

SEQ ID NO: 223429 - DNA, 25 bp, SARS Virus
acatttctgacttcaccaaatcgtg

SEQ ID NO: 223430 - DNA, 25 bp, SARS Virus
catttctgactttaccaaatcgtgg

SEQ ID NO: 223431 - DNA, 25 bp, SARS Virus
atttctgacttctccaaatcgtggt

SEQ ID NO: 223432 - DNA, 25 bp, SARS Virus
tttctgacttcatcaaatcgtggtt

SEQ ID NO: 223433 - DNA, 25 bp, SARS Virus
ttctgacttcactaaatcgtggttt

SEQ ID NO: 223434 - DNA, 25 bp, SARS Virus
tctgacttcacctaatcgtggttta

SEQ ID NO: 223435 - DNA, 25 bp, SARS Virus
ctgacttcaccatatcgtggtttat

SEQ ID NO: 223436 - DNA, 25 bp, SARS Virus
tgacttcaccaattcgtggtttata

SEQ ID NO: 223437 - DNA, 25 bp, SARS Virus
gacttcaccaaatcgtggtttatac

SEQ ID NO: 223438 - DNA, 25 bp, SARS Virus
acttcaccaaattgtggtttatacg

SEQ ID NO: 223439 - DNA, 25 bp, SARS Virus
cttcaccaaatcttggtttatacgg

SEQ ID NO: 223440 - DNA, 25 bp, SARS Virus
ttcaccaaatcgtggtttatacgga

SEQ ID NO: 223441 - DNA, 25 bp, SARS Virus
tcaccaaatcgttgtttatacggac

SEQ ID NO: 223442 - DNA, 25 bp, SARS Virus
caccaaatcgtgttttatacggacg

SEQ ID NO: 223443 - DNA, 25 bp, SARS Virus
accaaatcgtggtttatacggacga

SEQ ID NO: 223444 - DNA, 25 bp, SARS Virus
ccaaatcgtggtttatacggacgac

SEQ ID NO: 223445 - DNA, 25 bp, SARS Virus
caaatcgtggtttatacggacgact

SEQ ID NO: 223446 - DNA, 25 bp, SARS Virus
aaatcgtggtttttacggacgactg

SEQ ID NO: 223447 - DNA, 25 bp, SARS Virus
aatcgtggtttatacggacgactgt

SEQ ID NO: 223448 - DNA, 25 bp, SARS Virus
atcgtggtttattcggacgactgtt

SEQ ID NO: 223449 - DNA, 25 bp, SARS Virus
tcgtggtttatatggacgactgttg

SEQ ID NO: 223450 - DNA, 25 bp, SARS Virus
cgtggtttatactgacgactgttgt

SEQ ID NO: 223451 - DNA, 25 bp, SARS Virus
gtggtttatacgtacgactgttgtt

SEQ ID NO: 223452 - DNA, 25 bp, SARS Virus
tggtttatacggtcgactgttgtta

SEQ ID NO: 223453 - DNA, 25 bp, SARS Virus
ggtttatacggatgactgttgttac

SEQ ID NO: 223454 - DNA, 25 bp, SARS Virus
gtttatacggactactgttgttacc

SEQ ID NO: 223455 - DNA, 25 bp, SARS Virus
tttatacggacgtctgttgttacca

SEQ ID NO: 223456 - DNA, 25 bp, SARS Virus
ttatacggacgattgttgttaccac

SEQ ID NO: 223457 - DNA, 25 bp, SARS Virus
tatacggacgactgttgttaccacg

SEQ ID NO: 223458 - DNA, 25 bp, SARS Virus
atacggacgacttttgttaccacgt

SEQ ID NO: 223459 - DNA, 25 bp, SARS Virus
tacggacgactgttgttaccacgtt

SEQ ID NO: 223460 - DNA, 25 bp, SARS Virus
acggacgactgttgttaccacgttc

SEQ ID NO: 223461 - DNA, 25 bp, SARS Virus
cggacgactgtttttaccacgttca

SEQ ID NO: 223462 - DNA, 25 bp, SARS Virus
ggacgactgttgttaccacgttcat

SEQ ID NO: 223463 - DNA, 25 bp, SARS Virus
gacgactgttgttaccacgttcatt

SEQ ID NO: 223464 - DNA, 25 bp, SARS Virus
acgactgttgtttccacgttcattc

SEQ ID NO: 223465 - DNA, 25 bp, SARS Virus
cgactgttgttatcacgttcattct

SEQ ID NO: 223466 - DNA, 25 bp, SARS Virus
gactgttgttactacgttcattcta

SEQ ID NO: 223467 - DNA, 25 bp, SARS Virus
actgttgttacctcgttcattctac

SEQ ID NO: 223468 - DNA, 25 bp, SARS Virus
ctgttgttaccatgttcattctaca

SEQ ID NO: 223469 - DNA, 25 bp, SARS Virus
tgttgttaccactttcattctacag

SEQ ID NO: 223470 - DNA, 25 bp, SARS Virus
gttgttaccacgttcattctacagg

SEQ ID NO: 223471 - DNA, 25 bp, SARS Virus
ttgttaccacgttcattctacagga

SEQ ID NO: 223472 - DNA, 25 bp, SARS Virus
tgttaccacgtttattctacaggac

SEQ ID NO: 223473 - DNA, 25 bp, SARS Virus
gttaccacgttctttctacaggaca

SEQ ID NO: 223474 - DNA, 25 bp, SARS Virus
ttaccacgttcattctacaggacac

SEQ ID NO: 223475 - DNA, 25 bp, SARS Virus
taccacgttcattctacaggacact

SEQ ID NO: 223476 - DNA, 25 bp, SARS Virus
accacgttcattttacaggacactt

SEQ ID NO: 223477 - DNA, 25 bp, SARS Virus
ccacgttcattctacaggacactta

SEQ ID NO: 223478 - DNA, 25 bp, SARS Virus
cacgttcattcttcaggacacttaa

SEQ ID NO: 223479 - DNA, 25 bp, SARS Virus
acgttcattctataggacacttaac

SEQ ID NO: 223480 - DNA, 25 bp, SARS Virus
cgttcattctactggacacttaact

SEQ ID NO: 223481 - DNA, 25 bp, SARS Virus
gttcattctacatgacacttaactt

SEQ ID NO: 223482 - DNA, 25 bp, SARS Virus
ttcattctacagtacacttaacttt

SEQ ID NO: 223483 - DNA, 25 bp, SARS Virus
tcattctacaggtcacttaacttta

SEQ ID NO: 223484 - DNA, 25 bp, SARS Virus
cattctacaggatacttaactttaa

SEQ ID NO: 223485 - DNA, 25 bp, SARS Virus
attctacaggactcttaactttaaa

SEQ ID NO: 223486 - DNA, 25 bp, SARS Virus
ttctacaggacatttaactttaaaa

SEQ ID NO: 223487 - DNA, 25 bp, SARS Virus
tctacaggacacttaactttaaaag

SEQ ID NO: 223488 - DNA, 25 bp, SARS Virus
ctacaggacacttaactttaaaagt

SEQ ID NO: 223489 - DNA, 25 bp, SARS Virus
tacaggacactttactttaaaagta

SEQ ID NO: 223490 - DNA, 25 bp, SARS Virus
acaggacacttatctttaaaagtat

SEQ ID NO: 223491 - DNA, 25 bp, SARS Virus
caggacacttaattttaaaagtata

SEQ ID NO: 223492 - DNA, 25 bp, SARS Virus
aggacacttaactttaaaagtatac

SEQ ID NO: 223493 - DNA, 25 bp, SARS Virus
ggacacttaactttaaaagtatacg

SEQ ID NO: 223494 - DNA, 25 bp, SARS Virus
gacacttaactttaaaagtatacga

SEQ ID NO: 223495 - DNA, 25 bp, SARS Virus
acacttaacttttaaagtatacgac

SEQ ID NO: 223496 - DNA, 25 bp, SARS Virus
cacttaactttataagtatacgacg

SEQ ID NO: 223497 - DNA, 25 bp, SARS Virus
acttaactttaatagtatacgacgg

SEQ ID NO: 223498 - DNA, 25 bp, SARS Virus
cttaactttaaatgtatacgacgga

SEQ ID NO: 223499 - DNA, 25 bp, SARS Virus
ttaactttaaaattatacgacggaa

SEQ ID NO: 223500 - DNA, 25 bp, SARS Virus
taactttaaaagtatacgacggaat

SEQ ID NO: 223501 - DNA, 25 bp, SARS Virus
aactttaaaagtttacgacggaatt

SEQ ID NO: 223502 - DNA, 25 bp, SARS Virus
actttaaaagtatacgacggaattc

SEQ ID NO: 223503 - DNA, 25 bp, SARS Virus
ctttaaaagtattcgacggaattct

SEQ ID NO: 223504 - DNA, 25 bp, SARS Virus
tttaaaagtatatgacggaattctt

SEQ ID NO: 223505 - DNA, 25 bp, SARS Virus
ttaaaagtatactacggaattcttc

SEQ ID NO: 223506 - DNA, 25 bp, SARS Virus
taaaagtatacgtcggaattcttcg

SEQ ID NO: 223507 - DNA, 25 bp, SARS Virus
aaaagtatacgatggaattcttcga

SEQ ID NO: 223508 - DNA, 25 bp, SARS Virus
aaagtatacgactgaattcttcgac

SEQ ID NO: 223509 - DNA, 25 bp, SARS Virus
aagtatacgacgtaattcttcgacc

SEQ ID NO: 223510 - DNA, 25 bp, SARS Virus
agtatacgacggtattcttcgacct

SEQ ID NO: 223511 - DNA, 25 bp, SARS Virus
gtatacgacggatttcttcgaccta

SEQ ID NO: 223512 - DNA, 25 bp, SARS Virus
tatacgacggaattcttcgacctac

SEQ ID NO: 223513 - DNA, 25 bp, SARS Virus
atacgacggaattcttcgacctaca

SEQ ID NO: 223514 - DNA, 25 bp, SARS Virus
tacgacggaatttttcgacctacag

SEQ ID NO: 223515 - DNA, 25 bp, SARS Virus
acgacggaattcttcgacctacagg

SEQ ID NO: 223516 - DNA, 25 bp, SARS Virus
cgacggaattcttcgacctacagga

SEQ ID NO: 223517 - DNA, 25 bp, SARS Virus
gacggaattctttgacctacaggag

SEQ ID NO: 223518 - DNA, 25 bp, SARS Virus
acggaattcttctacctacaggagt

SEQ ID NO: 223519 - DNA, 25 bp, SARS Virus
cggaattcttcgtcctacaggagtg

SEQ ID NO: 223520 - DNA, 25 bp, SARS Virus
ggaattcttcgatctacaggagtgg

SEQ ID NO: 223521 - DNA, 25 bp, SARS Virus
gaattcttcgacttacaggagtgga

SEQ ID NO: 223522 - DNA, 25 bp, SARS Virus
aattcttcgacctacaggagtggac

SEQ ID NO: 223523 - DNA, 25 bp, SARS Virus
attcttcgaccttcaggagtggacg

SEQ ID NO: 223524 - DNA, 25 bp, SARS Virus
ttcttcgacctataggagtggacgt

SEQ ID NO: 223525 - DNA, 25 bp, SARS Virus
tcttcgacctactggagtggacgta

SEQ ID NO: 223526 - DNA, 25 bp, SARS Virus
cttcgacctacatgagtggacgtaa

SEQ ID NO: 223527 - DNA, 25 bp, SARS Virus
ttcgacctacagtagtggacgtaaa

SEQ ID NO: 223528 - DNA, 25 bp, SARS Virus
tcgacctacaggtgtggacgtaaat

SEQ ID NO: 223529 - DNA, 25 bp, SARS Virus
cgacctacaggattggacgtaaatc

SEQ ID NO: 223530 - DNA, 25 bp, SARS Virus
gacctacaggagtggacgtaaatcc

SEQ ID NO: 223531 - DNA, 25 bp, SARS Virus
acctacaggagttgacgtaaatcca

SEQ ID NO: 223532 - DNA, 25 bp, SARS Virus
cctacaggagtgtacgtaaatccaa

SEQ ID NO: 223533 - DNA, 25 bp, SARS Virus
ctacaggagtggtcgtaaatccaat

SEQ ID NO: 223534 - DNA, 25 bp, SARS Virus
tacaggagtggatgtaaatccaatc

SEQ ID NO: 223535 - DNA, 25 bp, SARS Virus
acaggagtggacttaaatccaatcc

SEQ ID NO: 223536 - DNA, 25 bp, SARS Virus
caggagtggacgtaaatccaatcca

SEQ ID NO: 223537 - DNA, 25 bp, SARS Virus
aggagtggacgtaaatccaatccag

SEQ ID NO: 223538 - DNA, 25 bp, SARS Virus
ggagtggacgtaaatccaatccagg

SEQ ID NO: 223539 - DNA, 25 bp, SARS Virus
gagtggacgtaaatccaatccaggt

SEQ ID NO: 223540 - DNA, 25 bp, SARS Virus
agtggacgtaaaaccaatccaggtt

SEQ ID NO: 223541 - DNA, 25 bp, SARS Virus
gtggacgtaaatacaatccaggttg

SEQ ID NO: 223542 - DNA, 25 bp, SARS Virus
tggacgtaaatcaaatccaggttgt

SEQ ID NO: 223543 - DNA, 25 bp, SARS Virus
ggacgtaaatccaatccaggttgtt

SEQ ID NO: 223544 - DNA, 25 bp, SARS Virus
gacgtaaatccaatccaggttgttg

SEQ ID NO: 223545 - DNA, 25 bp, SARS Virus
acgtaaatccaaaccaggttgttgt

SEQ ID NO: 223546 - DNA, 25 bp, SARS Virus
cgtaaatccaatacaggttgttgta

SEQ ID NO: 223547 - DNA, 25 bp, SARS Virus
gtaaatccaatcaaggttgttgtac

SEQ ID NO: 223548 - DNA, 25 bp, SARS Virus
taaatccaatccaggttgttgtacg

SEQ ID NO: 223549 - DNA, 25 bp, SARS Virus
aaatccaatccaagttgttgtacgt

SEQ ID NO: 223550 - DNA, 25 bp, SARS Virus
aatccaatccagattgttgtacgtc

SEQ ID NO: 223551 - DNA, 25 bp, SARS Virus
atccaatccaggatgttgtacgtct

SEQ ID NO: 223552 - DNA, 25 bp, SARS Virus
tccaatccaggtagttgtacgtctg

SEQ ID NO: 223553 - DNA, 25 bp, SARS Virus
ccaatccaggttattgtacgtctgt

SEQ ID NO: 223554 - DNA, 25 bp, SARS Virus
caatccaggttgatgtacgtctgtg

SEQ ID NO: 223555 - DNA, 25 bp, SARS Virus
aatccaggttgtagtacgtctgtga

SEQ ID NO: 223556 - DNA, 25 bp, SARS Virus
atccaggttgttatacgtctgtgaa

SEQ ID NO: 223557 - DNA, 25 bp, SARS Virus
tccaggttgttgaacgtctgtgaag

SEQ ID NO: 223558 - DNA, 25 bp, SARS Virus
ccaggttgttgtacgtctgtgaaga

SEQ ID NO: 223559 - DNA, 25 bp, SARS Virus
caggttgttgtaagtctgtgaagaa

SEQ ID NO: 223560 - DNA, 25 bp, SARS Virus
aggttgttgtacatctgtgaagaat

SEQ ID NO: 223561 - DNA, 25 bp, SARS Virus
ggttgttgtacgactgtgaagaatc

SEQ ID NO: 223562 - DNA, 25 bp, SARS Virus
gttgttgtacgtatgtgaagaatcg

SEQ ID NO: 223563 - DNA, 25 bp, SARS Virus
ttgttgtacgtcagtgaagaatcgt

SEQ ID NO: 223564 - DNA, 25 bp, SARS Virus
tgttgtacgtctatgaagaatcgtt

SEQ ID NO: 223565 - DNA, 25 bp, SARS Virus
gttgtacgtctgagaagaatcgttc

SEQ ID NO: 223566 - DNA, 25 bp, SARS Virus
ttgtacgtctgtaaagaatcgttct

SEQ ID NO: 223567 - DNA, 25 bp, SARS Virus
tgtacgtctgtgaagaatcgttcta

SEQ ID NO: 223568 - DNA, 25 bp, SARS Virus
gtacgtctgtgaagaatcgttctaa

SEQ ID NO: 223569 - DNA, 25 bp, SARS Virus
tacgtctgtgaaaaatcgttctaat

SEQ ID NO: 223570 - DNA, 25 bp, SARS Virus
acgtctgtgaagaatcgttctaata

SEQ ID NO: 223571 - DNA, 25 bp, SARS Virus
cgtctgtgaagaatcgttctaatac

SEQ ID NO: 223572 - DNA, 25 bp, SARS Virus
gtctgtgaagaaacgttctaataca

SEQ ID NO: 223573 - DNA, 25 bp, SARS Virus
tctgtgaagaatagttctaatacag

SEQ ID NO: 223574 - DNA, 25 bp, SARS Virus
ctgtgaagaatcattctaatacagg

SEQ ID NO: 223575 - DNA, 25 bp, SARS Virus
tgtgaagaatcgatctaatacaggt

SEQ ID NO: 223576 - DNA, 25 bp, SARS Virus
gtgaagaatcgtactaatacaggtc

SEQ ID NO: 223577 - DNA, 25 bp, SARS Virus
tgaagaatcgttataatacaggtct

SEQ ID NO: 223578 - DNA, 25 bp, SARS Virus
gaagaatcgttcaaatacaggtctt

SEQ ID NO: 223579 - DNA, 25 bp, SARS Virus
aagaatcgttctaatacaggtcttt

SEQ ID NO: 223580 - DNA, 25 bp, SARS Virus
agaatcgttctaatacaggtctttc

SEQ ID NO: 223581 - DNA, 25 bp, SARS Virus
gaatcgttctaaaacaggtctttcg

SEQ ID NO: 223582 - DNA, 25 bp, SARS Virus
aatcgttctaatacaggtctttcgt

SEQ ID NO: 223583 - DNA, 25 bp, SARS Virus
atcgttctaataaaggtctttcgtt

SEQ ID NO: 223584 - DNA, 25 bp, SARS Virus
tcgttctaatacaggtctttcgttt

SEQ ID NO: 223585 - DNA, 25 bp, SARS Virus
cgttctaatacaagtctttcgtttg

SEQ ID NO: 223586 - DNA, 25 bp, SARS Virus
gttctaatacagatctttcgtttgt

SEQ ID NO: 223587 - DNA, 25 bp, SARS Virus
ttctaatacaggactttcgtttgtt

SEQ ID NO: 223588 - DNA, 25 bp, SARS Virus
tctaatacaggtatttcgtttgttc

SEQ ID NO: 223589 - DNA, 25 bp, SARS Virus
ctaatacaggtcattcgtttgttct

SEQ ID NO: 223590 - DNA, 25 bp, SARS Virus
taatacaggtctatcgtttgttctg

SEQ ID NO: 223591 - DNA, 25 bp, SARS Virus
aatacaggtcttacgtttgttctgg

SEQ ID NO: 223592 - DNA, 25 bp, SARS Virus
atacaggtctttagtttgttctggg

SEQ ID NO: 223593 - DNA, 25 bp, SARS Virus
tacaggtctttcatttgttctggga

SEQ ID NO: 223594 - DNA, 25 bp, SARS Virus
acaggtctttcgattgttctgggag

SEQ ID NO: 223595 - DNA, 25 bp, SARS Virus
caggtctttcgtatgttctgggagg

SEQ ID NO: 223596 - DNA, 25 bp, SARS Virus
aggtctttcgttagttctgggagga

SEQ ID NO: 223597 - DNA, 25 bp, SARS Virus
ggtctttcgtttattctgggaggat

SEQ ID NO: 223598 - DNA, 25 bp, SARS Virus
gtctttcgtttgatctgggaggatg

SEQ ID NO: 223599 - DNA, 25 bp, SARS Virus
tctttcgtttgtactgggaggatga

SEQ ID NO: 223600 - DNA, 25 bp, SARS Virus
ctttcgtttgttatgggaggatgac

SEQ ID NO: 223601 - DNA, 25 bp, SARS Virus
tttcgtttgttcagggaggatgaca

SEQ ID NO: 223602 - DNA, 25 bp, SARS Virus
ttcgtttgttctaggaggatgacat

SEQ ID NO: 223603 - DNA, 25 bp, SARS Virus
tcgtttgttctgagaggatgacatt

SEQ ID NO: 223604 - DNA, 25 bp, SARS Virus
cgtttgttctggaaggatgacattc

SEQ ID NO: 223605 - DNA, 25 bp, SARS Virus
gtttgttctgggaggatgacattct

SEQ ID NO: 223606 - DNA, 25 bp, SARS Virus
tttgttctgggaagatgacattctc

SEQ ID NO: 223607 - DNA, 25 bp, SARS Virus
ttgttctgggagaatgacattctcc

SEQ ID NO: 223608 - DNA, 25 bp, SARS Virus
tgttctgggaggatgacattctccc

SEQ ID NO: 223609 - DNA, 25 bp, SARS Virus
gttctgggaggaagacattctcccg

SEQ ID NO: 223610 - DNA, 25 bp, SARS Virus
ttctgggaggataacattctcccgg

SEQ ID NO: 223611 - DNA, 25 bp, SARS Virus
tctgggaggatgacattctcccggt

SEQ ID NO: 223612 - DNA, 25 bp, SARS Virus
ctgggaggatgaaattctcccggta

SEQ ID NO: 223613 - DNA, 25 bp, SARS Virus
tgggaggatgacattctcccggtaa

SEQ ID NO: 223614 - DNA, 25 bp, SARS Virus
gggaggatgacaatctcccggtaaa

SEQ ID NO: 223615 - DNA, 25 bp, SARS Virus
ggaggatgacatactcccggtaaat

SEQ ID NO: 223616 - DNA, 25 bp, SARS Virus
gaggatgacattatcccggtaaatc

SEQ ID NO: 223617 - DNA, 25 bp, SARS Virus
aggatgacattcacccggtaaatcg

SEQ ID NO: 223618 - DNA, 25 bp, SARS Virus
ggatgacattctaccggtaaatcga

SEQ ID NO: 223619 - DNA, 25 bp, SARS Virus
gatgacattctcacggtaaatcgaa

SEQ ID NO: 223620 - DNA, 25 bp, SARS Virus
atgacattctccaggtaaatcgaat

SEQ ID NO: 223621 - DNA, 25 bp, SARS Virus
tgacattctcccagtaaatcgaatt

SEQ ID NO: 223622 - DNA, 25 bp, SARS Virus
gacattctcccgataaatcgaatta

SEQ ID NO: 223623 - DNA, 25 bp, SARS Virus
acattctcccggaaaatcgaattac

SEQ ID NO: 223624 - DNA, 25 bp, SARS Virus
cattctcccggtaaatcgaattaca

SEQ ID NO: 223625 - DNA, 25 bp, SARS Virus
attctcccggtaaatcgaattacat

SEQ ID NO: 223626 - DNA, 25 bp, SARS Virus
ttctcccggtaaatcgaattacatt

SEQ ID NO: 223627 - DNA, 25 bp, SARS Virus
tctcccggtaaaacgaattacatta

SEQ ID NO: 223628 - DNA, 25 bp, SARS Virus
ctcccggtaaatagaattacattag

SEQ ID NO: 223629 - DNA, 25 bp, SARS Virus
tcccggtaaatcaaattacattagt

SEQ ID NO: 223630 - DNA, 25 bp, SARS Virus
cccggtaaatcgaattacattagta

SEQ ID NO: 223631 - DNA, 25 bp, SARS Virus
ccggtaaatcgaattacattagtag

SEQ ID NO: 223632 - DNA, 25 bp, SARS Virus
cggtaaatcgaaatacattagtagt

SEQ ID NO: 223633 - DNA, 25 bp, SARS Virus
ggtaaatcgaataacattagtagtg

SEQ ID NO: 223634 - DNA, 25 bp, SARS Virus
gtaaatcgaattacattagtagtga

SEQ ID NO: 223635 - DNA, 25 bp, SARS Virus
taaatcgaattaaattagtagtgag

SEQ ID NO: 223636 - DNA, 25 bp, SARS Virus
aaatcgaattacattagtagtgaga

SEQ ID NO: 223637 - DNA, 25 bp, SARS Virus
aatcgaattacaatagtagtgagag

SEQ ID NO: 223638 - DNA, 25 bp, SARS Virus
atcgaattacataagtagtgagagg

SEQ ID NO: 223639 - DNA, 25 bp, SARS Virus
tcgaattacattagtagtgagagga

SEQ ID NO: 223640 - DNA, 25 bp, SARS Virus
cgaattacattaatagtgagaggaa

SEQ ID NO: 223641 - DNA, 25 bp, SARS Virus
gaattacattagaagtgagaggaaa

SEQ ID NO: 223642 - DNA, 25 bp, SARS Virus
aattacattagtagtgagaggaaaa

SEQ ID NO: 223643 - DNA, 25 bp, SARS Virus
attacattagtaatgagaggaaaac

SEQ ID NO: 223644 - DNA, 25 bp, SARS Virus
ttacattagtagagagaggaaaacg

SEQ ID NO: 223645 - DNA, 25 bp, SARS Virus
tacattagtagtaagaggaaaacgt

SEQ ID NO: 223646 - DNA, 25 bp, SARS Virus
acattagtagtgagaggaaaacgta

SEQ ID NO: 223647 - DNA, 25 bp, SARS Virus
cattagtagtgaaaggaaaacgtac

SEQ ID NO: 223648 - DNA, 25 bp, SARS Virus
attagtagtgagaggaaaacgtacc

SEQ ID NO: 223649 - DNA, 25 bp, SARS Virus
ttagtagtgagaagaaaacgtaccg

SEQ ID NO: 223650 - DNA, 25 bp, SARS Virus
tagtagtgagagaaaaacgtaccgt

SEQ ID NO: 223651 - DNA, 25 bp, SARS Virus
agtagtgagaggaaaacgtaccgtg

SEQ ID NO: 223652 - DNA, 25 bp, SARS Virus
gtagtgagaggaaaacgtaccgtgg

SEQ ID NO: 223653 - DNA, 25 bp, SARS Virus
tagtgagaggaaaacgtaccgtggt

SEQ ID NO: 223654 - DNA, 25 bp, SARS Virus
agtgagaggaaaacgtaccgtggta

SEQ ID NO: 223655 - DNA, 25 bp, SARS Virus
gtgagaggaaaaagtaccgtggtaa

SEQ ID NO: 223656 - DNA, 25 bp, SARS Virus
tgagaggaaaacataccgtggtaac

SEQ ID NO: 223657 - DNA, 25 bp, SARS Virus
gagaggaaaacgaaccgtggtaacc

SEQ ID NO: 223658 - DNA, 25 bp, SARS Virus
agaggaaaacgtaccgtggtaacca

SEQ ID NO: 223659 - DNA, 25 bp, SARS Virus
gaggaaaacgtaacgtggtaaccaa

SEQ ID NO: 223660 - DNA, 25 bp, SARS Virus
aggaaaacgtacagtggtaaccaac

SEQ ID NO: 223661 - DNA, 25 bp, SARS Virus
ggaaaacgtaccatggtaaccaacg

SEQ ID NO: 223662 - DNA, 25 bp, SARS Virus
gaaaacgtaccgaggtaaccaacgg

SEQ ID NO: 223663 - DNA, 25 bp, SARS Virus
aaaacgtaccgtagtaaccaacgga

SEQ ID NO: 223664 - DNA, 25 bp, SARS Virus
aaacgtaccgtgataaccaacggaa

SEQ ID NO: 223665 - DNA, 25 bp, SARS Virus
aacgtaccgtggaaaccaacggaac

SEQ ID NO: 223666 - DNA, 25 bp, SARS Virus
acgtaccgtggtaaccaacggaaca

SEQ ID NO: 223667 - DNA, 25 bp, SARS Virus
cgtaccgtggtaaccaacggaacaa

SEQ ID NO: 223668 - DNA, 25 bp, SARS Virus
gtaccgtggtaaacaacggaacaac

SEQ ID NO: 223669 - DNA, 25 bp, SARS Virus
taccgtggtaacaaacggaacaact

SEQ ID NO: 223670 - DNA, 25 bp, SARS Virus
accgtggtaaccaacggaacaactc

SEQ ID NO: 223671 - DNA, 25 bp, SARS Virus
ccgtggtaaccaacggaacaactca

SEQ ID NO: 223672 - DNA, 25 bp, SARS Virus
cgtggtaaccaaaggaacaactcac

SEQ ID NO: 223673 - DNA, 25 bp, SARS Virus
gtggtaaccaacagaacaactcacg

SEQ ID NO: 223674 - DNA, 25 bp, SARS Virus
tggtaaccaacgaaacaactcacgt

SEQ ID NO: 223675 - DNA, 25 bp, SARS Virus
ggtaaccaacggaacaactcacgtg

SEQ ID NO: 223676 - DNA, 25 bp, SARS Virus
gtaaccaacggaacaactcacgtgg

SEQ ID NO: 223677 - DNA, 25 bp, SARS Virus
taaccaacggaaaaactcacgtgga

SEQ ID NO: 223678 - DNA, 25 bp, SARS Virus
aaccaacggaacaactcacgtggac

SEQ ID NO: 223679 - DNA, 25 bp, SARS Virus
accaacggaacaactcacgtggacg

SEQ ID NO: 223680 - DNA, 25 bp, SARS Virus
ccaacggaacaaatcacgtggacga

SEQ ID NO: 223681 - DNA, 25 bp, SARS Virus
caacggaacaacacacgtggacgat

SEQ ID NO: 223682 - DNA, 25 bp, SARS Virus
aacggaacaactaacgtggacgatg

SEQ ID NO: 223683 - DNA, 25 bp, SARS Virus
acggaacaactcacgtggacgatgt

SEQ ID NO: 223684 - DNA, 25 bp, SARS Virus
cggaacaactcaagtggacgatgtg

SEQ ID NO: 223685 - DNA, 25 bp, SARS Virus
ggaacaactcacatggacgatgtgg

SEQ ID NO: 223686 - DNA, 25 bp, SARS Virus
gaacaactcacgaggacgatgtggt

SEQ ID NO: 223687 - DNA, 25 bp, SARS Virus
aacaactcacgtagacgatgtggtg

SEQ ID NO: 223688 - DNA, 25 bp, SARS Virus
acaactcacgtgaacgatgtggtgg

SEQ ID NO: 223689 - DNA, 25 bp, SARS Virus
caactcacgtggacgatgtggtggt

SEQ ID NO: 223690 - DNA, 25 bp, SARS Virus
aactcacgtggaagatgtggtggtg

SEQ ID NO: 223691 - DNA, 25 bp, SARS Virus
actcacgtggacaatgtggtggtgg

SEQ ID NO: 223692 - DNA, 25 bp, SARS Virus
ctcacgtggacgatgtggtggtggt

SEQ ID NO: 223693 - DNA, 25 bp, SARS Virus
tcacgtggacgaagtggtggtggta

SEQ ID NO: 223694 - DNA, 25 bp, SARS Virus
cacgtggacgatatggtggtggtac

SEQ ID NO: 223695 - DNA, 25 bp, SARS Virus
acgtggacgatgaggtggtggtaca

SEQ ID NO: 223696 - DNA, 25 bp, SARS Virus
cgtggacgatgtagtggtggtacaa

SEQ ID NO: 223697 - DNA, 25 bp, SARS Virus
gtggacgatgtgatggtggtacaaa

SEQ ID NO: 223698 - DNA, 25 bp, SARS Virus
tggacgatgtggaggtggtacaaag

SEQ ID NO: 223699 - DNA, 25 bp, SARS Virus
ggacgatgtggtagtggtacaaagt

SEQ ID NO: 223700 - DNA, 25 bp, SARS Virus
gacgatgtggtgatggtacaaagtc

SEQ ID NO: 223701 - DNA, 25 bp, SARS Virus
acgatgtggtggaggtacaaagtcc

SEQ ID NO: 223702 - DNA, 25 bp, SARS Virus
cgatgtggtggtagtacaaagtcca

SEQ ID NO: 223703 - DNA, 25 bp, SARS Virus
gatgtggtggtgatacaaagtccac

SEQ ID NO: 223704 - DNA, 25 bp, SARS Virus
atgtggtggtggaacaaagtccaca

SEQ ID NO: 223705 - DNA, 25 bp, SARS Virus
tgtggtggtggtacaaagtccacat

SEQ ID NO: 223706 - DNA, 25 bp, SARS Virus
gtggtggtggtaaaaagtccacata

SEQ ID NO: 223707 - DNA, 25 bp, SARS Virus
tggtggtggtacaaagtccacatac

SEQ ID NO: 223708 - DNA, 25 bp, SARS Virus
ggtggtggtacaaagtccacataca

SEQ ID NO: 223709 - DNA, 25 bp, SARS Virus
gtggtggtacaaagtccacatacaa

SEQ ID NO: 223710 - DNA, 25 bp, SARS Virus
tggtggtacaaaatccacatacaat

SEQ ID NO: 223711 - DNA, 25 bp, SARS Virus
ggtggtacaaagaccacatacaatc

SEQ ID NO: 223712 - DNA, 25 bp, SARS Virus
gtggtacaaagtacacatacaatcg

SEQ ID NO: 223713 - DNA, 25 bp, SARS Virus
tggtacaaagtcaacatacaatcgt

SEQ ID NO: 223714 - DNA, 25 bp, SARS Virus
ggtacaaagtccacatacaatcgtc

SEQ ID NO: 223715 - DNA, 25 bp, SARS Virus
gtacaaagtccaaatacaatcgtcg

SEQ ID NO: 223716 - DNA, 25 bp, SARS Virus
tacaaagtccacatacaatcgtcgt

SEQ ID NO: 223717 - DNA, 25 bp, SARS Virus
acaaagtccacaaacaatcgtcgta

SEQ ID NO: 223718 - DNA, 25 bp, SARS Virus
caaagtccacatacaatcgtcgtaa

SEQ ID NO: 223719 - DNA, 25 bp, SARS Virus
aaagtccacataaaatcgtcgtaaa

SEQ ID NO: 223720 - DNA, 25 bp, SARS Virus
aagtccacatacaatcgtcgtaaat

SEQ ID NO: 223721 - DNA, 25 bp, SARS Virus
agtccacatacaatcgtcgtaaatg

SEQ ID NO: 223722 - DNA, 25 bp, SARS Virus
gtccacatacaaacgtcgtaaatgt

SEQ ID NO: 223723 - DNA, 25 bp, SARS Virus
tccacatacaatagtcgtaaatgtt

SEQ ID NO: 223724 - DNA, 25 bp, SARS Virus
ccacatacaatcatcgtaaatgtta

SEQ ID NO: 223725 - DNA, 25 bp, SARS Virus
cacatacaatcgacgtaaatgttag

SEQ ID NO: 223726 - DNA, 25 bp, SARS Virus
acatacaatcgtagtaaatgttagt

SEQ ID NO: 223727 - DNA, 25 bp, SARS Virus
catacaatcgtcataaatgttagtg

SEQ ID NO: 223728 - DNA, 25 bp, SARS Virus
atacaatcgtcgaaaatgttagtgg

SEQ ID NO: 223729 - DNA, 25 bp, SARS Virus
tacaatcgtcgtaaatgttagtggt

SEQ ID NO: 223730 - DNA, 25 bp, SARS Virus
acaatcgtcgtaaatgttagtggta

SEQ ID NO: 223731 - DNA, 25 bp, SARS Virus
caatcgtcgtaaatgttagtggtat

SEQ ID NO: 223732 - DNA, 25 bp, SARS Virus
aatcgtcgtaaaagttagtggtatc

SEQ ID NO: 223733 - DNA, 25 bp, SARS Virus
atcgtcgtaaatattagtggtatcc

SEQ ID NO: 223734 - DNA, 25 bp, SARS Virus
tcgtcgtaaatgatagtggtatcct

SEQ ID NO: 223735 - DNA, 25 bp, SARS Virus
cgtcgtaaatgtaagtggtatccta

SEQ ID NO: 223736 - DNA, 25 bp, SARS Virus
gtcgtaaatgttagtggtatcctaa

SEQ ID NO: 223737 - DNA, 25 bp, SARS Virus
tcgtaaatgttaatggtatcctaat

SEQ ID NO: 223738 - DNA, 25 bp, SARS Virus
cgtaaatgttagaggtatcctaatc

SEQ ID NO: 223739 - DNA, 25 bp, SARS Virus
gtaaatgttagtagtatcctaatcg

SEQ ID NO: 223740 - DNA, 25 bp, SARS Virus
taaatgttagtgatatcctaatcgt

SEQ ID NO: 223741 - DNA, 25 bp, SARS Virus
aaatgttagtggaatcctaatcgtg

SEQ ID NO: 223742 - DNA, 25 bp, SARS Virus
aatgttagtggtatcctaatcgtga

SEQ ID NO: 223743 - DNA, 25 bp, SARS Virus
atgttagtggtaacctaatcgtgaa

SEQ ID NO: 223744 - DNA, 25 bp, SARS Virus
tgttagtggtatactaatcgtgaaa

SEQ ID NO: 223745 - DNA, 25 bp, SARS Virus
gttagtggtatcataatcgtgaaac

SEQ ID NO: 223746 - DNA, 25 bp, SARS Virus
ttagtggtatccaaatcgtgaaaca

SEQ ID NO: 223747 - DNA, 25 bp, SARS Virus
tagtggtatcctaatcgtgaaacac

SEQ ID NO: 223748 - DNA, 25 bp, SARS Virus
agtggtatcctaatcgtgaaacacg

SEQ ID NO: 223749 - DNA, 25 bp, SARS Virus
gtggtatcctaaacgtgaaacacgg

SEQ ID NO: 223750 - DNA, 25 bp, SARS Virus
tggtatcctaatagtgaaacacgga

SEQ ID NO: 223751 - DNA, 25 bp, SARS Virus
ggtatcctaatcatgaaacacggag

SEQ ID NO: 223752 - DNA, 25 bp, SARS Virus
gtatcctaatcgagaaacacggagg

SEQ ID NO: 223753 - DNA, 25 bp, SARS Virus
tatcctaatcgtaaaacacggagga

SEQ ID NO: 223754 - DNA, 25 bp, SARS Virus
atcctaatcgtgaaacacggaggaa

SEQ ID NO: 223755 - DNA, 25 bp, SARS Virus
tcctaatcgtgaaacacggaggaat

SEQ ID NO: 223756 - DNA, 25 bp, SARS Virus
cctaatcgtgaaacacggaggaatt

SEQ ID NO: 223757 - DNA, 25 bp, SARS Virus
ctaatcgtgaaaaacggaggaattg

SEQ ID NO: 223758 - DNA, 25 bp, SARS Virus
taatcgtgaaacacggaggaattgc

SEQ ID NO: 223759 - DNA, 25 bp, SARS Virus
aatcgtgaaacaaggaggaattgct

SEQ ID NO: 223760 - DNA, 25 bp, SARS Virus
atcgtgaaacacagaggaattgcta

SEQ ID NO: 223761 - DNA, 25 bp, SARS Virus
tcgtgaaacacgaaggaattgctac

SEQ ID NO: 223762 - DNA, 25 bp, SARS Virus
cgtgaaacacggaggaattgctaca

SEQ ID NO: 223763 - DNA, 25 bp, SARS Virus
gtgaaacacggaagaattgctacag

SEQ ID NO: 223764 - DNA, 25 bp, SARS Virus
tgaaacacggagaaattgctacagt

SEQ ID NO: 223765 - DNA, 25 bp, SARS Virus
gaaacacggaggaattgctacagtt

SEQ ID NO: 223766 - DNA, 25 bp, SARS Virus
aaacacggaggaattgctacagttg

SEQ ID NO: 223767 - DNA, 25 bp, SARS Virus
aacacggaggaaatgctacagttgt

SEQ ID NO: 223768 - DNA, 25 bp, SARS Virus
acacggaggaatagctacagttgtg

SEQ ID NO: 223769 - DNA, 25 bp, SARS Virus
cacggaggaattactacagttgtgt

SEQ ID NO: 223770 - DNA, 25 bp, SARS Virus
acggaggaattgatacagttgtgta

SEQ ID NO: 223771 - DNA, 25 bp, SARS Virus
cggaggaattgcaacagttgtgtaa

SEQ ID NO: 223772 - DNA, 25 bp, SARS Virus
ggaggaattgctacagttgtgtaaa

SEQ ID NO: 223773 - DNA, 25 bp, SARS Virus
gaggaattgctaaagttgtgtaaat

SEQ ID NO: 223774 - DNA, 25 bp, SARS Virus
aggaattgctacagttgtgtaaatt

SEQ ID NO: 223775 - DNA, 25 bp, SARS Virus
ggaattgctacaattgtgtaaatta

SEQ ID NO: 223776 - DNA, 25 bp, SARS Virus
gaattgctacagatgtgtaaattac

SEQ ID NO: 223777 - DNA, 25 bp, SARS Virus
aattgctacagtagtgtaaattacc

SEQ ID NO: 223778 - DNA, 25 bp, SARS Virus
attgctacagttatgtaaattaccg

SEQ ID NO: 223779 - DNA, 25 bp, SARS Virus
ttgctacagttgagtaaattaccgt

SEQ ID NO: 223780 - DNA, 25 bp, SARS Virus
tgctacagttgtataaattaccgtt

SEQ ID NO: 223781 - DNA, 25 bp, SARS Virus
gctacagttgtgaaaattaccgttg

SEQ ID NO: 223782 - DNA, 25 bp, SARS Virus
ctacagttgtgtaaattaccgttgt

SEQ ID NO: 223783 - DNA, 25 bp, SARS Virus
tacagttgtgtaaattaccgttgta

SEQ ID NO: 223784 - DNA, 25 bp, SARS Virus
acagttgtgtaaattaccgttgtaa

SEQ ID NO: 223785 - DNA, 25 bp, SARS Virus
cagttgtgtaaaataccgttgtaac

SEQ ID NO: 223786 - DNA, 25 bp, SARS Virus
agttgtgtaaataaccgttgtaaca

SEQ ID NO: 223787 - DNA, 25 bp, SARS Virus
gttgtgtaaattaccgttgtaacag

SEQ ID NO: 223788 - DNA, 25 bp, SARS Virus
ttgtgtaaattaacgttgtaacagt

SEQ ID NO: 223789 - DNA, 25 bp, SARS Virus
tgtgtaaattacagttgtaacagtc

SEQ ID NO: 223790 - DNA, 25 bp, SARS Virus
gtgtaaattaccattgtaacagtca

SEQ ID NO: 223791 - DNA, 25 bp, SARS Virus
tgtaaattaccgatgtaacagtcat

SEQ ID NO: 223792 - DNA, 25 bp, SARS Virus
gtaaattaccgtagtaacagtcatt

SEQ ID NO: 223793 - DNA, 25 bp, SARS Virus
taaattaccgttataacagtcattc

SEQ ID NO: 223794 - DNA, 25 bp, SARS Virus
aaattaccgttgaaacagtcattca

SEQ ID NO: 223795 - DNA, 25 bp, SARS Virus
aattaccgttgtaacagtcattcaa

SEQ ID NO: 223796 - DNA, 25 bp, SARS Virus
attaccgttgtaacagtcattcaaa

SEQ ID NO: 223797 - DNA, 25 bp, SARS Virus
ttaccgttgtaaaagtcattcaaaa

SEQ ID NO: 223798 - DNA, 25 bp, SARS Virus
taccgttgtaacagtcattcaaaat

SEQ ID NO: 223799 - DNA, 25 bp, SARS Virus
accgttgtaacaatcattcaaaatt

SEQ ID NO: 223800 - DNA, 25 bp, SARS Virus
ccgttgtaacagacattcaaaattt

SEQ ID NO: 223801 - DNA, 25 bp, SARS Virus
cgttgtaacagtaattcaaaattta

SEQ ID NO: 223802 - DNA, 25 bp, SARS Virus
gttgtaacagtcattcaaaatttat

SEQ ID NO: 223803 - DNA, 25 bp, SARS Virus
ttgtaacagtcaatcaaaatttatt

SEQ ID NO: 223804 - DNA, 25 bp, SARS Virus
tgtaacagtcatacaaaatttattg

SEQ ID NO: 223805 - DNA, 25 bp, SARS Virus
gtaacagtcattaaaaatttattgg

SEQ ID NO: 223806 - DNA, 25 bp, SARS Virus
taacagtcattcaaaatttattggt

SEQ ID NO: 223807 - DNA, 25 bp, SARS Virus
aacagtcattcaaaatttattggtc

SEQ ID NO: 223808 - DNA, 25 bp, SARS Virus
acagtcattcaaaatttattggtca

SEQ ID NO: 223809 - DNA, 25 bp, SARS Virus
cagtcattcaaaatttattggtcat

SEQ ID NO: 223810 - DNA, 25 bp, SARS Virus
agtcattcaaaaattattggtcatt

SEQ ID NO: 223811 - DNA, 25 bp, SARS Virus
gtcattcaaaatatattggtcattt

SEQ ID NO: 223812 - DNA, 25 bp, SARS Virus
tcattcaaaattaattggtcatttg

SEQ ID NO: 223813 - DNA, 25 bp, SARS Virus
cattcaaaatttattggtcatttga

SEQ ID NO: 223814 - DNA, 25 bp, SARS Virus
attcaaaatttaatggtcatttgac

SEQ ID NO: 223815 - DNA, 25 bp, SARS Virus
ttcaaaatttataggtcatttgact

SEQ ID NO: 223816 - DNA, 25 bp, SARS Virus
tcaaaatttattagtcatttgacta

SEQ ID NO: 223817 - DNA, 25 bp, SARS Virus
caaaatttattgatcatttgactaa

SEQ ID NO: 223818 - DNA, 25 bp, SARS Virus
aaaatttattggacatttgactaat

SEQ ID NO: 223819 - DNA, 25 bp, SARS Virus
aaatttattggtaatttgactaatt

SEQ ID NO: 223820 - DNA, 25 bp, SARS Virus
aatttattggtcatttgactaattg

SEQ ID NO: 223821 - DNA, 25 bp, SARS Virus
atttattggtcaattgactaattga

SEQ ID NO: 223822 - DNA, 25 bp, SARS Virus
tttattggtcatatgactaattgac

SEQ ID NO: 223823 - DNA, 25 bp, SARS Virus
ttattggtcattagactaattgacc

SEQ ID NO: 223824 - DNA, 25 bp, SARS Virus
tattggtcatttaactaattgacca

SEQ ID NO: 223825 - DNA, 25 bp, SARS Virus
attggtcatttgactaattgaccaa

SEQ ID NO: 223826 - DNA, 25 bp, SARS Virus
ttggtcatttgaataattgaccaag

SEQ ID NO: 223827 - DNA, 25 bp, SARS Virus
tggtcatttgacaaattgaccaaga

SEQ ID NO: 223828 - DNA, 25 bp, SARS Virus
ggtcatttgactaattgaccaagaa

SEQ ID NO: 223829 - DNA, 25 bp, SARS Virus
gtcatttgactaattgaccaagaag

SEQ ID NO: 223830 - DNA, 25 bp, SARS Virus
tcatttgactaaatgaccaagaagt

SEQ ID NO: 223831 - DNA, 25 bp, SARS Virus
catttgactaatagaccaagaagtc

SEQ ID NO: 223832 - DNA, 25 bp, SARS Virus
atttgactaattaaccaagaagtcc

SEQ ID NO: 223833 - DNA, 25 bp, SARS Virus
tttgactaattgaccaagaagtcca

SEQ ID NO: 223834 - DNA, 25 bp, SARS Virus
ttgactaattgaacaagaagtccac

SEQ ID NO: 223835 - DNA, 25 bp, SARS Virus
tgactaattgacaaagaagtccaca

SEQ ID NO: 223836 - DNA, 25 bp, SARS Virus
gactaattgaccaagaagtccacat

SEQ ID NO: 223837 - DNA, 25 bp, SARS Virus
actaattgaccaagaagtccacatc

SEQ ID NO: 223838 - DNA, 25 bp, SARS Virus
ctaattgaccaaaaagtccacatcc

SEQ ID NO: 223839 - DNA, 25 bp, SARS Virus
taattgaccaagaagtccacatcca

SEQ ID NO: 223840 - DNA, 25 bp, SARS Virus
aattgaccaagaagtccacatccaa

SEQ ID NO: 223841 - DNA, 25 bp, SARS Virus
attgaccaagaaatccacatccaag

SEQ ID NO: 223842 - DNA, 25 bp, SARS Virus
ttgaccaagaagaccacatccaaga

SEQ ID NO: 223843 - DNA, 25 bp, SARS Virus
tgaccaagaagtacacatccaagac

SEQ ID NO: 223844 - DNA, 25 bp, SARS Virus
gaccaagaagtcaacatccaagacc

SEQ ID NO: 223845 - DNA, 25 bp, SARS Virus
accaagaagtccacatccaagacca

SEQ ID NO: 223846 - DNA, 25 bp, SARS Virus
ccaagaagtccaaatccaagaccaa

SEQ ID NO: 223847 - DNA, 25 bp, SARS Virus
caagaagtccacatccaagaccaag

SEQ ID NO: 223848 - DNA, 25 bp, SARS Virus
aagaagtccacaaccaagaccaaga

SEQ ID NO: 223849 - DNA, 25 bp, SARS Virus
agaagtccacatacaagaccaagac

SEQ ID NO: 223850 - DNA, 25 bp, SARS Virus
gaagtccacatcaaagaccaagacc

SEQ ID NO: 223851 - DNA, 25 bp, SARS Virus
aagtccacatccaagaccaagaccg

SEQ ID NO: 223852 - DNA, 25 bp, SARS Virus
agtccacatccaagaccaagaccga

SEQ ID NO: 223853 - DNA, 25 bp, SARS Virus
gtccacatccaaaaccaagaccgag

SEQ ID NO: 223854 - DNA, 25 bp, SARS Virus
tccacatccaagaccaagaccgagt

SEQ ID NO: 223855 - DNA, 25 bp, SARS Virus
ccacatccaagaacaagaccgagtt

SEQ ID NO: 223856 - DNA, 25 bp, SARS Virus
cacatccaagacaaagaccgagtta

SEQ ID NO: 223857 - DNA, 25 bp, SARS Virus
acatccaagaccaagaccgagttag

SEQ ID NO: 223858 - DNA, 25 bp, SARS Virus
catccaagaccaagaccgagttaga

SEQ ID NO: 223859 - DNA, 25 bp, SARS Virus
atccaagaccaaaaccgagttagag

SEQ ID NO: 223860 - DNA, 25 bp, SARS Virus
tccaagaccaagaccgagttagaga

SEQ ID NO: 223861 - DNA, 25 bp, SARS Virus
ccaagaccaagaacgagttagagac

SEQ ID NO: 223862 - DNA, 25 bp, SARS Virus
caagaccaagacagagttagagact

SEQ ID NO: 223863 - DNA, 25 bp, SARS Virus
aagaccaagaccaagttagagacta

SEQ ID NO: 223864 - DNA, 25 bp, SARS Virus
agaccaagaccgagttagagactaa

SEQ ID NO: 223865 - DNA, 25 bp, SARS Virus
gaccaagaccgaattagagactaac

SEQ ID NO: 223866 - DNA, 25 bp, SARS Virus
accaagaccgagatagagactaacg

SEQ ID NO: 223867 - DNA, 25 bp, SARS Virus
ccaagaccgagtaagagactaacga

SEQ ID NO: 223868 - DNA, 25 bp, SARS Virus
caagaccgagttagagactaacgag

SEQ ID NO: 223869 - DNA, 25 bp, SARS Virus
aagaccgagttaaagactaacgagt

SEQ ID NO: 223870 - DNA, 25 bp, SARS Virus
agaccgagttagagactaacgagtc

SEQ ID NO: 223871 - DNA, 25 bp, SARS Virus
gaccgagttagaaactaacgagtca

SEQ ID NO: 223872 - DNA, 25 bp, SARS Virus
accgagttagagactaacgagtcat

SEQ ID NO: 223873 - DNA, 25 bp, SARS Virus
ccgagttagagaataacgagtcatc

SEQ ID NO: 223874 - DNA, 25 bp, SARS Virus
cgagttagagacaaacgagtcatca

SEQ ID NO: 223875 - DNA, 25 bp, SARS Virus
gagttagagactaacgagtcatcat

SEQ ID NO: 223876 - DNA, 25 bp, SARS Virus
agttagagactaacgagtcatcata

SEQ ID NO: 223877 - DNA, 25 bp, SARS Virus
gttagagactaaagagtcatcatag

SEQ ID NO: 223878 - DNA, 25 bp, SARS Virus
ttagagactaacaagtcatcatagt

SEQ ID NO: 223879 - DNA, 25 bp, SARS Virus
tagagactaacgagtcatcatagta

SEQ ID NO: 223880 - DNA, 25 bp, SARS Virus
agagactaacgaatcatcatagtag

SEQ ID NO: 223881 - DNA, 25 bp, SARS Virus
gagactaacgagacatcatagtagg

SEQ ID NO: 223882 - DNA, 25 bp, SARS Virus
agactaacgagtaatcatagtaggt

SEQ ID NO: 223883 - DNA, 25 bp, SARS Virus
gactaacgagtcatcatagtaggtc

SEQ ID NO: 223884 - DNA, 25 bp, SARS Virus
actaacgagtcaacatagtaggtcg

SEQ ID NO: 223885 - DNA, 25 bp, SARS Virus
ctaacgagtcataatagtaggtcgg

SEQ ID NO: 223886 - DNA, 25 bp, SARS Virus
taacgagtcatcatagtaggtcggt

SEQ ID NO: 223887 - DNA, 25 bp, SARS Virus
aacgagtcatcaaagtaggtcggtc

SEQ ID NO: 223888 - DNA, 25 bp, SARS Virus
acgagtcatcatagtaggtcggtca

SEQ ID NO: 223889 - DNA, 25 bp, SARS Virus
cgagtcatcataataggtcggtcag

SEQ ID NO: 223890 - DNA, 25 bp, SARS Virus
gagtcatcatagaaggtcggtcaga

SEQ ID NO: 223891 - DNA, 25 bp, SARS Virus
agtcatcatagtaggtcggtcagaa

SEQ ID NO: 223892 - DNA, 25 bp, SARS Virus
gtcatcatagtaagtcggtcagaag

SEQ ID NO: 223893 - DNA, 25 bp, SARS Virus
tcatcatagtagatcggtcagaagg

SEQ ID NO: 223894 - DNA, 25 bp, SARS Virus
catcatagtaggacggtcagaagga

SEQ ID NO: 223895 - DNA, 25 bp, SARS Virus
atcatagtaggtaggtcagaaggag

SEQ ID NO: 223896 - DNA, 25 bp, SARS Virus
tcatagtaggtcagtcagaaggaga

SEQ ID NO: 223897 - DNA, 25 bp, SARS Virus
catagtaggtcgatcagaaggagaa

SEQ ID NO: 223898 - DNA, 25 bp, SARS Virus
atagtaggtcggacagaaggagaag

SEQ ID NO: 223899 - DNA, 25 bp, SARS Virus
tagtaggtcggtaagaaggagaaga

SEQ ID NO: 223900 - DNA, 25 bp, SARS Virus
agtaggtcggtcagaaggagaagaa

SEQ ID NO: 223901 - DNA, 25 bp, SARS Virus
gtaggtcggtcaaaaggagaagaag

SEQ ID NO: 223902 - DNA, 25 bp, SARS Virus
taggtcggtcagaaggagaagaaga

SEQ ID NO: 223903 - DNA, 25 bp, SARS Virus
aggtcggtcagaaggagaagaagaa

SEQ ID NO: 223904 - DNA, 25 bp, SARS Virus
ggtcggtcagaaagagaagaagaag

SEQ ID NO: 223905 - DNA, 25 bp, SARS Virus
gtcggtcagaagaagaagaagaagg

SEQ ID NO: 223906 - DNA, 25 bp, SARS Virus
tcggtcagaaggagaagaagaagga

SEQ ID NO: 223907 - DNA, 25 bp, SARS Virus
cggtcagaaggaaaagaagaaggag

SEQ ID NO: 223908 - DNA, 25 bp, SARS Virus
ggtcagaaggagaagaagaaggagt

SEQ ID NO: 223909 - DNA, 25 bp, SARS Virus
gtcagaaggagaagaagaaggagtt

SEQ ID NO: 223910 - DNA, 25 bp, SARS Virus
tcagaaggagaaaaagaaggagttg

SEQ ID NO: 223911 - DNA, 25 bp, SARS Virus
cagaaggagaagaagaaggagttga

SEQ ID NO: 223912 - DNA, 25 bp, SARS Virus
agaaggagaagaagaaggagttgag

SEQ ID NO: 223913 - DNA, 25 bp, SARS Virus
gaaggagaagaaaaaggagttgagc

SEQ ID NO: 223914 - DNA, 25 bp, SARS Virus
aaggagaagaagaaggagttgagct

SEQ ID NO: 223915 - DNA, 25 bp, SARS Virus
aggagaagaagaaggagttgagctt

SEQ ID NO: 223916 - DNA, 25 bp, SARS Virus
ggagaagaagaaagagttgagcttg

SEQ ID NO: 223917 - DNA, 25 bp, SARS Virus
gagaagaagaagaagttgagcttga

SEQ ID NO: 223918 - DNA, 25 bp, SARS Virus
agaagaagaaggagttgagcttgac

SEQ ID NO: 223919 - DNA, 25 bp, SARS Virus
gaagaagaaggaattgagcttgaca

SEQ ID NO: 223920 - DNA, 25 bp, SARS Virus
aagaagaaggagatgagcttgacaa

SEQ ID NO: 223921 - DNA, 25 bp, SARS Virus
agaagaaggagtagagcttgacaaa

SEQ ID NO: 223922 - DNA, 25 bp, SARS Virus
gaagaaggagttaagcttgacaaag

SEQ ID NO: 223923 - DNA, 25 bp, SARS Virus
aagaaggagttgagcttgacaaagt

SEQ ID NO: 223924 - DNA, 25 bp, SARS Virus
agaaggagttgaacttgacaaagtc

SEQ ID NO: 223925 - DNA, 25 bp, SARS Virus
gaaggagttgagattgacaaagtcg

SEQ ID NO: 223926 - DNA, 25 bp, SARS Virus
aaggagttgagcatgacaaagtcga

SEQ ID NO: 223927 - DNA, 25 bp, SARS Virus
aggagttgagctagacaaagtcgac

SEQ ID NO: 223928 - DNA, 25 bp, SARS Virus
ggagttgagcttaacaaagtcgact

SEQ ID NO: 223929 - DNA, 25 bp, SARS Virus
gagttgagcttgacaaagtcgactc

SEQ ID NO: 223930 - DNA, 25 bp, SARS Virus
agttgagcttgaaaaagtcgactcc

SEQ ID NO: 223931 - DNA, 25 bp, SARS Virus
gttgagcttgacaaagtcgactccg

SEQ ID NO: 223932 - DNA, 25 bp, SARS Virus
ttgagcttgacaaagtcgactccgt

SEQ ID NO: 223933 - DNA, 25 bp, SARS Virus
tgagcttgacaaagtcgactccgtg

SEQ ID NO: 223934 - DNA, 25 bp, SARS Virus
gagcttgacaaaatcgactccgtgg

SEQ ID NO: 223935 - DNA, 25 bp, SARS Virus
agcttgacaaagacgactccgtggt

SEQ ID NO: 223936 - DNA, 25 bp, SARS Virus
gcttgacaaagtagactccgtggtt

SEQ ID NO: 223937 - DNA, 25 bp, SARS Virus
cttgacaaagtcaactccgtggttt

SEQ ID NO: 223938 - DNA, 25 bp, SARS Virus
ttgacaaagtcgactccgtggttta

SEQ ID NO: 223939 - DNA, 25 bp, SARS Virus
tgacaaagtcgaatccgtggtttaa

SEQ ID NO: 223940 - DNA, 25 bp, SARS Virus
gacaaagtcgacaccgtggtttaag

SEQ ID NO: 223941 - DNA, 25 bp, SARS Virus
acaaagtcgactacgtggtttaagg

SEQ ID NO: 223942 - DNA, 25 bp, SARS Virus
caaagtcgactcagtggtttaaggt

SEQ ID NO: 223943 - DNA, 25 bp, SARS Virus
aaagtcgactccatggtttaaggtc

SEQ ID NO: 223944 - DNA, 25 bp, SARS Virus
aagtcgactccgaggtttaaggtct

SEQ ID NO: 223945 - DNA, 25 bp, SARS Virus
agtcgactccgtagtttaaggtctc

SEQ ID NO: 223946 - DNA, 25 bp, SARS Virus
gtcgactccgtgatttaaggtctcc

SEQ ID NO: 223947 - DNA, 25 bp, SARS Virus
tcgactccgtggattaaggtctccc

SEQ ID NO: 223948 - DNA, 25 bp, SARS Virus
cgactccgtggtataaggtctccct

SEQ ID NO: 223949 - DNA, 25 bp, SARS Virus
gactccgtggttaaaggtctccctc

SEQ ID NO: 223950 - DNA, 25 bp, SARS Virus
actccgtggtttaaggtctccctct

SEQ ID NO: 223951 - DNA, 25 bp, SARS Virus
ctccgtggtttaaggtctccctctg

SEQ ID NO: 223952 - DNA, 25 bp, SARS Virus
tccgtggtttaaagtctccctctgg

SEQ ID NO: 223953 - DNA, 25 bp, SARS Virus
ccgtggtttaagatctccctctgga

SEQ ID NO: 223954 - DNA, 25 bp, SARS Virus
cgtggtttaaggactccctctggaa

SEQ ID NO: 223955 - DNA, 25 bp, SARS Virus
gtggtttaaggtatccctctggaac

SEQ ID NO: 223956 - DNA, 25 bp, SARS Virus
tggtttaaggtcaccctctggaact

SEQ ID NO: 223957 - DNA, 25 bp, SARS Virus
ggtttaaggtctacctctggaacta

SEQ ID NO: 223958 - DNA, 25 bp, SARS Virus
gtttaaggtctcactctggaactat

SEQ ID NO: 223959 - DNA, 25 bp, SARS Virus
tttaaggtctccatctggaactatt

SEQ ID NO: 223960 - DNA, 25 bp, SARS Virus
ttaaggtctcccactggaactatta

SEQ ID NO: 223961 - DNA, 25 bp, SARS Virus
taaggtctccctatggaactattag

SEQ ID NO: 223962 - DNA, 25 bp, SARS Virus
aaggtctccctcaggaactattagt

SEQ ID NO: 223963 - DNA, 25 bp, SARS Virus
aggtctccctctagaactattagta

SEQ ID NO: 223964 - DNA, 25 bp, SARS Virus
ggtctccctctgaaactattagtag

SEQ ID NO: 223965 - DNA, 25 bp, SARS Virus
gtctccctctggaactattagtagg

SEQ ID NO: 223966 - DNA, 25 bp, SARS Virus
tctccctctggaactattagtagga

SEQ ID NO: 223967 - DNA, 25 bp, SARS Virus
ctccctctggaaatattagtaggag

SEQ ID NO: 223968 - DNA, 25 bp, SARS Virus
tccctctggaacaattagtaggaga

SEQ ID NO: 223969 - DNA, 25 bp, SARS Virus
ccctctggaactattagtaggagac

SEQ ID NO: 223970 - DNA, 25 bp, SARS Virus
cctctggaactaatagtaggagaca

SEQ ID NO: 223971 - DNA, 25 bp, SARS Virus
ctctggaactataagtaggagacat

SEQ ID NO: 223972 - DNA, 25 bp, SARS Virus
tctggaactattagtaggagacatg

SEQ ID NO: 223973 - DNA, 25 bp, SARS Virus
ctggaactattaataggagacatgg

SEQ ID NO: 223974 - DNA, 25 bp, SARS Virus
tggaactattagaaggagacatggc

SEQ ID NO: 223975 - DNA, 25 bp, SARS Virus
ggaactattagtaggagacatggca

SEQ ID NO: 223976 - DNA, 25 bp, SARS Virus
gaactattagtaagagacatggcat

SEQ ID NO: 223977 - DNA, 25 bp, SARS Virus
aactattagtagaagacatggcatg

SEQ ID NO: 223978 - DNA, 25 bp, SARS Virus
actattagtaggagacatggcatga

SEQ ID NO: 223979 - DNA, 25 bp, SARS Virus
ctattagtaggaaacatggcatgag

SEQ ID NO: 223980 - DNA, 25 bp, SARS Virus
tattagtaggagacatggcatgagt

SEQ ID NO: 223981 - DNA, 25 bp, SARS Virus
attagtaggagaaatggcatgagta

SEQ ID NO: 223982 - DNA, 25 bp, SARS Virus
ttagtaggagacatggcatgagtac

SEQ ID NO: 223983 - DNA, 25 bp, SARS Virus
tagtaggagacaaggcatgagtaca

SEQ ID NO: 223984 - DNA, 25 bp, SARS Virus
agtaggagacatagcatgagtacaa

SEQ ID NO: 223985 - DNA, 25 bp, SARS Virus
gtaggagacatgacatgagtacaag

SEQ ID NO: 223986 - DNA, 25 bp, SARS Virus
taggagacatggaatgagtacaagt

SEQ ID NO: 223987 - DNA, 25 bp, SARS Virus
aggagacatggcatgagtacaagtg

SEQ ID NO: 223988 - DNA, 25 bp, SARS Virus
ggagacatggcaagagtacaagtgt

SEQ ID NO: 223989 - DNA, 25 bp, SARS Virus
gagacatggcataagtacaagtgtc

SEQ ID NO: 223990 - DNA, 25 bp, SARS Virus
agacatggcatgagtacaagtgtcc

SEQ ID NO: 223991 - DNA, 25 bp, SARS Virus
gacatggcatgaatacaagtgtcca

SEQ ID NO: 223992 - DNA, 25 bp, SARS Virus
acatggcatgagaacaagtgtccaa

SEQ ID NO: 223993 - DNA, 25 bp, SARS Virus
catggcatgagtacaagtgtccaaa

SEQ ID NO: 223994 - DNA, 25 bp, SARS Virus
atggcatgagtaaaagtgtccaaag

SEQ ID NO: 223995 - DNA, 25 bp, SARS Virus
tggcatgagtacaagtgtccaaagt

SEQ ID NO: 223996 - DNA, 25 bp, SARS Virus
ggcatgagtacaagtgtccaaagta

SEQ ID NO: 223997 - DNA, 25 bp, SARS Virus
gcatgagtacaaatgtccaaagtag

SEQ ID NO: 223998 - DNA, 25 bp, SARS Virus
catgagtacaagagtccaaagtagt

SEQ ID NO: 223999 - DNA, 25 bp, SARS Virus
atgagtacaagtatccaaagtagtt

SEQ ID NO: 224000 - DNA, 25 bp, SARS Virus
tgagtacaagtgaccaaagtagtta

SEQ ID NO: 224001 - DNA, 25 bp, SARS Virus
gagtacaagtgtacaaagtagttaa

SEQ ID NO: 224002 - DNA, 25 bp, SARS Virus
agtacaagtgtcaaaagtagttaaa

SEQ ID NO: 224003 - DNA, 25 bp, SARS Virus
gtacaagtgtccaaagtagttaaag

SEQ ID NO: 224004 - DNA, 25 bp, SARS Virus
tacaagtgtccaaagtagttaaaga

SEQ ID NO: 224005 - DNA, 25 bp, SARS Virus
acaagtgtccaaagtagttaaagaa

SEQ ID NO: 224006 - DNA, 25 bp, SARS Virus
caagtgtccaaaatagttaaagaag

SEQ ID NO: 224007 - DNA, 25 bp, SARS Virus
aagtgtccaaagaagttaaagaaga

SEQ ID NO: 224008 - DNA, 25 bp, SARS Virus
agtgtccaaagtagttaaagaagaa

SEQ ID NO: 224009 - DNA, 25 bp, SARS Virus
gtgtccaaagtaattaaagaagaag

SEQ ID NO: 224010 - DNA, 25 bp, SARS Virus
tgtccaaagtagataaagaagaagg

SEQ ID NO: 224011 - DNA, 25 bp, SARS Virus
gtccaaagtagtaaaagaagaagga

SEQ ID NO: 224012 - DNA, 25 bp, SARS Virus
tccaaagtagttaaagaagaaggag

SEQ ID NO: 224013 - DNA, 25 bp, SARS Virus
ccaaagtagttaaagaagaaggagt

SEQ ID NO: 224014 - DNA, 25 bp, SARS Virus
caaagtagttaaagaagaaggagtg

SEQ ID NO: 224015 - DNA, 25 bp, SARS Virus
aaagtagttaaaaaagaaggagtgt

SEQ ID NO: 224016 - DNA, 25 bp, SARS Virus
aagtagttaaagaagaaggagtgtg

SEQ ID NO: 224017 - DNA, 25 bp, SARS Virus
agtagttaaagaagaaggagtgtga

SEQ ID NO: 224018 - DNA, 25 bp, SARS Virus
gtagttaaagaaaaaggagtgtgag

SEQ ID NO: 224019 - DNA, 25 bp, SARS Virus
tagttaaagaagaaggagtgtgaga

SEQ ID NO: 224020 - DNA, 25 bp, SARS Virus
agttaaagaagaaggagtgtgagac

SEQ ID NO: 224021 - DNA, 25 bp, SARS Virus
gttaaagaagaaagagtgtgagacg

SEQ ID NO: 224022 - DNA, 25 bp, SARS Virus
ttaaagaagaagaagtgtgagacgt

SEQ ID NO: 224023 - DNA, 25 bp, SARS Virus
taaagaagaaggagtgtgagacgta

SEQ ID NO: 224024 - DNA, 25 bp, SARS Virus
aaagaagaaggaatgtgagacgtag

SEQ ID NO: 224025 - DNA, 25 bp, SARS Virus
aggagtggacgtcaatccaatccag

SEQ ID NO: 224026 - DNA, 25 bp, SARS Virus
ggagtggacgtacatccaatccagg

SEQ ID NO: 224027 - DNA, 25 bp, SARS Virus
gagtggacgtaactccaatccaggt

SEQ ID NO: 224028 - DNA, 25 bp, SARS Virus
agtggacgtaaacccaatccaggtt

SEQ ID NO: 224029 - DNA, 25 bp, SARS Virus
gtggacgtaaatccaatccaggttg

SEQ ID NO: 224030 - DNA, 25 bp, SARS Virus
tggacgtaaatccaatccaggttgt

SEQ ID NO: 224031 - DNA, 25 bp, SARS Virus
ggacgtaaatcccatccaggttgtt

SEQ ID NO: 224032 - DNA, 25 bp, SARS Virus
gacgtaaatccactccaggttgttg

SEQ ID NO: 224033 - DNA, 25 bp, SARS Virus
acgtaaatccaacccaggttgttgt

SEQ ID NO: 224034 - DNA, 25 bp, SARS Virus
cgtaaatccaatccaggttgttgta

SEQ ID NO: 224035 - DNA, 25 bp, SARS Virus
gtaaatccaatccaggttgttgtac

SEQ ID NO: 224036 - DNA, 25 bp, SARS Virus
taaatccaatcccggttgttgtacg

SEQ ID NO: 224037 - DNA, 25 bp, SARS Virus
aaatccaatccacgttgttgtacgt

SEQ ID NO: 224038 - DNA, 25 bp, SARS Virus
aatccaatccagcttgttgtacgtc

SEQ ID NO: 224039 - DNA, 25 bp, SARS Virus
atccaatccaggctgttgtacgtct

SEQ ID NO: 224040 - DNA, 25 bp, SARS Virus
tccaatccaggtcgttgtacgtctg

SEQ ID NO: 224041 - DNA, 25 bp, SARS Virus
ccaatccaggttcttgtacgtctgt

SEQ ID NO: 224042 - DNA, 25 bp, SARS Virus
caatccaggttgctgtacgtctgtg

SEQ ID NO: 224043 - DNA, 25 bp, SARS Virus
aatccaggttgtcgtacgtctgtga

SEQ ID NO: 224044 - DNA, 25 bp, SARS Virus
atccaggttgttctacgtctgtgaa

SEQ ID NO: 224045 - DNA, 25 bp, SARS Virus
tccaggttgttgcacgtctgtgaag

SEQ ID NO: 224046 - DNA, 25 bp, SARS Virus
ccaggttgttgtccgtctgtgaaga

SEQ ID NO: 224047 - DNA, 25 bp, SARS Virus
caggttgttgtacgtctgtgaagaa

SEQ ID NO: 224048 - DNA, 25 bp, SARS Virus
aggttgttgtacctctgtgaagaat

SEQ ID NO: 224049 - DNA, 25 bp, SARS Virus
ggttgttgtacgcctgtgaagaatc

SEQ ID NO: 224050 - DNA, 25 bp, SARS Virus
gttgttgtacgtctgtgaagaatcg

SEQ ID NO: 224051 - DNA, 25 bp, SARS Virus
ttgttgtacgtccgtgaagaatcgt

SEQ ID NO: 224052 - DNA, 25 bp, SARS Virus
tgttgtacgtctctgaagaatcgtt

SEQ ID NO: 224053 - DNA, 25 bp, SARS Virus
gttgtacgtctgcgaagaatcgttc

SEQ ID NO: 224054 - DNA, 25 bp, SARS Virus
ttgtacgtctgtcaagaatcgttct

SEQ ID NO: 224055 - DNA, 25 bp, SARS Virus
tgtacgtctgtgcagaatcgttcta

SEQ ID NO: 224056 - DNA, 25 bp, SARS Virus
gtacgtctgtgacgaatcgttctaa

SEQ ID NO: 224057 - DNA, 25 bp, SARS Virus
tacgtctgtgaacaatcgttctaat

SEQ ID NO: 224058 - DNA, 25 bp, SARS Virus
acgtctgtgaagcatcgttctaata

SEQ ID NO: 224059 - DNA, 25 bp, SARS Virus
cgtctgtgaagactcgttctaatac

SEQ ID NO: 224060 - DNA, 25 bp, SARS Virus
gtctgtgaagaaccgttctaataca

SEQ ID NO: 224061 - DNA, 25 bp, SARS Virus
tctgtgaagaatcgttctaatacag

SEQ ID NO: 224062 - DNA, 25 bp, SARS Virus
ctgtgaagaatccttctaatacagg

SEQ ID NO: 224063 - DNA, 25 bp, SARS Virus
tgtgaagaatcgctctaatacaggt

SEQ ID NO: 224064 - DNA, 25 bp, SARS Virus
gtgaagaatcgtcctaatacaggtc

SEQ ID NO: 224065 - DNA, 25 bp, SARS Virus
tgaagaatcgttctaatacaggtct

SEQ ID NO: 224066 - DNA, 25 bp, SARS Virus
gaagaatcgttccaatacaggtctt

SEQ ID NO: 224067 - DNA, 25 bp, SARS Virus
aagaatcgttctcatacaggtcttt

SEQ ID NO: 224068 - DNA, 25 bp, SARS Virus
agaatcgttctactacaggtctttc

SEQ ID NO: 224069 - DNA, 25 bp, SARS Virus
gaatcgttctaacacaggtctttcg

SEQ ID NO: 224070 - DNA, 25 bp, SARS Virus
aatcgttctaatccaggtctttcgt

SEQ ID NO: 224071 - DNA, 25 bp, SARS Virus
atcgttctaatacaggtctttcgtt

SEQ ID NO: 224072 - DNA, 25 bp, SARS Virus
tcgttctaataccggtctttcgttt

SEQ ID NO: 224073 - DNA, 25 bp, SARS Virus
cgttctaatacacgtctttcgtttg

SEQ ID NO: 224074 - DNA, 25 bp, SARS Virus
gttctaatacagctctttcgtttgt

SEQ ID NO: 224075 - DNA, 25 bp, SARS Virus
ttctaatacaggcctttcgtttgtt

SEQ ID NO: 224076 - DNA, 25 bp, SARS Virus
tctaatacaggtctttcgtttgttc

SEQ ID NO: 224077 - DNA, 25 bp, SARS Virus
ctaatacaggtccttcgtttgttct

SEQ ID NO: 224078 - DNA, 25 bp, SARS Virus
taatacaggtctctcgtttgttctg

SEQ ID NO: 224079 - DNA, 25 bp, SARS Virus
aatacaggtcttccgtttgttctgg

SEQ ID NO: 224080 - DNA, 25 bp, SARS Virus
atacaggtctttcgtttgttctggg

SEQ ID NO: 224081 - DNA, 25 bp, SARS Virus
tacaggtctttcctttgttctggga

SEQ ID NO: 224082 - DNA, 25 bp, SARS Virus
acaggtctttcgcttgttctgggag

SEQ ID NO: 224083 - DNA, 25 bp, SARS Virus
caggtctttcgtctgttctgggagg

SEQ ID NO: 224084 - DNA, 25 bp, SARS Virus
aggtctttcgttcgttctgggagga

SEQ ID NO: 224085 - DNA, 25 bp, SARS Virus
ggtctttcgtttcttctgggaggat

SEQ ID NO: 224086 - DNA, 25 bp, SARS Virus
gtctttcgtttgctctgggaggatg

SEQ ID NO: 224087 - DNA, 25 bp, SARS Virus
tctttcgtttgtcctgggaggatga

SEQ ID NO: 224088 - DNA, 25 bp, SARS Virus
ctttcgtttgttctgggaggatgac

SEQ ID NO: 224089 - DNA, 25 bp, SARS Virus
tttcgtttgttccgggaggatgaca

SEQ ID NO: 224090 - DNA, 25 bp, SARS Virus
ttcgtttgttctcggaggatgacat

SEQ ID NO: 224091 - DNA, 25 bp, SARS Virus
tcgtttgttctgcgaggatgacatt

SEQ ID NO: 224092 - DNA, 25 bp, SARS Virus
cgtttgttctggcaggatgacattc

SEQ ID NO: 224093 - DNA, 25 bp, SARS Virus
gtttgttctgggcggatgacattct

SEQ ID NO: 224094 - DNA, 25 bp, SARS Virus
tttgttctgggacgatgacattctc

SEQ ID NO: 224095 - DNA, 25 bp, SARS Virus
ttgttctgggagcatgacattctcc

SEQ ID NO: 224096 - DNA, 25 bp, SARS Virus
tgttctgggaggctgacattctccc

SEQ ID NO: 224097 - DNA, 25 bp, SARS Virus
gttctgggaggacgacattctcccg

SEQ ID NO: 224098 - DNA, 25 bp, SARS Virus
ttctgggaggatcacattctcccgg

SEQ ID NO: 224099 - DNA, 25 bp, SARS Virus
tctgggaggatgccattctcccggt

SEQ ID NO: 224100 - DNA, 25 bp, SARS Virus
ctgggaggatgacattctcccggta

SEQ ID NO: 224101 - DNA, 25 bp, SARS Virus
tgggaggatgaccttctcccggtaa

SEQ ID NO: 224102 - DNA, 25 bp, SARS Virus
gggaggatgacactctcccggtaaa

SEQ ID NO: 224103 - DNA, 25 bp, SARS Virus
ggaggatgacatcctcccggtaaat

SEQ ID NO: 224104 - DNA, 25 bp, SARS Virus
gaggatgacattctcccggtaaatc

SEQ ID NO: 224105 - DNA, 25 bp, SARS Virus
aggatgacattcccccggtaaatcg

SEQ ID NO: 224106 - DNA, 25 bp, SARS Virus
ggatgacattctcccggtaaatcga

SEQ ID NO: 224107 - DNA, 25 bp, SARS Virus
gatgacattctcccggtaaatcgaa

SEQ ID NO: 224108 - DNA, 25 bp, SARS Virus
atgacattctcccggtaaatcgaat

SEQ ID NO: 224109 - DNA, 25 bp, SARS Virus
tgacattctccccgtaaatcgaatt

SEQ ID NO: 224110 - DNA, 25 bp, SARS Virus
gacattctcccgctaaatcgaatta

SEQ ID NO: 224111 - DNA, 25 bp, SARS Virus
acattctcccggcaaatcgaattac

SEQ ID NO: 224112 - DNA, 25 bp, SARS Virus
cattctcccggtcaatcgaattaca

SEQ ID NO: 224113 - DNA, 25 bp, SARS Virus
attctcccggtacatcgaattacat

SEQ ID NO: 224114 - DNA, 25 bp, SARS Virus
ttctcccggtaactcgaattacatt

SEQ ID NO: 224115 - DNA, 25 bp, SARS Virus
tctcccggtaaaccgaattacatta

SEQ ID NO: 224116 - DNA, 25 bp, SARS Virus
ctcccggtaaatcgaattacattag

SEQ ID NO: 224117 - DNA, 25 bp, SARS Virus
tcccggtaaatccaattacattagt

SEQ ID NO: 224118 - DNA, 25 bp, SARS Virus
cccggtaaatcgcattacattagta

SEQ ID NO: 224119 - DNA, 25 bp, SARS Virus
ccggtaaatcgacttacattagtag

SEQ ID NO: 224120 - DNA, 25 bp, SARS Virus
cggtaaatcgaactacattagtagt

SEQ ID NO: 224121 - DNA, 25 bp, SARS Virus
ggtaaatcgaatcacattagtagtg

SEQ ID NO: 224122 - DNA, 25 bp, SARS Virus
gtaaatcgaattccattagtagtga

SEQ ID NO: 224123 - DNA, 25 bp, SARS Virus
taaatcgaattacattagtagtgag

SEQ ID NO: 224124 - DNA, 25 bp, SARS Virus
aaatcgaattaccttagtagtgaga

SEQ ID NO: 224125 - DNA, 25 bp, SARS Virus
aatcgaattacactagtagtgagag

SEQ ID NO: 224126 - DNA, 25 bp, SARS Virus
atcgaattacatcagtagtgagagg

SEQ ID NO: 224127 - DNA, 25 bp, SARS Virus
tcgaattacattcgtagtgagagga

SEQ ID NO: 224128 - DNA, 25 bp, SARS Virus
cgaattacattactagtgagaggaa

SEQ ID NO: 224129 - DNA, 25 bp, SARS Virus
gaattacattagcagtgagaggaaa

SEQ ID NO: 224130 - DNA, 25 bp, SARS Virus
aattacattagtcgtgagaggaaaa

SEQ ID NO: 224131 - DNA, 25 bp, SARS Virus
attacattagtactgagaggaaaac

SEQ ID NO: 224132 - DNA, 25 bp, SARS Virus
ttacattagtagcgagaggaaaacg

SEQ ID NO: 224133 - DNA, 25 bp, SARS Virus
tacattagtagtcagaggaaaacgt

SEQ ID NO: 224134 - DNA, 25 bp, SARS Virus
acattagtagtgcgaggaaaacgta

SEQ ID NO: 224135 - DNA, 25 bp, SARS Virus
cattagtagtgacaggaaaacgtac

SEQ ID NO: 224136 - DNA, 25 bp, SARS Virus
attagtagtgagcggaaaacgtacc

SEQ ID NO: 224137 - DNA, 25 bp, SARS Virus
ttagtagtgagacgaaaacgtaccg

SEQ ID NO: 224138 - DNA, 25 bp, SARS Virus
tagtagtgagagcaaaacgtaccgt

SEQ ID NO: 224139 - DNA, 25 bp, SARS Virus
agtagtgagaggcaaacgtaccgtg

SEQ ID NO: 224140 - DNA, 25 bp, SARS Virus
gtagtgagaggacaacgtaccgtgg

SEQ ID NO: 224141 - DNA, 25 bp, SARS Virus
tagtgagaggaacacgtaccgtggt

SEQ ID NO: 224142 - DNA, 25 bp, SARS Virus
agtgagaggaaaccgtaccgtggta

SEQ ID NO: 224143 - DNA, 25 bp, SARS Virus
gtgagaggaaaacgtaccgtggtaa

SEQ ID NO: 224144 - DNA, 25 bp, SARS Virus
tgagaggaaaacctaccgtggtaac

SEQ ID NO: 224145 - DNA, 25 bp, SARS Virus
gagaggaaaacgcaccgtggtaacc

SEQ ID NO: 224146 - DNA, 25 bp, SARS Virus
agaggaaaacgtcccgtggtaacca

SEQ ID NO: 224147 - DNA, 25 bp, SARS Virus
gaggaaaacgtaccgtggtaaccaa

SEQ ID NO: 224148 - DNA, 25 bp, SARS Virus
aggaaaacgtaccgtggtaaccaac

SEQ ID NO: 224149 - DNA, 25 bp, SARS Virus
ggaaaacgtaccctggtaaccaacg

SEQ ID NO: 224150 - DNA, 25 bp, SARS Virus
gaaaacgtaccgcggtaaccaacgg

SEQ ID NO: 224151 - DNA, 25 bp, SARS Virus
aaaacgtaccgtcgtaaccaacgga

SEQ ID NO: 224152 - DNA, 25 bp, SARS Virus
aaacgtaccgtgctaaccaacggaa

SEQ ID NO: 224153 - DNA, 25 bp, SARS Virus
aacgtaccgtggcaaccaacggaac

SEQ ID NO: 224154 - DNA, 25 bp, SARS Virus
acgtaccgtggtcaccaacggaaca

SEQ ID NO: 224155 - DNA, 25 bp, SARS Virus
cgtaccgtggtacccaacggaacaa

SEQ ID NO: 224156 - DNA, 25 bp, SARS Virus
gtaccgtggtaaccaacggaacaac

SEQ ID NO: 224157 - DNA, 25 bp, SARS Virus
taccgtggtaaccaacggaacaact

SEQ ID NO: 224158 - DNA, 25 bp, SARS Virus
accgtggtaacccacggaacaactc

SEQ ID NO: 224159 - DNA, 25 bp, SARS Virus
ccgtggtaaccaccggaacaactca

SEQ ID NO: 224160 - DNA, 25 bp, SARS Virus
cgtggtaaccaacggaacaactcac

SEQ ID NO: 224161 - DNA, 25 bp, SARS Virus
gtggtaaccaaccgaacaactcacg

SEQ ID NO: 224162 - DNA, 25 bp, SARS Virus
tggtaaccaacgcaacaactcacgt

SEQ ID NO: 224163 - DNA, 25 bp, SARS Virus
ggtaaccaacggcacaactcacgtg

SEQ ID NO: 224164 - DNA, 25 bp, SARS Virus
gtaaccaacggaccaactcacgtgg

SEQ ID NO: 224165 - DNA, 25 bp, SARS Virus
taaccaacggaacaactcacgtgga

SEQ ID NO: 224166 - DNA, 25 bp, SARS Virus
aaccaacggaaccactcacgtggac

SEQ ID NO: 224167 - DNA, 25 bp, SARS Virus
accaacggaacacctcacgtggacg

SEQ ID NO: 224168 - DNA, 25 bp, SARS Virus
ccaacggaacaactcacgtggacga

SEQ ID NO: 224169 - DNA, 25 bp, SARS Virus
caacggaacaacccacgtggacgat

SEQ ID NO: 224170 - DNA, 25 bp, SARS Virus
aacggaacaactcacgtggacgatg

SEQ ID NO: 224171 - DNA, 25 bp, SARS Virus
acggaacaactcccgtggacgatgt

SEQ ID NO: 224172 - DNA, 25 bp, SARS Virus
cggaacaactcacgtggacgatgtg

SEQ ID NO: 224173 - DNA, 25 bp, SARS Virus
ggaacaactcacctggacgatgtgg

SEQ ID NO: 224174 - DNA, 25 bp, SARS Virus
gaacaactcacgcggacgatgtggt

SEQ ID NO: 224175 - DNA, 25 bp, SARS Virus
aacaactcacgtcgacgatgtggtg

SEQ ID NO: 224176 - DNA, 25 bp, SARS Virus
acaactcacgtgcacgatgtggtgg

SEQ ID NO: 224177 - DNA, 25 bp, SARS Virus
caactcacgtggccgatgtggtggt

SEQ ID NO: 224178 - DNA, 25 bp, SARS Virus
aactcacgtggacgatgtggtggtg

SEQ ID NO: 224179 - DNA, 25 bp, SARS Virus
actcacgtggaccatgtggtggtgg

SEQ ID NO: 224180 - DNA, 25 bp, SARS Virus
ctcacgtggacgctgtggtggtggt

SEQ ID NO: 224181 - DNA, 25 bp, SARS Virus
tcacgtggacgacgtggtggtggta

SEQ ID NO: 224182 - DNA, 25 bp, SARS Virus
cacgtggacgatctggtggtggtac

SEQ ID NO: 224183 - DNA, 25 bp, SARS Virus
acgtggacgatgcggtggtggtaca

SEQ ID NO: 224184 - DNA, 25 bp, SARS Virus
cgtggacgatgtcgtggtggtacaa

SEQ ID NO: 224185 - DNA, 25 bp, SARS Virus
gtggacgatgtgctggtggtacaaa

SEQ ID NO: 224186 - DNA, 25 bp, SARS Virus
tggacgatgtggcggtggtacaaag

SEQ ID NO: 224187 - DNA, 25 bp, SARS Virus
ggacgatgtggtcgtggtacaaagt

SEQ ID NO: 224188 - DNA, 25 bp, SARS Virus
gacgatgtggtgctggtacaaagtc

SEQ ID NO: 224189 - DNA, 25 bp, SARS Virus
acgatgtggtggcggtacaaagtcc

SEQ ID NO: 224190 - DNA, 25 bp, SARS Virus
cgatgtggtggtcgtacaaagtcca

SEQ ID NO: 224191 - DNA, 25 bp, SARS Virus
gatgtggtggtgctacaaagtccac

SEQ ID NO: 224192 - DNA, 25 bp, SARS Virus
atgtggtggtggcacaaagtccaca

SEQ ID NO: 224193 - DNA, 25 bp, SARS Virus
tgtggtggtggtccaaagtccacat

SEQ ID NO: 224194 - DNA, 25 bp, SARS Virus
gtggtggtggtacaaagtccacata

SEQ ID NO: 224195 - DNA, 25 bp, SARS Virus
tggtggtggtaccaagtccacatac

SEQ ID NO: 224196 - DNA, 25 bp, SARS Virus
ggtggtggtacacagtccacataca

SEQ ID NO: 224197 - DNA, 25 bp, SARS Virus
gtggtggtacaacgtccacatacaa

SEQ ID NO: 224198 - DNA, 25 bp, SARS Virus
tggtggtacaaactccacatacaat

SEQ ID NO: 224199 - DNA, 25 bp, SARS Virus
ggtggtacaaagcccacatacaatc

SEQ ID NO: 224200 - DNA, 25 bp, SARS Virus
gtggtacaaagtccacatacaatcg

SEQ ID NO: 224201 - DNA, 25 bp, SARS Virus
tggtacaaagtccacatacaatcgt

SEQ ID NO: 224202 - DNA, 25 bp, SARS Virus
ggtacaaagtccccatacaatcgtc

SEQ ID NO: 224203 - DNA, 25 bp, SARS Virus
gtacaaagtccacatacaatcgtcg

SEQ ID NO: 224204 - DNA, 25 bp, SARS Virus
tacaaagtccacctacaatcgtcgt

SEQ ID NO: 224205 - DNA, 25 bp, SARS Virus
acaaagtccacacacaatcgtcgta

SEQ ID NO: 224206 - DNA, 25 bp, SARS Virus
caaagtccacatccaatcgtcgtaa

SEQ ID NO: 224207 - DNA, 25 bp, SARS Virus
aaagtccacatacaatcgtcgtaaa

SEQ ID NO: 224208 - DNA, 25 bp, SARS Virus
aagtccacataccatcgtcgtaaat

SEQ ID NO: 224209 - DNA, 25 bp, SARS Virus
agtccacatacactcgtcgtaaatg

SEQ ID NO: 224210 - DNA, 25 bp, SARS Virus
gtccacatacaaccgtcgtaaatgt

SEQ ID NO: 224211 - DNA, 25 bp, SARS Virus
tccacatacaatcgtcgtaaatgtt

SEQ ID NO: 224212 - DNA, 25 bp, SARS Virus
ccacatacaatcctcgtaaatgtta

SEQ ID NO: 224213 - DNA, 25 bp, SARS Virus
cacatacaatcgccgtaaatgttag

SEQ ID NO: 224214 - DNA, 25 bp, SARS Virus
acatacaatcgtcgtaaatgttagt

SEQ ID NO: 224215 - DNA, 25 bp, SARS Virus
catacaatcgtcctaaatgttagtg

SEQ ID NO: 224216 - DNA, 25 bp, SARS Virus
atacaatcgtcgcaaatgttagtgg

SEQ ID NO: 224217 - DNA, 25 bp, SARS Virus
tacaatcgtcgtcaatgttagtggt

SEQ ID NO: 224218 - DNA, 25 bp, SARS Virus
acaatcgtcgtacatgttagtggta

SEQ ID NO: 224219 - DNA, 25 bp, SARS Virus
caatcgtcgtaactgttagtggtat

SEQ ID NO: 224220 - DNA, 25 bp, SARS Virus
aatcgtcgtaaacgttagtggtatc

SEQ ID NO: 224221 - DNA, 25 bp, SARS Virus
atcgtcgtaaatcttagtggtatcc

SEQ ID NO: 224222 - DNA, 25 bp, SARS Virus
tcgtcgtaaatgctagtggtatcct

SEQ ID NO: 224223 - DNA, 25 bp, SARS Virus
cgtcgtaaatgtcagtggtatccta

SEQ ID NO: 224224 - DNA, 25 bp, SARS Virus
gtcgtaaatgttcgtggtatcctaa

SEQ ID NO: 224225 - DNA, 25 bp, SARS Virus
tcgtaaatgttactggtatcctaat

SEQ ID NO: 224226 - DNA, 25 bp, SARS Virus
cgtaaatgttagcggtatcctaatc

SEQ ID NO: 224227 - DNA, 25 bp, SARS Virus
gtaaatgttagtcgtatcctaatcg

SEQ ID NO: 224228 - DNA, 25 bp, SARS Virus
taaatgttagtgctatcctaatcgt

SEQ ID NO: 224229 - DNA, 25 bp, SARS Virus
aaatgttagtggcatcctaatcgtg

SEQ ID NO: 224230 - DNA, 25 bp, SARS Virus
aatgttagtggtctcctaatcgtga

SEQ ID NO: 224231 - DNA, 25 bp, SARS Virus
atgttagtggtaccctaatcgtgaa

SEQ ID NO: 224232 - DNA, 25 bp, SARS Virus
tgttagtggtatcctaatcgtgaaa

SEQ ID NO: 224233 - DNA, 25 bp, SARS Virus
gttagtggtatcctaatcgtgaaac

SEQ ID NO: 224234 - DNA, 25 bp, SARS Virus
ttagtggtatcccaatcgtgaaaca

SEQ ID NO: 224235 - DNA, 25 bp, SARS Virus
tagtggtatcctcatcgtgaaacac

SEQ ID NO: 224236 - DNA, 25 bp, SARS Virus
agtggtatcctactcgtgaaacacg

SEQ ID NO: 224237 - DNA, 25 bp, SARS Virus
gtggtatcctaaccgtgaaacacgg

SEQ ID NO: 224238 - DNA, 25 bp, SARS Virus
tggtatcctaatcgtgaaacacgga

SEQ ID NO: 224239 - DNA, 25 bp, SARS Virus
ggtatcctaatcctgaaacacggag

SEQ ID NO: 224240 - DNA, 25 bp, SARS Virus
gtatcctaatcgcgaaacacggagg

SEQ ID NO: 224241 - DNA, 25 bp, SARS Virus
tatcctaatcgtcaaacacggagga

SEQ ID NO: 224242 - DNA, 25 bp, SARS Virus
atcctaatcgtgcaacacggaggaa

SEQ ID NO: 224243 - DNA, 25 bp, SARS Virus
tcctaatcgtgacacacggaggaat

SEQ ID NO: 224244 - DNA, 25 bp, SARS Virus
cctaatcgtgaaccacggaggaatt

SEQ ID NO: 224245 - DNA, 25 bp, SARS Virus
ctaatcgtgaaacacggaggaattg

SEQ ID NO: 224246 - DNA, 25 bp, SARS Virus
taatcgtgaaacccggaggaattgc

SEQ ID NO: 224247 - DNA, 25 bp, SARS Virus
aatcgtgaaacacggaggaattgct

SEQ ID NO: 224248 - DNA, 25 bp, SARS Virus
atcgtgaaacaccgaggaattgcta

SEQ ID NO: 224249 - DNA, 25 bp, SARS Virus
tcgtgaaacacgcaggaattgctac

SEQ ID NO: 224250 - DNA, 25 bp, SARS Virus
cgtgaaacacggcggaattgctaca

SEQ ID NO: 224251 - DNA, 25 bp, SARS Virus
gtgaaacacggacgaattgctacag

SEQ ID NO: 224252 - DNA, 25 bp, SARS Virus
tgaaacacggagcaattgctacagt

SEQ ID NO: 224253 - DNA, 25 bp, SARS Virus
gaaacacggaggcattgctacagtt

SEQ ID NO: 224254 - DNA, 25 bp, SARS Virus
aaacacggaggacttgctacagttg

SEQ ID NO: 224255 - DNA, 25 bp, SARS Virus
aacacggaggaactgctacagttgt

SEQ ID NO: 224256 - DNA, 25 bp, SARS Virus
acacggaggaatcgctacagttgtg

SEQ ID NO: 224257 - DNA, 25 bp, SARS Virus
cacggaggaattcctacagttgtgt

SEQ ID NO: 224258 - DNA, 25 bp, SARS Virus
acggaggaattgctacagttgtgta

SEQ ID NO: 224259 - DNA, 25 bp, SARS Virus
cggaggaattgccacagttgtgtaa

SEQ ID NO: 224260 - DNA, 25 bp, SARS Virus
ggaggaattgctccagttgtgtaaa

SEQ ID NO: 224261 - DNA, 25 bp, SARS Virus
gaggaattgctacagttgtgtaaat

SEQ ID NO: 224262 - DNA, 25 bp, SARS Virus
aggaattgctaccgttgtgtaaatt

SEQ ID NO: 224263 - DNA, 25 bp, SARS Virus
ggaattgctacacttgtgtaaatta

SEQ ID NO: 224264 - DNA, 25 bp, SARS Virus
gaattgctacagctgtgtaaattac

SEQ ID NO: 224265 - DNA, 25 bp, SARS Virus
aattgctacagtcgtgtaaattacc

SEQ ID NO: 224266 - DNA, 25 bp, SARS Virus
attgctacagttctgtaaattaccg

SEQ ID NO: 224267 - DNA, 25 bp, SARS Virus
ttgctacagttgcgtaaattaccgt

SEQ ID NO: 224268 - DNA, 25 bp, SARS Virus
tgctacagttgtctaaattaccgtt

SEQ ID NO: 224269 - DNA, 25 bp, SARS Virus
gctacagttgtgcaaattaccgttg

SEQ ID NO: 224270 - DNA, 25 bp, SARS Virus
ctacagttgtgtcaattaccgttgt

SEQ ID NO: 224271 - DNA, 25 bp, SARS Virus
tacagttgtgtacattaccgttgta

SEQ ID NO: 224272 - DNA, 25 bp, SARS Virus
acagttgtgtaacttaccgttgtaa

SEQ ID NO: 224273 - DNA, 25 bp, SARS Virus
cagttgtgtaaactaccgttgtaac

SEQ ID NO: 224274 - DNA, 25 bp, SARS Virus
agttgtgtaaatcaccgttgtaaca

SEQ ID NO: 224275 - DNA, 25 bp, SARS Virus
gttgtgtaaattcccgttgtaacag

SEQ ID NO: 224276 - DNA, 25 bp, SARS Virus
ttgtgtaaattaccgttgtaacagt

SEQ ID NO: 224277 - DNA, 25 bp, SARS Virus
tgtgtaaattaccgttgtaacagtc

SEQ ID NO: 224278 - DNA, 25 bp, SARS Virus
gtgtaaattacccttgtaacagtca

SEQ ID NO: 224279 - DNA, 25 bp, SARS Virus
tgtaaattaccgctgtaacagtcat

SEQ ID NO: 224280 - DNA, 25 bp, SARS Virus
gtaaattaccgtcgtaacagtcatt

SEQ ID NO: 224281 - DNA, 25 bp, SARS Virus
taaattaccgttctaacagtcattc

SEQ ID NO: 224282 - DNA, 25 bp, SARS Virus
aaattaccgttgcaacagtcattca

SEQ ID NO: 224283 - DNA, 25 bp, SARS Virus
aattaccgttgtcacagtcattcaa

SEQ ID NO: 224284 - DNA, 25 bp, SARS Virus
attaccgttgtaccagtcattcaaa

SEQ ID NO: 224285 - DNA, 25 bp, SARS Virus
ttaccgttgtaacagtcattcaaaa

SEQ ID NO: 224286 - DNA, 25 bp, SARS Virus
taccgttgtaaccgtcattcaaaat

SEQ ID NO: 224287 - DNA, 25 bp, SARS Virus
accgttgtaacactcattcaaaatt

SEQ ID NO: 224288 - DNA, 25 bp, SARS Virus
ccgttgtaacagccattcaaaattt

SEQ ID NO: 224289 - DNA, 25 bp, SARS Virus
cgttgtaacagtcattcaaaattta

SEQ ID NO: 224290 - DNA, 25 bp, SARS Virus
gttgtaacagtccttcaaaatttat

SEQ ID NO: 224291 - DNA, 25 bp, SARS Virus
ttgtaacagtcactcaaaatttatt

SEQ ID NO: 224292 - DNA, 25 bp, SARS Virus
tgtaacagtcatccaaaatttattg

SEQ ID NO: 224293 - DNA, 25 bp, SARS Virus
gtaacagtcattcaaaatttattgg

SEQ ID NO: 224294 - DNA, 25 bp, SARS Virus
taacagtcattccaaatttattggt

SEQ ID NO: 224295 - DNA, 25 bp, SARS Virus
aacagtcattcacaatttattggtc

SEQ ID NO: 224296 - DNA, 25 bp, SARS Virus
acagtcattcaacatttattggtca

SEQ ID NO: 224297 - DNA, 25 bp, SARS Virus
cagtcattcaaactttattggtcat

SEQ ID NO: 224298 - DNA, 25 bp, SARS Virus
agtcattcaaaacttattggtcatt

SEQ ID NO: 224299 - DNA, 25 bp, SARS Virus
gtcattcaaaatctattggtcattt

SEQ ID NO: 224300 - DNA, 25 bp, SARS Virus
tcattcaaaattcattggtcatttg

SEQ ID NO: 224301 - DNA, 25 bp, SARS Virus
cattcaaaatttcttggtcatttga

SEQ ID NO: 224302 - DNA, 25 bp, SARS Virus
attcaaaatttactggtcatttgac

SEQ ID NO: 224303 - DNA, 25 bp, SARS Virus
ttcaaaatttatcggtcatttgact

SEQ ID NO: 224304 - DNA, 25 bp, SARS Virus
tcaaaatttattcgtcatttgacta

SEQ ID NO: 224305 - DNA, 25 bp, SARS Virus
caaaatttattgctcatttgactaa

SEQ ID NO: 224306 - DNA, 25 bp, SARS Virus
aaaatttattggccatttgactaat

SEQ ID NO: 224307 - DNA, 25 bp, SARS Virus
aaatttattggtcatttgactaatt

SEQ ID NO: 224308 - DNA, 25 bp, SARS Virus
aatttattggtcctttgactaattg

SEQ ID NO: 224309 - DNA, 25 bp, SARS Virus
atttattggtcacttgactaattga

SEQ ID NO: 224310 - DNA, 25 bp, SARS Virus
tttattggtcatctgactaattgac

SEQ ID NO: 224311 - DNA, 25 bp, SARS Virus
ttattggtcattcgactaattgacc

SEQ ID NO: 224312 - DNA, 25 bp, SARS Virus
tattggtcatttcactaattgacca

SEQ ID NO: 224313 - DNA, 25 bp, SARS Virus
attggtcatttgcctaattgaccaa

SEQ ID NO: 224314 - DNA, 25 bp, SARS Virus
ttggtcatttgactaattgaccaag

SEQ ID NO: 224315 - DNA, 25 bp, SARS Virus
tggtcatttgaccaattgaccaaga

SEQ ID NO: 224316 - DNA, 25 bp, SARS Virus
ggtcatttgactcattgaccaagaa

SEQ ID NO: 224317 - DNA, 25 bp, SARS Virus
gtcatttgactacttgaccaagaag

SEQ ID NO: 224318 - DNA, 25 bp, SARS Virus
tcatttgactaactgaccaagaagt

SEQ ID NO: 224319 - DNA, 25 bp, SARS Virus
catttgactaatcgaccaagaagtc

SEQ ID NO: 224320 - DNA, 25 bp, SARS Virus
atttgactaattcaccaagaagtcc

SEQ ID NO: 224321 - DNA, 25 bp, SARS Virus
tttgactaattgcccaagaagtcca

SEQ ID NO: 224322 - DNA, 25 bp, SARS Virus
ttgactaattgaccaagaagtccac

SEQ ID NO: 224323 - DNA, 25 bp, SARS Virus
tgactaattgaccaagaagtccaca

SEQ ID NO: 224324 - DNA, 25 bp, SARS Virus
gactaattgacccagaagtccacat

SEQ ID NO: 224325 - DNA, 25 bp, SARS Virus
actaattgaccacgaagtccacatc

SEQ ID NO: 224326 - DNA, 25 bp, SARS Virus
ctaattgaccaacaagtccacatcc

SEQ ID NO: 224327 - DNA, 25 bp, SARS Virus
taattgaccaagcagtccacatcca

SEQ ID NO: 224328 - DNA, 25 bp, SARS Virus
aattgaccaagacgtccacatccaa

SEQ ID NO: 224329 - DNA, 25 bp, SARS Virus
attgaccaagaactccacatccaag

SEQ ID NO: 224330 - DNA, 25 bp, SARS Virus
ttgaccaagaagcccacatccaaga

SEQ ID NO: 224331 - DNA, 25 bp, SARS Virus
tgaccaagaagtccacatccaagac

SEQ ID NO: 224332 - DNA, 25 bp, SARS Virus
gaccaagaagtccacatccaagacc

SEQ ID NO: 224333 - DNA, 25 bp, SARS Virus
accaagaagtccccatccaagacca

SEQ ID NO: 224334 - DNA, 25 bp, SARS Virus
ccaagaagtccacatccaagaccaa

SEQ ID NO: 224335 - DNA, 25 bp, SARS Virus
caagaagtccacctccaagaccaag

SEQ ID NO: 224336 - DNA, 25 bp, SARS Virus
aagaagtccacacccaagaccaaga

SEQ ID NO: 224337 - DNA, 25 bp, SARS Virus
agaagtccacatccaagaccaagac

SEQ ID NO: 224338 - DNA, 25 bp, SARS Virus
gaagtccacatccaagaccaagacc

SEQ ID NO: 224339 - DNA, 25 bp, SARS Virus
aagtccacatcccagaccaagaccg

SEQ ID NO: 224340 - DNA, 25 bp, SARS Virus
agtccacatccacgaccaagaccga

SEQ ID NO: 224341 - DNA, 25 bp, SARS Virus
gtccacatccaacaccaagaccgag

SEQ ID NO: 224342 - DNA, 25 bp, SARS Virus
tccacatccaagcccaagaccgagt

SEQ ID NO: 224343 - DNA, 25 bp, SARS Virus
ccacatccaagaccaagaccgagtt

SEQ ID NO: 224344 - DNA, 25 bp, SARS Virus
cacatccaagaccaagaccgagtta

SEQ ID NO: 224345 - DNA, 25 bp, SARS Virus
acatccaagacccagaccgagttag

SEQ ID NO: 224346 - DNA, 25 bp, SARS Virus
catccaagaccacgaccgagttaga

SEQ ID NO: 224347 - DNA, 25 bp, SARS Virus
atccaagaccaacaccgagttagag

SEQ ID NO: 224348 - DNA, 25 bp, SARS Virus
tccaagaccaagcccgagttagaga

SEQ ID NO: 224349 - DNA, 25 bp, SARS Virus
ccaagaccaagaccgagttagagac

SEQ ID NO: 224350 - DNA, 25 bp, SARS Virus
caagaccaagaccgagttagagact

SEQ ID NO: 224351 - DNA, 25 bp, SARS Virus
aagaccaagacccagttagagacta

SEQ ID NO: 224352 - DNA, 25 bp, SARS Virus
agaccaagaccgcgttagagactaa

SEQ ID NO: 224353 - DNA, 25 bp, SARS Virus
gaccaagaccgacttagagactaac

SEQ ID NO: 224354 - DNA, 25 bp, SARS Virus
accaagaccgagctagagactaacg

SEQ ID NO: 224355 - DNA, 25 bp, SARS Virus
ccaagaccgagtcagagactaacga

SEQ ID NO: 224356 - DNA, 25 bp, SARS Virus
caagaccgagttcgagactaacgag

SEQ ID NO: 224357 - DNA, 25 bp, SARS Virus
aagaccgagttacagactaacgagt

SEQ ID NO: 224358 - DNA, 25 bp, SARS Virus
agaccgagttagcgactaacgagtc

SEQ ID NO: 224359 - DNA, 25 bp, SARS Virus
gaccgagttagacactaacgagtca

SEQ ID NO: 224360 - DNA, 25 bp, SARS Virus
accgagttagagcctaacgagtcat

SEQ ID NO: 224361 - DNA, 25 bp, SARS Virus
ccgagttagagactaacgagtcatc

SEQ ID NO: 224362 - DNA, 25 bp, SARS Virus
cgagttagagaccaacgagtcatca

SEQ ID NO: 224363 - DNA, 25 bp, SARS Virus
gagttagagactcacgagtcatcat

SEQ ID NO: 224364 - DNA, 25 bp, SARS Virus
agttagagactaccgagtcatcata

SEQ ID NO: 224365 - DNA, 25 bp, SARS Virus
gttagagactaacgagtcatcatag

SEQ ID NO: 224366 - DNA, 25 bp, SARS Virus
ttagagactaaccagtcatcatagt

SEQ ID NO: 224367 - DNA, 25 bp, SARS Virus
tagagactaacgcgtcatcatagta

SEQ ID NO: 224368 - DNA, 25 bp, SARS Virus
agagactaacgactcatcatagtag

SEQ ID NO: 224369 - DNA, 25 bp, SARS Virus
gagactaacgagccatcatagtagg

SEQ ID NO: 224370 - DNA, 25 bp, SARS Virus
agactaacgagtcatcatagtaggt

SEQ ID NO: 224371 - DNA, 25 bp, SARS Virus
gactaacgagtcctcatagtaggtc

SEQ ID NO: 224372 - DNA, 25 bp, SARS Virus
actaacgagtcaccatagtaggtcg

SEQ ID NO: 224373 - DNA, 25 bp, SARS Virus
ctaacgagtcatcatagtaggtcgg

SEQ ID NO: 224374 - DNA, 25 bp, SARS Virus
taacgagtcatcctagtaggtcggt

SEQ ID NO: 224375 - DNA, 25 bp, SARS Virus
aacgagtcatcacagtaggtcggtc

SEQ ID NO: 224376 - DNA, 25 bp, SARS Virus
acgagtcatcatcgtaggtcggtca

SEQ ID NO: 224377 - DNA, 25 bp, SARS Virus
cgagtcatcatactaggtcggtcag

SEQ ID NO: 224378 - DNA, 25 bp, SARS Virus
gagtcatcatagcaggtcggtcaga

SEQ ID NO: 224379 - DNA, 25 bp, SARS Virus
agtcatcatagtcggtcggtcagaa

SEQ ID NO: 224380 - DNA, 25 bp, SARS Virus
gtcatcatagtacgtcggtcagaag

SEQ ID NO: 224381 - DNA, 25 bp, SARS Virus
tcatcatagtagctcggtcagaagg

SEQ ID NO: 224382 - DNA, 25 bp, SARS Virus
catcatagtaggccggtcagaagga

SEQ ID NO: 224383 - DNA, 25 bp, SARS Virus
atcatagtaggtcggtcagaaggag

SEQ ID NO: 224384 - DNA, 25 bp, SARS Virus
tcatagtaggtccgtcagaaggaga

SEQ ID NO: 224385 - DNA, 25 bp, SARS Virus
catagtaggtcgctcagaaggagaa

SEQ ID NO: 224386 - DNA, 25 bp, SARS Virus
atagtaggtcggccagaaggagaag

SEQ ID NO: 224387 - DNA, 25 bp, SARS Virus
tagtaggtcggtcagaaggagaaga

SEQ ID NO: 224388 - DNA, 25 bp, SARS Virus
agtaggtcggtccgaaggagaagaa

SEQ ID NO: 224389 - DNA, 25 bp, SARS Virus
gtaggtcggtcacaaggagaagaag

SEQ ID NO: 224390 - DNA, 25 bp, SARS Virus
taggtcggtcagcaggagaagaaga

SEQ ID NO: 224391 - DNA, 25 bp, SARS Virus
aggtcggtcagacggagaagaagaa

SEQ ID NO: 224392 - DNA, 25 bp, SARS Virus
ggtcggtcagaacgagaagaagaag

SEQ ID NO: 224393 - DNA, 25 bp, SARS Virus
gtcggtcagaagcagaagaagaagg

SEQ ID NO: 224394 - DNA, 25 bp, SARS Virus
tcggtcagaaggcgaagaagaagga

SEQ ID NO: 224395 - DNA, 25 bp, SARS Virus
cggtcagaaggacaagaagaaggag

SEQ ID NO: 224396 - DNA, 25 bp, SARS Virus
ggtcagaaggagcagaagaaggagt

SEQ ID NO: 224397 - DNA, 25 bp, SARS Virus
gtcagaaggagacgaagaaggagtt

SEQ ID NO: 224398 - DNA, 25 bp, SARS Virus
tcagaaggagaacaagaaggagttg

SEQ ID NO: 224399 - DNA, 25 bp, SARS Virus
cagaaggagaagcagaaggagttga

SEQ ID NO: 224400 - DNA, 25 bp, SARS Virus
agaaggagaagacgaaggagttgag

SEQ ID NO: 224401 - DNA, 25 bp, SARS Virus
gaaggagaagaacaaggagttgagc

SEQ ID NO: 224402 - DNA, 25 bp, SARS Virus
aaggagaagaagcaggagttgagct

SEQ ID NO: 224403 - DNA, 25 bp, SARS Virus
aggagaagaagacggagttgagctt

SEQ ID NO: 224404 - DNA, 25 bp, SARS Virus
ggagaagaagaacgagttgagcttg

SEQ ID NO: 224405 - DNA, 25 bp, SARS Virus
gagaagaagaagcagttgagcttga

SEQ ID NO: 224406 - DNA, 25 bp, SARS Virus
agaagaagaaggcgttgagcttgac

SEQ ID NO: 224407 - DNA, 25 bp, SARS Virus
gaagaagaaggacttgagcttgaca

SEQ ID NO: 224408 - DNA, 25 bp, SARS Virus
aagaagaaggagctgagcttgacaa

SEQ ID NO: 224409 - DNA, 25 bp, SARS Virus
agaagaaggagtcgagcttgacaaa

SEQ ID NO: 224410 - DNA, 25 bp, SARS Virus
gaagaaggagttcagcttgacaaag

SEQ ID NO: 224411 - DNA, 25 bp, SARS Virus
aagaaggagttgcgcttgacaaagt

SEQ ID NO: 224412 - DNA, 25 bp, SARS Virus
agaaggagttgaccttgacaaagtc

SEQ ID NO: 224413 - DNA, 25 bp, SARS Virus
gaaggagttgagcttgacaaagtcg

SEQ ID NO: 224414 - DNA, 25 bp, SARS Virus
aaggagttgagcctgacaaagtcga

SEQ ID NO: 224415 - DNA, 25 bp, SARS Virus
aggagttgagctcgacaaagtcgac

SEQ ID NO: 224416 - DNA, 25 bp, SARS Virus
ggagttgagcttcacaaagtcgact

SEQ ID NO: 224417 - DNA, 25 bp, SARS Virus
gagttgagcttgccaaagtcgactc

SEQ ID NO: 224418 - DNA, 25 bp, SARS Virus
agttgagcttgacaaagtcgactcc

SEQ ID NO: 224419 - DNA, 25 bp, SARS Virus
gttgagcttgaccaagtcgactccg

SEQ ID NO: 224420 - DNA, 25 bp, SARS Virus
ttgagcttgacacagtcgactccgt

SEQ ID NO: 224421 - DNA, 25 bp, SARS Virus
tgagcttgacaacgtcgactccgtg

SEQ ID NO: 224422 - DNA, 25 bp, SARS Virus
gagcttgacaaactcgactccgtgg

SEQ ID NO: 224423 - DNA, 25 bp, SARS Virus
agcttgacaaagccgactccgtggt

SEQ ID NO: 224424 - DNA, 25 bp, SARS Virus
gcttgacaaagtcgactccgtggtt

SEQ ID NO: 224425 - DNA, 25 bp, SARS Virus
cttgacaaagtccactccgtggttt

SEQ ID NO: 224426 - DNA, 25 bp, SARS Virus
ttgacaaagtcgcctccgtggttta

SEQ ID NO: 224427 - DNA, 25 bp, SARS Virus
tgacaaagtcgactccgtggtttaa

SEQ ID NO: 224428 - DNA, 25 bp, SARS Virus
gacaaagtcgaccccgtggtttaag

SEQ ID NO: 224429 - DNA, 25 bp, SARS Virus
acaaagtcgactccgtggtttaagg

SEQ ID NO: 224430 - DNA, 25 bp, SARS Virus
caaagtcgactccgtggtttaaggt

SEQ ID NO: 224431 - DNA, 25 bp, SARS Virus
aaagtcgactccctggtttaaggtc

SEQ ID NO: 224432 - DNA, 25 bp, SARS Virus
aagtcgactccgcggtttaaggtct

SEQ ID NO: 224433 - DNA, 25 bp, SARS Virus
agtcgactccgtcgtttaaggtctc

SEQ ID NO: 224434 - DNA, 25 bp, SARS Virus
gtcgactccgtgctttaaggtctcc

SEQ ID NO: 224435 - DNA, 25 bp, SARS Virus
tcgactccgtggcttaaggtctccc

SEQ ID NO: 224436 - DNA, 25 bp, SARS Virus
cgactccgtggtctaaggtctccct

SEQ ID NO: 224437 - DNA, 25 bp, SARS Virus
gactccgtggttcaaggtctccctc

SEQ ID NO: 224438 - DNA, 25 bp, SARS Virus
actccgtggtttcaggtctccctct

SEQ ID NO: 224439 - DNA, 25 bp, SARS Virus
ctccgtggtttacggtctccctctg

SEQ ID NO: 224440 - DNA, 25 bp, SARS Virus
tccgtggtttaacgtctccctctgg

SEQ ID NO: 224441 - DNA, 25 bp, SARS Virus
ccgtggtttaagctctccctctgga

SEQ ID NO: 224442 - DNA, 25 bp, SARS Virus
cgtggtttaaggcctccctctggaa

SEQ ID NO: 224443 - DNA, 25 bp, SARS Virus
gtggtttaaggtctccctctggaac

SEQ ID NO: 224444 - DNA, 25 bp, SARS Virus
tggtttaaggtccccctctggaact

SEQ ID NO: 224445 - DNA, 25 bp, SARS Virus
ggtttaaggtctccctctggaacta

SEQ ID NO: 224446 - DNA, 25 bp, SARS Virus
gtttaaggtctccctctggaactat

SEQ ID NO: 224447 - DNA, 25 bp, SARS Virus
tttaaggtctccctctggaactatt

SEQ ID NO: 224448 - DNA, 25 bp, SARS Virus
ttaaggtctccccctggaactatta

SEQ ID NO: 224449 - DNA, 25 bp, SARS Virus
taaggtctccctctggaactattag

SEQ ID NO: 224450 - DNA, 25 bp, SARS Virus
aaggtctccctccggaactattagt

SEQ ID NO: 224451 - DNA, 25 bp, SARS Virus
aggtctccctctcgaactattagta

SEQ ID NO: 224452 - DNA, 25 bp, SARS Virus
ggtctccctctgcaactattagtag

SEQ ID NO: 224453 - DNA, 25 bp, SARS Virus
gtctccctctggcactattagtagg

SEQ ID NO: 224454 - DNA, 25 bp, SARS Virus
tctccctctggacctattagtagga

SEQ ID NO: 224455 - DNA, 25 bp, SARS Virus
ctccctctggaactattagtaggag

SEQ ID NO: 224456 - DNA, 25 bp, SARS Virus
tccctctggaaccattagtaggaga

SEQ ID NO: 224457 - DNA, 25 bp, SARS Virus
ccctctggaactcttagtaggagac

SEQ ID NO: 224458 - DNA, 25 bp, SARS Virus
cctctggaactactagtaggagaca

SEQ ID NO: 224459 - DNA, 25 bp, SARS Virus
ctctggaactatcagtaggagacat

SEQ ID NO: 224460 - DNA, 25 bp, SARS Virus
tctggaactattcgtaggagacatg

SEQ ID NO: 224461 - DNA, 25 bp, SARS Virus
ctggaactattactaggagacatgg

SEQ ID NO: 224462 - DNA, 25 bp, SARS Virus
tggaactattagcaggagacatggc

SEQ ID NO: 224463 - DNA, 25 bp, SARS Virus
ggaactattagtcggagacatggca

SEQ ID NO: 224464 - DNA, 25 bp, SARS Virus
gaactattagtacgagacatggcat

SEQ ID NO: 224465 - DNA, 25 bp, SARS Virus
aactattagtagcagacatggcatg

SEQ ID NO: 224466 - DNA, 25 bp, SARS Virus
actattagtaggcgacatggcatga

SEQ ID NO: 224467 - DNA, 25 bp, SARS Virus
ctattagtaggacacatggcatgag

SEQ ID NO: 224468 - DNA, 25 bp, SARS Virus
tattagtaggagccatggcatgagt

SEQ ID NO: 224469 - DNA, 25 bp, SARS Virus
attagtaggagacatggcatgagta

SEQ ID NO: 224470 - DNA, 25 bp, SARS Virus
ttagtaggagacctggcatgagtac

SEQ ID NO: 224471 - DNA, 25 bp, SARS Virus
tagtaggagacacggcatgagtaca

SEQ ID NO: 224472 - DNA, 25 bp, SARS Virus
agtaggagacatcgcatgagtacaa

SEQ ID NO: 224473 - DNA, 25 bp, SARS Virus
gtaggagacatgccatgagtacaag

SEQ ID NO: 224474 - DNA, 25 bp, SARS Virus
taggagacatggcatgagtacaagt

SEQ ID NO: 224475 - DNA, 25 bp, SARS Virus
aggagacatggcctgagtacaagtg

SEQ ID NO: 224476 - DNA, 25 bp, SARS Virus
ggagacatggcacgagtacaagtgt

SEQ ID NO: 224477 - DNA, 25 bp, SARS Virus
gagacatggcatcagtacaagtgtc

SEQ ID NO: 224478 - DNA, 25 bp, SARS Virus
agacatggcatgcgtacaagtgtcc

SEQ ID NO: 224479 - DNA, 25 bp, SARS Virus
gacatggcatgactacaagtgtcca

SEQ ID NO: 224480 - DNA, 25 bp, SARS Virus
acatggcatgagcacaagtgtccaa

SEQ ID NO: 224481 - DNA, 25 bp, SARS Virus
catggcatgagtccaagtgtccaaa

SEQ ID NO: 224482 - DNA, 25 bp, SARS Virus
atggcatgagtacaagtgtccaaag

SEQ ID NO: 224483 - DNA, 25 bp, SARS Virus
tggcatgagtaccagtgtccaaagt

SEQ ID NO: 224484 - DNA, 25 bp, SARS Virus
ggcatgagtacacgtgtccaaagta

SEQ ID NO: 224485 - DNA, 25 bp, SARS Virus
gcatgagtacaactgtccaaagtag

SEQ ID NO: 224486 - DNA, 25 bp, SARS Virus
catgagtacaagcgtccaaagtagt

SEQ ID NO: 224487 - DNA, 25 bp, SARS Virus
atgagtacaagtctccaaagtagtt

SEQ ID NO: 224488 - DNA, 25 bp, SARS Virus
tgagtacaagtgcccaaagtagtta

SEQ ID NO: 224489 - DNA, 25 bp, SARS Virus
gagtacaagtgtccaaagtagttaa

SEQ ID NO: 224490 - DNA, 25 bp, SARS Virus
agtacaagtgtccaaagtagttaaa

SEQ ID NO: 224491 - DNA, 25 bp, SARS Virus
gtacaagtgtcccaagtagttaaag

SEQ ID NO: 224492 - DNA, 25 bp, SARS Virus
tacaagtgtccacagtagttaaaga

SEQ ID NO: 224493 - DNA, 25 bp, SARS Virus
acaagtgtccaacgtagttaaagaa

SEQ ID NO: 224494 - DNA, 25 bp, SARS Virus
caagtgtccaaactagttaaagaag

SEQ ID NO: 224495 - DNA, 25 bp, SARS Virus
aagtgtccaaagcagttaaagaaga

SEQ ID NO: 224496 - DNA, 25 bp, SARS Virus
agtgtccaaagtcgttaaagaagaa

SEQ ID NO: 224497 - DNA, 25 bp, SARS Virus
gtgtccaaagtacttaaagaagaag

SEQ ID NO: 224498 - DNA, 25 bp, SARS Virus
tgtccaaagtagctaaagaagaagg

SEQ ID NO: 224499 - DNA, 25 bp, SARS Virus
gtccaaagtagtcaaagaagaagga

SEQ ID NO: 224500 - DNA, 25 bp, SARS Virus
tccaaagtagttcaagaagaaggag

SEQ ID NO: 224501 - DNA, 25 bp, SARS Virus
ccaaagtagttacagaagaaggagt

SEQ ID NO: 224502 - DNA, 25 bp, SARS Virus
caaagtagttaacgaagaaggagtg

SEQ ID NO: 224503 - DNA, 25 bp, SARS Virus
aaagtagttaaacaagaaggagtgt

SEQ ID NO: 224504 - DNA, 25 bp, SARS Virus
aagtagttaaagcagaaggagtgtg

SEQ ID NO: 224505 - DNA, 25 bp, SARS Virus
agtagttaaagacgaaggagtgtga

SEQ ID NO: 224506 - DNA, 25 bp, SARS Virus
gtagttaaagaacaaggagtgtgag

SEQ ID NO: 224507 - DNA, 25 bp, SARS Virus
tagttaaagaagcaggagtgtgaga

SEQ ID NO: 224508 - DNA, 25 bp, SARS Virus
agttaaagaagacggagtgtgagac

SEQ ID NO: 224509 - DNA, 25 bp, SARS Virus
gttaaagaagaacgagtgtgagacg

SEQ ID NO: 224510 - DNA, 25 bp, SARS Virus
ttaaagaagaagcagtgtgagacgt

SEQ ID NO: 224511 - DNA, 25 bp, SARS Virus
taaagaagaaggcgtgtgagacgta

SEQ ID NO: 224512 - DNA, 25 bp, SARS Virus
aaagaagaaggactgtgagacgtag

SEQ ID NO: 224513 - DNA, 25 bp, SARS Virus
aggagtggacgtgaatccaatccag

SEQ ID NO: 224514 - DNA, 25 bp, SARS Virus
ggagtggacgtagatccaatccagg

SEQ ID NO: 224515 - DNA, 25 bp, SARS Virus
gagtggacgtaagtccaatccaggt

SEQ ID NO: 224516 - DNA, 25 bp, SARS Virus
agtggacgtaaagccaatccaggtt

SEQ ID NO: 224517 - DNA, 25 bp, SARS Virus
gtggacgtaaatgcaatccaggttg

SEQ ID NO: 224518 - DNA, 25 bp, SARS Virus
tggacgtaaatcgaatccaggttgt

SEQ ID NO: 224519 - DNA, 25 bp, SARS Virus
ggacgtaaatccgatccaggttgtt

SEQ ID NO: 224520 - DNA, 25 bp, SARS Virus
gacgtaaatccagtccaggttgttg

SEQ ID NO: 224521 - DNA, 25 bp, SARS Virus
acgtaaatccaagccaggttgttgt

SEQ ID NO: 224522 - DNA, 25 bp, SARS Virus
cgtaaatccaatgcaggttgttgta

SEQ ID NO: 224523 - DNA, 25 bp, SARS Virus
gtaaatccaatcgaggttgttgtac

SEQ ID NO: 224524 - DNA, 25 bp, SARS Virus
taaatccaatccgggttgttgtacg

SEQ ID NO: 224525 - DNA, 25 bp, SARS Virus
aaatccaatccaggttgttgtacgt

SEQ ID NO: 224526 - DNA, 25 bp, SARS Virus
aatccaatccaggttgttgtacgtc

SEQ ID NO: 224527 - DNA, 25 bp, SARS Virus
atccaatccagggtgttgtacgtct

SEQ ID NO: 224528 - DNA, 25 bp, SARS Virus
tccaatccaggtggttgtacgtctg

SEQ ID NO: 224529 - DNA, 25 bp, SARS Virus
ccaatccaggttgttgtacgtctgt

SEQ ID NO: 224530 - DNA, 25 bp, SARS Virus
caatccaggttggtgtacgtctgtg

SEQ ID NO: 224531 - DNA, 25 bp, SARS Virus
aatccaggttgtggtacgtctgtga

SEQ ID NO: 224532 - DNA, 25 bp, SARS Virus
atccaggttgttgtacgtctgtgaa

SEQ ID NO: 224533 - DNA, 25 bp, SARS Virus
tccaggttgttggacgtctgtgaag

SEQ ID NO: 224534 - DNA, 25 bp, SARS Virus
ccaggttgttgtgcgtctgtgaaga

SEQ ID NO: 224535 - DNA, 25 bp, SARS Virus
caggttgttgtaggtctgtgaagaa

SEQ ID NO: 224536 - DNA, 25 bp, SARS Virus
aggttgttgtacgtctgtgaagaat

SEQ ID NO: 224537 - DNA, 25 bp, SARS Virus
ggttgttgtacggctgtgaagaatc

SEQ ID NO: 224538 - DNA, 25 bp, SARS Virus
gttgttgtacgtgtgtgaagaatcg

SEQ ID NO: 224539 - DNA, 25 bp, SARS Virus
ttgttgtacgtcggtgaagaatcgt

SEQ ID NO: 224540 - DNA, 25 bp, SARS Virus
tgttgtacgtctgtgaagaatcgtt

SEQ ID NO: 224541 - DNA, 25 bp, SARS Virus
gttgtacgtctgggaagaatcgttc

SEQ ID NO: 224542 - DNA, 25 bp, SARS Virus
ttgtacgtctgtgaagaatcgttct

SEQ ID NO: 224543 - DNA, 25 bp, SARS Virus
tgtacgtctgtggagaatcgttcta

SEQ ID NO: 224544 - DNA, 25 bp, SARS Virus
gtacgtctgtgaggaatcgttctaa

SEQ ID NO: 224545 - DNA, 25 bp, SARS Virus
tacgtctgtgaagaatcgttctaat

SEQ ID NO: 224546 - DNA, 25 bp, SARS Virus
acgtctgtgaaggatcgttctaata

SEQ ID NO: 224547 - DNA, 25 bp, SARS Virus
cgtctgtgaagagtcgttctaatac

SEQ ID NO: 224548 - DNA, 25 bp, SARS Virus
gtctgtgaagaagcgttctaataca

SEQ ID NO: 224549 - DNA, 25 bp, SARS Virus
tctgtgaagaatggttctaatacag

SEQ ID NO: 224550 - DNA, 25 bp, SARS Virus
ctgtgaagaatcgttctaatacagg

SEQ ID NO: 224551 - DNA, 25 bp, SARS Virus
tgtgaagaatcggtctaatacaggt

SEQ ID NO: 224552 - DNA, 25 bp, SARS Virus
gtgaagaatcgtgctaatacaggtc

SEQ ID NO: 224553 - DNA, 25 bp, SARS Virus
tgaagaatcgttgtaatacaggtct

SEQ ID NO: 224554 - DNA, 25 bp, SARS Virus
gaagaatcgttcgaatacaggtctt

SEQ ID NO: 224555 - DNA, 25 bp, SARS Virus
aagaatcgttctgatacaggtcttt

SEQ ID NO: 224556 - DNA, 25 bp, SARS Virus
agaatcgttctagtacaggtctttc

SEQ ID NO: 224557 - DNA, 25 bp, SARS Virus
gaatcgttctaagacaggtctttcg

SEQ ID NO: 224558 - DNA, 25 bp, SARS Virus
aatcgttctaatgcaggtctttcgt

SEQ ID NO: 224559 - DNA, 25 bp, SARS Virus
atcgttctaatagaggtctttcgtt

SEQ ID NO: 224560 - DNA, 25 bp, SARS Virus
tcgttctaatacgggtctttcgttt

SEQ ID NO: 224561 - DNA, 25 bp, SARS Virus
cgttctaatacaggtctttcgtttg

SEQ ID NO: 224562 - DNA, 25 bp, SARS Virus
gttctaatacaggtctttcgtttgt

SEQ ID NO: 224563 - DNA, 25 bp, SARS Virus
ttctaatacagggctttcgtttgtt

SEQ ID NO: 224564 - DNA, 25 bp, SARS Virus
tctaatacaggtgtttcgtttgttc

SEQ ID NO: 224565 - DNA, 25 bp, SARS Virus
ctaatacaggtcgttcgtttgttct

SEQ ID NO: 224566 - DNA, 25 bp, SARS Virus
taatacaggtctgtcgtttgttctg

SEQ ID NO: 224567 - DNA, 25 bp, SARS Virus
aatacaggtcttgcgtttgttctgg

SEQ ID NO: 224568 - DNA, 25 bp, SARS Virus
atacaggtctttggtttgttctggg

SEQ ID NO: 224569 - DNA, 25 bp, SARS Virus
tacaggtctttcgtttgttctggga

SEQ ID NO: 224570 - DNA, 25 bp, SARS Virus
acaggtctttcggttgttctgggag

SEQ ID NO: 224571 - DNA, 25 bp, SARS Virus
caggtctttcgtgtgttctgggagg

SEQ ID NO: 224572 - DNA, 25 bp, SARS Virus
aggtctttcgttggttctgggagga

SEQ ID NO: 224573 - DNA, 25 bp, SARS Virus
ggtctttcgtttgttctgggaggat

SEQ ID NO: 224574 - DNA, 25 bp, SARS Virus
gtctttcgtttggtctgggaggatg

SEQ ID NO: 224575 - DNA, 25 bp, SARS Virus
tctttcgtttgtgctgggaggatga

SEQ ID NO: 224576 - DNA, 25 bp, SARS Virus
ctttcgtttgttgtgggaggatgac

SEQ ID NO: 224577 - DNA, 25 bp, SARS Virus
tttcgtttgttcggggaggatgaca

SEQ ID NO: 224578 - DNA, 25 bp, SARS Virus
ttcgtttgttctgggaggatgacat

SEQ ID NO: 224579 - DNA, 25 bp, SARS Virus
tcgtttgttctgggaggatgacatt

SEQ ID NO: 224580 - DNA, 25 bp, SARS Virus
cgtttgttctgggaggatgacattc

SEQ ID NO: 224581 - DNA, 25 bp, SARS Virus
gtttgttctggggggatgacattct

SEQ ID NO: 224582 - DNA, 25 bp, SARS Virus
tttgttctgggaggatgacattctc

SEQ ID NO: 224583 - DNA, 25 bp, SARS Virus
ttgttctgggaggatgacattctcc

SEQ ID NO: 224584 - DNA, 25 bp, SARS Virus
tgttctgggagggtgacattctccc

SEQ ID NO: 224585 - DNA, 25 bp, SARS Virus
gttctgggaggaggacattctcccg

SEQ ID NO: 224586 - DNA, 25 bp, SARS Virus
ttctgggaggatgacattctcccgg

SEQ ID NO: 224587 - DNA, 25 bp, SARS Virus
tctgggaggatggcattctcccggt

SEQ ID NO: 224588 - DNA, 25 bp, SARS Virus
ctgggaggatgagattctcccggta

SEQ ID NO: 224589 - DNA, 25 bp, SARS Virus
tgggaggatgacgttctcccggtaa

SEQ ID NO: 224590 - DNA, 25 bp, SARS Virus
gggaggatgacagtctcccggtaaa

SEQ ID NO: 224591 - DNA, 25 bp, SARS Virus
ggaggatgacatgctcccggtaaat

SEQ ID NO: 224592 - DNA, 25 bp, SARS Virus
gaggatgacattgtcccggtaaatc

SEQ ID NO: 224593 - DNA, 25 bp, SARS Virus
aggatgacattcgcccggtaaatcg

SEQ ID NO: 224594 - DNA, 25 bp, SARS Virus
ggatgacattctgccggtaaatcga

SEQ ID NO: 224595 - DNA, 25 bp, SARS Virus
gatgacattctcgcggtaaatcgaa

SEQ ID NO: 224596 - DNA, 25 bp, SARS Virus
atgacattctccgggtaaatcgaat

SEQ ID NO: 224597 - DNA, 25 bp, SARS Virus
tgacattctcccggtaaatcgaatt

SEQ ID NO: 224598 - DNA, 25 bp, SARS Virus
gacattctcccggtaaatcgaatta

SEQ ID NO: 224599 - DNA, 25 bp, SARS Virus
acattctcccgggaaatcgaattac

SEQ ID NO: 224600 - DNA, 25 bp, SARS Virus
cattctcccggtgaatcgaattaca

SEQ ID NO: 224601 - DNA, 25 bp, SARS Virus
attctcccggtagatcgaattacat

SEQ ID NO: 224602 - DNA, 25 bp, SARS Virus
ttctcccggtaagtcgaattacatt

SEQ ID NO: 224603 - DNA, 25 bp, SARS Virus
tctcccggtaaagcgaattacatta

SEQ ID NO: 224604 - DNA, 25 bp, SARS Virus
ctcccggtaaatggaattacattag

SEQ ID NO: 224605 - DNA, 25 bp, SARS Virus
tcccggtaaatcgaattacattagt

SEQ ID NO: 224606 - DNA, 25 bp, SARS Virus
cccggtaaatcggattacattagta

SEQ ID NO: 224607 - DNA, 25 bp, SARS Virus
ccggtaaatcgagttacattagtag

SEQ ID NO: 224608 - DNA, 25 bp, SARS Virus
cggtaaatcgaagtacattagtagt

SEQ ID NO: 224609 - DNA, 25 bp, SARS Virus
ggtaaatcgaatgacattagtagtg

SEQ ID NO: 224610 - DNA, 25 bp, SARS Virus
gtaaatcgaattgcattagtagtga

SEQ ID NO: 224611 - DNA, 25 bp, SARS Virus
taaatcgaattagattagtagtgag

SEQ ID NO: 224612 - DNA, 25 bp, SARS Virus
aaatcgaattacgttagtagtgaga

SEQ ID NO: 224613 - DNA, 25 bp, SARS Virus
aatcgaattacagtagtagtgagag

SEQ ID NO: 224614 - DNA, 25 bp, SARS Virus
atcgaattacatgagtagtgagagg

SEQ ID NO: 224615 - DNA, 25 bp, SARS Virus
tcgaattacattggtagtgagagga

SEQ ID NO: 224616 - DNA, 25 bp, SARS Virus
cgaattacattagtagtgagaggaa

SEQ ID NO: 224617 - DNA, 25 bp, SARS Virus
gaattacattaggagtgagaggaaa

SEQ ID NO: 224618 - DNA, 25 bp, SARS Virus
aattacattagtggtgagaggaaaa

SEQ ID NO: 224619 - DNA, 25 bp, SARS Virus
attacattagtagtgagaggaaaac

SEQ ID NO: 224620 - DNA, 25 bp, SARS Virus
ttacattagtagggagaggaaaacg

SEQ ID NO: 224621 - DNA, 25 bp, SARS Virus
tacattagtagtgagaggaaaacgt

SEQ ID NO: 224622 - DNA, 25 bp, SARS Virus
acattagtagtgggaggaaaacgta

SEQ ID NO: 224623 - DNA, 25 bp, SARS Virus
cattagtagtgagaggaaaacgtac

SEQ ID NO: 224624 - DNA, 25 bp, SARS Virus
attagtagtgaggggaaaacgtacc

SEQ ID NO: 224625 - DNA, 25 bp, SARS Virus
ttagtagtgagaggaaaacgtaccg

SEQ ID NO: 224626 - DNA, 25 bp, SARS Virus
tagtagtgagaggaaaacgtaccgt

SEQ ID NO: 224627 - DNA, 25 bp, SARS Virus
agtagtgagagggaaacgtaccgtg

SEQ ID NO: 224628 - DNA, 25 bp, SARS Virus
gtagtgagaggagaacgtaccgtgg

SEQ ID NO: 224629 - DNA, 25 bp, SARS Virus
tagtgagaggaagacgtaccgtggt

SEQ ID NO: 224630 - DNA, 25 bp, SARS Virus
agtgagaggaaagcgtaccgtggta

SEQ ID NO: 224631 - DNA, 25 bp, SARS Virus
gtgagaggaaaaggtaccgtggtaa

SEQ ID NO: 224632 - DNA, 25 bp, SARS Virus
tgagaggaaaacgtaccgtggtaac

SEQ ID NO: 224633 - DNA, 25 bp, SARS Virus
gagaggaaaacggaccgtggtaacc

SEQ ID NO: 224634 - DNA, 25 bp, SARS Virus
agaggaaaacgtgccgtggtaacca

SEQ ID NO: 224635 - DNA, 25 bp, SARS Virus
gaggaaaacgtagcgtggtaaccaa

SEQ ID NO: 224636 - DNA, 25 bp, SARS Virus
aggaaaacgtacggtggtaaccaac

SEQ ID NO: 224637 - DNA, 25 bp, SARS Virus
ggaaaacgtaccgtggtaaccaacg

SEQ ID NO: 224638 - DNA, 25 bp, SARS Virus
gaaaacgtaccggggtaaccaacgg

SEQ ID NO: 224639 - DNA, 25 bp, SARS Virus
aaaacgtaccgtggtaaccaacgga

SEQ ID NO: 224640 - DNA, 25 bp, SARS Virus
aaacgtaccgtggtaaccaacggaa

SEQ ID NO: 224641 - DNA, 25 bp, SARS Virus
aacgtaccgtgggaaccaacggaac

SEQ ID NO: 224642 - DNA, 25 bp, SARS Virus
acgtaccgtggtgaccaacggaaca

SEQ ID NO: 224643 - DNA, 25 bp, SARS Virus
cgtaccgtggtagccaacggaacaa

SEQ ID NO: 224644 - DNA, 25 bp, SARS Virus
gtaccgtggtaagcaacggaacaac

SEQ ID NO: 224645 - DNA, 25 bp, SARS Virus
taccgtggtaacgaacggaacaact

SEQ ID NO: 224646 - DNA, 25 bp, SARS Virus
accgtggtaaccgacggaacaactc

SEQ ID NO: 224647 - DNA, 25 bp, SARS Virus
ccgtggtaaccagcggaacaactca

SEQ ID NO: 224648 - DNA, 25 bp, SARS Virus
cgtggtaaccaagggaacaactcac

SEQ ID NO: 224649 - DNA, 25 bp, SARS Virus
gtggtaaccaacggaacaactcacg

SEQ ID NO: 224650 - DNA, 25 bp, SARS Virus
tggtaaccaacggaacaactcacgt

SEQ ID NO: 224651 - DNA, 25 bp, SARS Virus
ggtaaccaacgggacaactcacgtg

SEQ ID NO: 224652 - DNA, 25 bp, SARS Virus
gtaaccaacggagcaactcacgtgg

SEQ ID NO: 224653 - DNA, 25 bp, SARS Virus
taaccaacggaagaactcacgtgga

SEQ ID NO: 224654 - DNA, 25 bp, SARS Virus
aaccaacggaacgactcacgtggac

SEQ ID NO: 224655 - DNA, 25 bp, SARS Virus
accaacggaacagctcacgtggacg

SEQ ID NO: 224656 - DNA, 25 bp, SARS Virus
ccaacggaacaagtcacgtggacga

SEQ ID NO: 224657 - DNA, 25 bp, SARS Virus
caacggaacaacgcacgtggacgat

SEQ ID NO: 224658 - DNA, 25 bp, SARS Virus
aacggaacaactgacgtggacgatg

SEQ ID NO: 224659 - DNA, 25 bp, SARS Virus
acggaacaactcgcgtggacgatgt

SEQ ID NO: 224660 - DNA, 25 bp, SARS Virus
cggaacaactcaggtggacgatgtg

SEQ ID NO: 224661 - DNA, 25 bp, SARS Virus
ggaacaactcacgtggacgatgtgg

SEQ ID NO: 224662 - DNA, 25 bp, SARS Virus
gaacaactcacggggacgatgtggt

SEQ ID NO: 224663 - DNA, 25 bp, SARS Virus
aacaactcacgtggacgatgtggtg

SEQ ID NO: 224664 - DNA, 25 bp, SARS Virus
acaactcacgtggacgatgtggtgg

SEQ ID NO: 224665 - DNA, 25 bp, SARS Virus
caactcacgtgggcgatgtggtggt

SEQ ID NO: 224666 - DNA, 25 bp, SARS Virus
aactcacgtggaggatgtggtggtg

SEQ ID NO: 224667 - DNA, 25 bp, SARS Virus
actcacgtggacgatgtggtggtgg

SEQ ID NO: 224668 - DNA, 25 bp, SARS Virus
ctcacgtggacggtgtggtggtggt

SEQ ID NO: 224669 - DNA, 25 bp, SARS Virus
tcacgtggacgaggtggtggtggta

SEQ ID NO: 224670 - DNA, 25 bp, SARS Virus
cacgtggacgatgtggtggtggtac

SEQ ID NO: 224671 - DNA, 25 bp, SARS Virus
acgtggacgatggggtggtggtaca

SEQ ID NO: 224672 - DNA, 25 bp, SARS Virus
cgtggacgatgtggtggtggtacaa

SEQ ID NO: 224673 - DNA, 25 bp, SARS Virus
gtggacgatgtggtggtggtacaaa

SEQ ID NO: 224674 - DNA, 25 bp, SARS Virus
tggacgatgtgggggtggtacaaag

SEQ ID NO: 224675 - DNA, 25 bp, SARS Virus
ggacgatgtggtggtggtacaaagt

SEQ ID NO: 224676 - DNA, 25 bp, SARS Virus
gacgatgtggtggtggtacaaagtc

SEQ ID NO: 224677 - DNA, 25 bp, SARS Virus
acgatgtggtgggggtacaaagtcc

SEQ ID NO: 224678 - DNA, 25 bp, SARS Virus
cgatgtggtggtggtacaaagtcca

SEQ ID NO: 224679 - DNA, 25 bp, SARS Virus
gatgtggtggtggtacaaagtccac

SEQ ID NO: 224680 - DNA, 25 bp, SARS Virus
atgtggtggtgggacaaagtccaca

SEQ ID NO: 224681 - DNA, 25 bp, SARS Virus
tgtggtggtggtgcaaagtccacat

SEQ ID NO: 224682 - DNA, 25 bp, SARS Virus
gtggtggtggtagaaagtccacata

SEQ ID NO: 224683 - DNA, 25 bp, SARS Virus
tggtggtggtacgaagtccacatac

SEQ ID NO: 224684 - DNA, 25 bp, SARS Virus
ggtggtggtacagagtccacataca

SEQ ID NO: 224685 - DNA, 25 bp, SARS Virus
gtggtggtacaaggtccacatacaa

SEQ ID NO: 224686 - DNA, 25 bp, SARS Virus
tggtggtacaaagtccacatacaat

SEQ ID NO: 224687 - DNA, 25 bp, SARS Virus
ggtggtacaaaggccacatacaatc

SEQ ID NO: 224688 - DNA, 25 bp, SARS Virus
gtggtacaaagtgcacatacaatcg

SEQ ID NO: 224689 - DNA, 25 bp, SARS Virus
tggtacaaagtcgacatacaatcgt

SEQ ID NO: 224690 - DNA, 25 bp, SARS Virus
ggtacaaagtccgcatacaatcgtc

SEQ ID NO: 224691 - DNA, 25 bp, SARS Virus
gtacaaagtccagatacaatcgtcg

SEQ ID NO: 224692 - DNA, 25 bp, SARS Virus
tacaaagtccacgtacaatcgtcgt

SEQ ID NO: 224693 - DNA, 25 bp, SARS Virus
acaaagtccacagacaatcgtcgta

SEQ ID NO: 224694 - DNA, 25 bp, SARS Virus
caaagtccacatgcaatcgtcgtaa

SEQ ID NO: 224695 - DNA, 25 bp, SARS Virus
aaagtccacatagaatcgtcgtaaa

SEQ ID NO: 224696 - DNA, 25 bp, SARS Virus
aagtccacatacgatcgtcgtaaat

SEQ ID NO: 224697 - DNA, 25 bp, SARS Virus
agtccacatacagtcgtcgtaaatg

SEQ ID NO: 224698 - DNA, 25 bp, SARS Virus
gtccacatacaagcgtcgtaaatgt

SEQ ID NO: 224699 - DNA, 25 bp, SARS Virus
tccacatacaatggtcgtaaatgtt

SEQ ID NO: 224700 - DNA, 25 bp, SARS Virus
ccacatacaatcgtcgtaaatgtta

SEQ ID NO: 224701 - DNA, 25 bp, SARS Virus
cacatacaatcggcgtaaatgttag

SEQ ID NO: 224702 - DNA, 25 bp, SARS Virus
acatacaatcgtggtaaatgttagt

SEQ ID NO: 224703 - DNA, 25 bp, SARS Virus
catacaatcgtcgtaaatgttagtg

SEQ ID NO: 224704 - DNA, 25 bp, SARS Virus
atacaatcgtcggaaatgttagtgg

SEQ ID NO: 224705 - DNA, 25 bp, SARS Virus
tacaatcgtcgtgaatgttagtggt

SEQ ID NO: 224706 - DNA, 25 bp, SARS Virus
acaatcgtcgtagatgttagtggta

SEQ ID NO: 224707 - DNA, 25 bp, SARS Virus
caatcgtcgtaagtgttagtggtat

SEQ ID NO: 224708 - DNA, 25 bp, SARS Virus
aatcgtcgtaaaggttagtggtatc

SEQ ID NO: 224709 - DNA, 25 bp, SARS Virus
atcgtcgtaaatgttagtggtatcc

SEQ ID NO: 224710 - DNA, 25 bp, SARS Virus
tcgtcgtaaatggtagtggtatcct

SEQ ID NO: 224711 - DNA, 25 bp, SARS Virus
cgtcgtaaatgtgagtggtatccta

SEQ ID NO: 224712 - DNA, 25 bp, SARS Virus
gtcgtaaatgttggtggtatcctaa

SEQ ID NO: 224713 - DNA, 25 bp, SARS Virus
tcgtaaatgttagtggtatcctaat

SEQ ID NO: 224714 - DNA, 25 bp, SARS Virus
cgtaaatgttaggggtatcctaatc

SEQ ID NO: 224715 - DNA, 25 bp, SARS Virus
gtaaatgttagtggtatcctaatcg

SEQ ID NO: 224716 - DNA, 25 bp, SARS Virus
taaatgttagtggtatcctaatcgt

SEQ ID NO: 224717 - DNA, 25 bp, SARS Virus
aaatgttagtgggatcctaatcgtg

SEQ ID NO: 224718 - DNA, 25 bp, SARS Virus
aatgttagtggtgtcctaatcgtga

SEQ ID NO: 224719 - DNA, 25 bp, SARS Virus
atgttagtggtagcctaatcgtgaa

SEQ ID NO: 224720 - DNA, 25 bp, SARS Virus
tgttagtggtatgctaatcgtgaaa

SEQ ID NO: 224721 - DNA, 25 bp, SARS Virus
gttagtggtatcgtaatcgtgaaac

SEQ ID NO: 224722 - DNA, 25 bp, SARS Virus
ttagtggtatccgaatcgtgaaaca

SEQ ID NO: 224723 - DNA, 25 bp, SARS Virus
tagtggtatcctgatcgtgaaacac

SEQ ID NO: 224724 - DNA, 25 bp, SARS Virus
agtggtatcctagtcgtgaaacacg

SEQ ID NO: 224725 - DNA, 25 bp, SARS Virus
gtggtatcctaagcgtgaaacacgg

SEQ ID NO: 224726 - DNA, 25 bp, SARS Virus
tggtatcctaatggtgaaacacgga

SEQ ID NO: 224727 - DNA, 25 bp, SARS Virus
ggtatcctaatcgtgaaacacggag

SEQ ID NO: 224728 - DNA, 25 bp, SARS Virus
gtatcctaatcgggaaacacggagg

SEQ ID NO: 224729 - DNA, 25 bp, SARS Virus
tatcctaatcgtgaaacacggagga

SEQ ID NO: 224730 - DNA, 25 bp, SARS Virus
atcctaatcgtggaacacggaggaa

SEQ ID NO: 224731 - DNA, 25 bp, SARS Virus
tcctaatcgtgagacacggaggaat

SEQ ID NO: 224732 - DNA, 25 bp, SARS Virus
cctaatcgtgaagcacggaggaatt

SEQ ID NO: 224733 - DNA, 25 bp, SARS Virus
ctaatcgtgaaagacggaggaattg

SEQ ID NO: 224734 - DNA, 25 bp, SARS Virus
taatcgtgaaacgcggaggaattgc

SEQ ID NO: 224735 - DNA, 25 bp, SARS Virus
aatcgtgaaacagggaggaattgct

SEQ ID NO: 224736 - DNA, 25 bp, SARS Virus
atcgtgaaacacggaggaattgcta

SEQ ID NO: 224737 - DNA, 25 bp, SARS Virus
tcgtgaaacacggaggaattgctac

SEQ ID NO: 224738 - DNA, 25 bp, SARS Virus
cgtgaaacacgggggaattgctaca

SEQ ID NO: 224739 - DNA, 25 bp, SARS Virus
gtgaaacacggaggaattgctacag

SEQ ID NO: 224740 - DNA, 25 bp, SARS Virus
tgaaacacggaggaattgctacagt

SEQ ID NO: 224741 - DNA, 25 bp, SARS Virus
gaaacacggagggattgctacagtt

SEQ ID NO: 224742 - DNA, 25 bp, SARS Virus
aaacacggaggagttgctacagttg

SEQ ID NO: 224743 - DNA, 25 bp, SARS Virus
aacacggaggaagtgctacagttgt

SEQ ID NO: 224744 - DNA, 25 bp, SARS Virus
acacggaggaatggctacagttgtg

SEQ ID NO: 224745 - DNA, 25 bp, SARS Virus
cacggaggaattgctacagttgtgt

SEQ ID NO: 224746 - DNA, 25 bp, SARS Virus
acggaggaattggtacagttgtgta

SEQ ID NO: 224747 - DNA, 25 bp, SARS Virus
cggaggaattgcgacagttgtgtaa

SEQ ID NO: 224748 - DNA, 25 bp, SARS Virus
ggaggaattgctgcagttgtgtaaa

SEQ ID NO: 224749 - DNA, 25 bp, SARS Virus
gaggaattgctagagttgtgtaaat

SEQ ID NO: 224750 - DNA, 25 bp, SARS Virus
aggaattgctacggttgtgtaaatt

SEQ ID NO: 224751 - DNA, 25 bp, SARS Virus
ggaattgctacagttgtgtaaatta

SEQ ID NO: 224752 - DNA, 25 bp, SARS Virus
gaattgctacaggtgtgtaaattac

SEQ ID NO: 224753 - DNA, 25 bp, SARS Virus
aattgctacagtggtgtaaattacc

SEQ ID NO: 224754 - DNA, 25 bp, SARS Virus
attgctacagttgtgtaaattaccg

SEQ ID NO: 224755 - DNA, 25 bp, SARS Virus
ttgctacagttgggtaaattaccgt

SEQ ID NO: 224756 - DNA, 25 bp, SARS Virus
tgctacagttgtgtaaattaccgtt

SEQ ID NO: 224757 - DNA, 25 bp, SARS Virus
gctacagttgtggaaattaccgttg

SEQ ID NO: 224758 - DNA, 25 bp, SARS Virus
ctacagttgtgtgaattaccgttgt

SEQ ID NO: 224759 - DNA, 25 bp, SARS Virus
tacagttgtgtagattaccgttgta

SEQ ID NO: 224760 - DNA, 25 bp, SARS Virus
acagttgtgtaagttaccgttgtaa

SEQ ID NO: 224761 - DNA, 25 bp, SARS Virus
cagttgtgtaaagtaccgttgtaac

SEQ ID NO: 224762 - DNA, 25 bp, SARS Virus
agttgtgtaaatgaccgttgtaaca

SEQ ID NO: 224763 - DNA, 25 bp, SARS Virus
gttgtgtaaattgccgttgtaacag

SEQ ID NO: 224764 - DNA, 25 bp, SARS Virus
ttgtgtaaattagcgttgtaacagt

SEQ ID NO: 224765 - DNA, 25 bp, SARS Virus
tgtgtaaattacggttgtaacagtc

SEQ ID NO: 224766 - DNA, 25 bp, SARS Virus
gtgtaaattaccgttgtaacagtca

SEQ ID NO: 224767 - DNA, 25 bp, SARS Virus
tgtaaattaccggtgtaacagtcat

SEQ ID NO: 224768 - DNA, 25 bp, SARS Virus
gtaaattaccgtggtaacagtcatt

SEQ ID NO: 224769 - DNA, 25 bp, SARS Virus
taaattaccgttgtaacagtcattc

SEQ ID NO: 224770 - DNA, 25 bp, SARS Virus
aaattaccgttggaacagtcattca

SEQ ID NO: 224771 - DNA, 25 bp, SARS Virus
aattaccgttgtgacagtcattcaa

SEQ ID NO: 224772 - DNA, 25 bp, SARS Virus
attaccgttgtagcagtcattcaaa

SEQ ID NO: 224773 - DNA, 25 bp, SARS Virus
ttaccgttgtaagagtcattcaaaa

SEQ ID NO: 224774 - DNA, 25 bp, SARS Virus
taccgttgtaacggtcattcaaaat

SEQ ID NO: 224775 - DNA, 25 bp, SARS Virus
accgttgtaacagtcattcaaaatt

SEQ ID NO: 224776 - DNA, 25 bp, SARS Virus
ccgttgtaacaggcattcaaaattt

SEQ ID NO: 224777 - DNA, 25 bp, SARS Virus
cgttgtaacagtgattcaaaattta

SEQ ID NO: 224778 - DNA, 25 bp, SARS Virus
gttgtaacagtcgttcaaaatttat

SEQ ID NO: 224779 - DNA, 25 bp, SARS Virus
ttgtaacagtcagtcaaaatttatt

SEQ ID NO: 224780 - DNA, 25 bp, SARS Virus
tgtaacagtcatgcaaaatttattg

SEQ ID NO: 224781 - DNA, 25 bp, SARS Virus
gtaacagtcattgaaaatttattgg

SEQ ID NO: 224782 - DNA, 25 bp, SARS Virus
taacagtcattcgaaatttattggt

SEQ ID NO: 224783 - DNA, 25 bp, SARS Virus
aacagtcattcagaatttattggtc

SEQ ID NO: 224784 - DNA, 25 bp, SARS Virus
acagtcattcaagatttattggtca

SEQ ID NO: 224785 - DNA, 25 bp, SARS Virus
cagtcattcaaagtttattggtcat

SEQ ID NO: 224786 - DNA, 25 bp, SARS Virus
agtcattcaaaagttattggtcatt

SEQ ID NO: 224787 - DNA, 25 bp, SARS Virus
gtcattcaaaatgtattggtcattt

SEQ ID NO: 224788 - DNA, 25 bp, SARS Virus
tcattcaaaattgattggtcatttg

SEQ ID NO: 224789 - DNA, 25 bp, SARS Virus
cattcaaaatttgttggtcatttga

SEQ ID NO: 224790 - DNA, 25 bp, SARS Virus
attcaaaatttagtggtcatttgac

SEQ ID NO: 224791 - DNA, 25 bp, SARS Virus
ttcaaaatttatgggtcatttgact

SEQ ID NO: 224792 - DNA, 25 bp, SARS Virus
tcaaaatttattggtcatttgacta

SEQ ID NO: 224793 - DNA, 25 bp, SARS Virus
caaaatttattggtcatttgactaa

SEQ ID NO: 224794 - DNA, 25 bp, SARS Virus
aaaatttattgggcatttgactaat

SEQ ID NO: 224795 - DNA, 25 bp, SARS Virus
aaatttattggtgatttgactaatt

SEQ ID NO: 224796 - DNA, 25 bp, SARS Virus
aatttattggtcgtttgactaattg

SEQ ID NO: 224797 - DNA, 25 bp, SARS Virus
atttattggtcagttgactaattga

SEQ ID NO: 224798 - DNA, 25 bp, SARS Virus
tttattggtcatgtgactaattgac

SEQ ID NO: 224799 - DNA, 25 bp, SARS Virus
ttattggtcattggactaattgacc

SEQ ID NO: 224800 - DNA, 25 bp, SARS Virus
tattggtcatttgactaattgacca

SEQ ID NO: 224801 - DNA, 25 bp, SARS Virus
attggtcatttggctaattgaccaa

SEQ ID NO: 224802 - DNA, 25 bp, SARS Virus
ttggtcatttgagtaattgaccaag

SEQ ID NO: 224803 - DNA, 25 bp, SARS Virus
tggtcatttgacgaattgaccaaga

SEQ ID NO: 224804 - DNA, 25 bp, SARS Virus
ggtcatttgactgattgaccaagaa

SEQ ID NO: 224805 - DNA, 25 bp, SARS Virus
gtcatttgactagttgaccaagaag

SEQ ID NO: 224806 - DNA, 25 bp, SARS Virus
tcatttgactaagtgaccaagaagt

SEQ ID NO: 224807 - DNA, 25 bp, SARS Virus
catttgactaatggaccaagaagtc

SEQ ID NO: 224808 - DNA, 25 bp, SARS Virus
atttgactaattgaccaagaagtcc

SEQ ID NO: 224809 - DNA, 25 bp, SARS Virus
tttgactaattggccaagaagtcca

SEQ ID NO: 224810 - DNA, 25 bp, SARS Virus
ttgactaattgagcaagaagtccac

SEQ ID NO: 224811 - DNA, 25 bp, SARS Virus
tgactaattgacgaagaagtccaca

SEQ ID NO: 224812 - DNA, 25 bp, SARS Virus
gactaattgaccgagaagtccacat

SEQ ID NO: 224813 - DNA, 25 bp, SARS Virus
actaattgaccaggaagtccacatc

SEQ ID NO: 224814 - DNA, 25 bp, SARS Virus
ctaattgaccaagaagtccacatcc

SEQ ID NO: 224815 - DNA, 25 bp, SARS Virus
taattgaccaaggagtccacatcca

SEQ ID NO: 224816 - DNA, 25 bp, SARS Virus
aattgaccaagaggtccacatccaa

SEQ ID NO: 224817 - DNA, 25 bp, SARS Virus
attgaccaagaagtccacatccaag

SEQ ID NO: 224818 - DNA, 25 bp, SARS Virus
ttgaccaagaaggccacatccaaga

SEQ ID NO: 224819 - DNA, 25 bp, SARS Virus
tgaccaagaagtgcacatccaagac

SEQ ID NO: 224820 - DNA, 25 bp, SARS Virus
gaccaagaagtcgacatccaagacc

SEQ ID NO: 224821 - DNA, 25 bp, SARS Virus
accaagaagtccgcatccaagacca

SEQ ID NO: 224822 - DNA, 25 bp, SARS Virus
ccaagaagtccagatccaagaccaa

SEQ ID NO: 224823 - DNA, 25 bp, SARS Virus
caagaagtccacgtccaagaccaag

SEQ ID NO: 224824 - DNA, 25 bp, SARS Virus
aagaagtccacagccaagaccaaga

SEQ ID NO: 224825 - DNA, 25 bp, SARS Virus
agaagtccacatgcaagaccaagac

SEQ ID NO: 224826 - DNA, 25 bp, SARS Virus
gaagtccacatcgaagaccaagacc

SEQ ID NO: 224827 - DNA, 25 bp, SARS Virus
aagtccacatccgagaccaagaccg

SEQ ID NO: 224828 - DNA, 25 bp, SARS Virus
agtccacatccaggaccaagaccga

SEQ ID NO: 224829 - DNA, 25 bp, SARS Virus
gtccacatccaagaccaagaccgag

SEQ ID NO: 224830 - DNA, 25 bp, SARS Virus
tccacatccaaggccaagaccgagt

SEQ ID NO: 224831 - DNA, 25 bp, SARS Virus
ccacatccaagagcaagaccgagtt

SEQ ID NO: 224832 - DNA, 25 bp, SARS Virus
cacatccaagacgaagaccgagtta

SEQ ID NO: 224833 - DNA, 25 bp, SARS Virus
acatccaagaccgagaccgagttag

SEQ ID NO: 224834 - DNA, 25 bp, SARS Virus
catccaagaccaggaccgagttaga

SEQ ID NO: 224835 - DNA, 25 bp, SARS Virus
atccaagaccaagaccgagttagag

SEQ ID NO: 224836 - DNA, 25 bp, SARS Virus
tccaagaccaaggccgagttagaga

SEQ ID NO: 224837 - DNA, 25 bp, SARS Virus
ccaagaccaagagcgagttagagac

SEQ ID NO: 224838 - DNA, 25 bp, SARS Virus
caagaccaagacggagttagagact

SEQ ID NO: 224839 - DNA, 25 bp, SARS Virus
aagaccaagaccgagttagagacta

SEQ ID NO: 224840 - DNA, 25 bp, SARS Virus
agaccaagaccgggttagagactaa

SEQ ID NO: 224841 - DNA, 25 bp, SARS Virus
gaccaagaccgagttagagactaac

SEQ ID NO: 224842 - DNA, 25 bp, SARS Virus
accaagaccgaggtagagactaacg

SEQ ID NO: 224843 - DNA, 25 bp, SARS Virus
ccaagaccgagtgagagactaacga

SEQ ID NO: 224844 - DNA, 25 bp, SARS Virus
caagaccgagttggagactaacgag

SEQ ID NO: 224845 - DNA, 25 bp, SARS Virus
aagaccgagttagagactaacgagt

SEQ ID NO: 224846 - DNA, 25 bp, SARS Virus
agaccgagttagggactaacgagtc

SEQ ID NO: 224847 - DNA, 25 bp, SARS Virus
gaccgagttagagactaacgagtca

SEQ ID NO: 224848 - DNA, 25 bp, SARS Virus
accgagttagaggctaacgagtcat

SEQ ID NO: 224849 - DNA, 25 bp, SARS Virus
ccgagttagagagtaacgagtcatc

SEQ ID NO: 224850 - DNA, 25 bp, SARS Virus
cgagttagagacgaacgagtcatca

SEQ ID NO: 224851 - DNA, 25 bp, SARS Virus
gagttagagactgacgagtcatcat

SEQ ID NO: 224852 - DNA, 25 bp, SARS Virus
agttagagactagcgagtcatcata

SEQ ID NO: 224853 - DNA, 25 bp, SARS Virus
gttagagactaaggagtcatcatag

SEQ ID NO: 224854 - DNA, 25 bp, SARS Virus
ttagagactaacgagtcatcatagt

SEQ ID NO: 224855 - DNA, 25 bp, SARS Virus
tagagactaacgggtcatcatagta

SEQ ID NO: 224856 - DNA, 25 bp, SARS Virus
agagactaacgagtcatcatagtag

SEQ ID NO: 224857 - DNA, 25 bp, SARS Virus
gagactaacgaggcatcatagtagg

SEQ ID NO: 224858 - DNA, 25 bp, SARS Virus
agactaacgagtgatcatagtaggt

SEQ ID NO: 224859 - DNA, 25 bp, SARS Virus
gactaacgagtcgtcatagtaggtc

SEQ ID NO: 224860 - DNA, 25 bp, SARS Virus
actaacgagtcagcatagtaggtcg

SEQ ID NO: 224861 - DNA, 25 bp, SARS Virus
ctaacgagtcatgatagtaggtcgg

SEQ ID NO: 224862 - DNA, 25 bp, SARS Virus
taacgagtcatcgtagtaggtcggt

SEQ ID NO: 224863 - DNA, 25 bp, SARS Virus
aacgagtcatcagagtaggtcggtc

SEQ ID NO: 224864 - DNA, 25 bp, SARS Virus
acgagtcatcatggtaggtcggtca

SEQ ID NO: 224865 - DNA, 25 bp, SARS Virus
cgagtcatcatagtaggtcggtcag

SEQ ID NO: 224866 - DNA, 25 bp, SARS Virus
gagtcatcataggaggtcggtcaga

SEQ ID NO: 224867 - DNA, 25 bp, SARS Virus
agtcatcatagtgggtcggtcagaa

SEQ ID NO: 224868 - DNA, 25 bp, SARS Virus
gtcatcatagtaggtcggtcagaag

SEQ ID NO: 224869 - DNA, 25 bp, SARS Virus
tcatcatagtaggtcggtcagaagg

SEQ ID NO: 224870 - DNA, 25 bp, SARS Virus
catcatagtagggcggtcagaagga

SEQ ID NO: 224871 - DNA, 25 bp, SARS Virus
atcatagtaggtgggtcagaaggag

SEQ ID NO: 224872 - DNA, 25 bp, SARS Virus
tcatagtaggtcggtcagaaggaga

SEQ ID NO: 224873 - DNA, 25 bp, SARS Virus
catagtaggtcggtcagaaggagaa

SEQ ID NO: 224874 - DNA, 25 bp, SARS Virus
atagtaggtcgggcagaaggagaag

SEQ ID NO: 224875 - DNA, 25 bp, SARS Virus
tagtaggtcggtgagaaggagaaga

SEQ ID NO: 224876 - DNA, 25 bp, SARS Virus
agtaggtcggtcggaaggagaagaa

SEQ ID NO: 224877 - DNA, 25 bp, SARS Virus
gtaggtcggtcagaaggagaagaag

SEQ ID NO: 224878 - DNA, 25 bp, SARS Virus
taggtcggtcaggaggagaagaaga

SEQ ID NO: 224879 - DNA, 25 bp, SARS Virus
aggtcggtcagagggagaagaagaa

SEQ ID NO: 224880 - DNA, 25 bp, SARS Virus
ggtcggtcagaaggagaagaagaag

SEQ ID NO: 224881 - DNA, 25 bp, SARS Virus
gtcggtcagaaggagaagaagaagg

SEQ ID NO: 224882 - DNA, 25 bp, SARS Virus
tcggtcagaaggggaagaagaagga

SEQ ID NO: 224883 - DNA, 25 bp, SARS Virus
cggtcagaaggagaagaagaaggag

SEQ ID NO: 224884 - DNA, 25 bp, SARS Virus
ggtcagaaggaggagaagaaggagt

SEQ ID NO: 224885 - DNA, 25 bp, SARS Virus
gtcagaaggagaggaagaaggagtt

SEQ ID NO: 224886 - DNA, 25 bp, SARS Virus
tcagaaggagaagaagaaggagttg

SEQ ID NO: 224887 - DNA, 25 bp, SARS Virus
cagaaggagaaggagaaggagttga

SEQ ID NO: 224888 - DNA, 25 bp, SARS Virus
agaaggagaagaggaaggagttgag

SEQ ID NO: 224889 - DNA, 25 bp, SARS Virus
gaaggagaagaagaaggagttgagc

SEQ ID NO: 224890 - DNA, 25 bp, SARS Virus
aaggagaagaaggaggagttgagct

SEQ ID NO: 224891 - DNA, 25 bp, SARS Virus
aggagaagaagagggagttgagctt

SEQ ID NO: 224892 - DNA, 25 bp, SARS Virus
ggagaagaagaaggagttgagcttg

SEQ ID NO: 224893 - DNA, 25 bp, SARS Virus
gagaagaagaaggagttgagcttga

SEQ ID NO: 224894 - DNA, 25 bp, SARS Virus
agaagaagaaggggttgagcttgac

SEQ ID NO: 224895 - DNA, 25 bp, SARS Virus
gaagaagaaggagttgagcttgaca

SEQ ID NO: 224896 - DNA, 25 bp, SARS Virus
aagaagaaggaggtgagcttgacaa

SEQ ID NO: 224897 - DNA, 25 bp, SARS Virus
agaagaaggagtggagcttgacaaa

SEQ ID NO: 224898 - DNA, 25 bp, SARS Virus
gaagaaggagttgagcttgacaaag

SEQ ID NO: 224899 - DNA, 25 bp, SARS Virus
aagaaggagttgggcttgacaaagt

SEQ ID NO: 224900 - DNA, 25 bp, SARS Virus
agaaggagttgagcttgacaaagtc

SEQ ID NO: 224901 - DNA, 25 bp, SARS Virus
gaaggagttgaggttgacaaagtcg

SEQ ID NO: 224902 - DNA, 25 bp, SARS Virus
aaggagttgagcgtgacaaagtcga

SEQ ID NO: 224903 - DNA, 25 bp, SARS Virus
aggagttgagctggacaaagtcgac

SEQ ID NO: 224904 - DNA, 25 bp, SARS Virus
ggagttgagcttgacaaagtcgact

SEQ ID NO: 224905 - DNA, 25 bp, SARS Virus
gagttgagcttggcaaagtcgactc

SEQ ID NO: 224906 - DNA, 25 bp, SARS Virus
agttgagcttgagaaagtcgactcc

SEQ ID NO: 224907 - DNA, 25 bp, SARS Virus
gttgagcttgacgaagtcgactccg

SEQ ID NO: 224908 - DNA, 25 bp, SARS Virus
ttgagcttgacagagtcgactccgt

SEQ ID NO: 224909 - DNA, 25 bp, SARS Virus
tgagcttgacaaggtcgactccgtg

SEQ ID NO: 224910 - DNA, 25 bp, SARS Virus
gagcttgacaaagtcgactccgtgg

SEQ ID NO: 224911 - DNA, 25 bp, SARS Virus
agcttgacaaaggcgactccgtggt

SEQ ID NO: 224912 - DNA, 25 bp, SARS Virus
gcttgacaaagtggactccgtggtt

SEQ ID NO: 224913 - DNA, 25 bp, SARS Virus
cttgacaaagtcgactccgtggttt

SEQ ID NO: 224914 - DNA, 25 bp, SARS Virus
ttgacaaagtcggctccgtggttta

SEQ ID NO: 224915 - DNA, 25 bp, SARS Virus
tgacaaagtcgagtccgtggtttaa

SEQ ID NO: 224916 - DNA, 25 bp, SARS Virus
gacaaagtcgacgccgtggtttaag

SEQ ID NO: 224917 - DNA, 25 bp, SARS Virus
acaaagtcgactgcgtggtttaagg

SEQ ID NO: 224918 - DNA, 25 bp, SARS Virus
caaagtcgactcggtggtttaaggt

SEQ ID NO: 224919 - DNA, 25 bp, SARS Virus
aaagtcgactccgtggtttaaggtc

SEQ ID NO: 224920 - DNA, 25 bp, SARS Virus
aagtcgactccggggtttaaggtct

SEQ ID NO: 224921 - DNA, 25 bp, SARS Virus
agtcgactccgtggtttaaggtctc

SEQ ID NO: 224922 - DNA, 25 bp, SARS Virus
gtcgactccgtggtttaaggtctcc

SEQ ID NO: 224923 - DNA, 25 bp, SARS Virus
tcgactccgtgggttaaggtctccc

SEQ ID NO: 224924 - DNA, 25 bp, SARS Virus
cgactccgtggtgtaaggtctccct

SEQ ID NO: 224925 - DNA, 25 bp, SARS Virus
gactccgtggttgaaggtctccctc

SEQ ID NO: 224926 - DNA, 25 bp, SARS Virus
actccgtggtttgaggtctccctct

SEQ ID NO: 224927 - DNA, 25 bp, SARS Virus
ctccgtggtttagggtctccctctg

SEQ ID NO: 224928 - DNA, 25 bp, SARS Virus
tccgtggtttaaggtctccctctgg

SEQ ID NO: 224929 - DNA, 25 bp, SARS Virus
ccgtggtttaaggtctccctctgga

SEQ ID NO: 224930 - DNA, 25 bp, SARS Virus
cgtggtttaagggctccctctggaa

SEQ ID NO: 224931 - DNA, 25 bp, SARS Virus
gtggtttaaggtgtccctctggaac

SEQ ID NO: 224932 - DNA, 25 bp, SARS Virus
tggtttaaggtcgccctctggaact

SEQ ID NO: 224933 - DNA, 25 bp, SARS Virus
ggtttaaggtctgcctctggaacta

SEQ ID NO: 224934 - DNA, 25 bp, SARS Virus
gtttaaggtctcgctctggaactat

SEQ ID NO: 224935 - DNA, 25 bp, SARS Virus
tttaaggtctccgtctggaactatt

SEQ ID NO: 224936 - DNA, 25 bp, SARS Virus
ttaaggtctcccgctggaactatta

SEQ ID NO: 224937 - DNA, 25 bp, SARS Virus
taaggtctccctgtggaactattag

SEQ ID NO: 224938 - DNA, 25 bp, SARS Virus
aaggtctccctcgggaactattagt

SEQ ID NO: 224939 - DNA, 25 bp, SARS Virus
aggtctccctctggaactattagta

SEQ ID NO: 224940 - DNA, 25 bp, SARS Virus
ggtctccctctggaactattagtag

SEQ ID NO: 224941 - DNA, 25 bp, SARS Virus
gtctccctctgggactattagtagg

SEQ ID NO: 224942 - DNA, 25 bp, SARS Virus
tctccctctggagctattagtagga

SEQ ID NO: 224943 - DNA, 25 bp, SARS Virus
ctccctctggaagtattagtaggag

SEQ ID NO: 224944 - DNA, 25 bp, SARS Virus
tccctctggaacgattagtaggaga

SEQ ID NO: 224945 - DNA, 25 bp, SARS Virus
ccctctggaactgttagtaggagac

SEQ ID NO: 224946 - DNA, 25 bp, SARS Virus
cctctggaactagtagtaggagaca

SEQ ID NO: 224947 - DNA, 25 bp, SARS Virus
ctctggaactatgagtaggagacat

SEQ ID NO: 224948 - DNA, 25 bp, SARS Virus
tctggaactattggtaggagacatg

SEQ ID NO: 224949 - DNA, 25 bp, SARS Virus
ctggaactattagtaggagacatgg

SEQ ID NO: 224950 - DNA, 25 bp, SARS Virus
tggaactattaggaggagacatggc

SEQ ID NO: 224951 - DNA, 25 bp, SARS Virus
ggaactattagtgggagacatggca

SEQ ID NO: 224952 - DNA, 25 bp, SARS Virus
gaactattagtaggagacatggcat

SEQ ID NO: 224953 - DNA, 25 bp, SARS Virus
aactattagtaggagacatggcatg

SEQ ID NO: 224954 - DNA, 25 bp, SARS Virus
actattagtaggggacatggcatga

SEQ ID NO: 224955 - DNA, 25 bp, SARS Virus
ctattagtaggagacatggcatgag

SEQ ID NO: 224956 - DNA, 25 bp, SARS Virus
tattagtaggaggcatggcatgagt

SEQ ID NO: 224957 - DNA, 25 bp, SARS Virus
attagtaggagagatggcatgagta

SEQ ID NO: 224958 - DNA, 25 bp, SARS Virus
ttagtaggagacgtggcatgagtac

SEQ ID NO: 224959 - DNA, 25 bp, SARS Virus
tagtaggagacagggcatgagtaca

SEQ ID NO: 224960 - DNA, 25 bp, SARS Virus
agtaggagacatggcatgagtacaa

SEQ ID NO: 224961 - DNA, 25 bp, SARS Virus
gtaggagacatggcatgagtacaag

SEQ ID NO: 224962 - DNA, 25 bp, SARS Virus
taggagacatgggatgagtacaagt

SEQ ID NO: 224963 - DNA, 25 bp, SARS Virus
aggagacatggcgtgagtacaagtg

SEQ ID NO: 224964 - DNA, 25 bp, SARS Virus
ggagacatggcaggagtacaagtgt

SEQ ID NO: 224965 - DNA, 25 bp, SARS Virus
gagacatggcatgagtacaagtgtc

SEQ ID NO: 224966 - DNA, 25 bp, SARS Virus
agacatggcatgggtacaagtgtcc

SEQ ID NO: 224967 - DNA, 25 bp, SARS Virus
gacatggcatgagtacaagtgtcca

SEQ ID NO: 224968 - DNA, 25 bp, SARS Virus
acatggcatgaggacaagtgtccaa

SEQ ID NO: 224969 - DNA, 25 bp, SARS Virus
catggcatgagtgcaagtgtccaaa

SEQ ID NO: 224970 - DNA, 25 bp, SARS Virus
atggcatgagtagaagtgtccaaag

SEQ ID NO: 224971 - DNA, 25 bp, SARS Virus
tggcatgagtacgagtgtccaaagt

SEQ ID NO: 224972 - DNA, 25 bp, SARS Virus
ggcatgagtacaggtgtccaaagta

SEQ ID NO: 224973 - DNA, 25 bp, SARS Virus
gcatgagtacaagtgtccaaagtag

SEQ ID NO: 224974 - DNA, 25 bp, SARS Virus
catgagtacaagggtccaaagtagt

SEQ ID NO: 224975 - DNA, 25 bp, SARS Virus
atgagtacaagtgtccaaagtagtt

SEQ ID NO: 224976 - DNA, 25 bp, SARS Virus
tgagtacaagtggccaaagtagtta

SEQ ID NO: 224977 - DNA, 25 bp, SARS Virus
gagtacaagtgtgcaaagtagttaa

SEQ ID NO: 224978 - DNA, 25 bp, SARS Virus
agtacaagtgtcgaaagtagttaaa

SEQ ID NO: 224979 - DNA, 25 bp, SARS Virus
gtacaagtgtccgaagtagttaaag

SEQ ID NO: 224980 - DNA, 25 bp, SARS Virus
tacaagtgtccagagtagttaaaga

SEQ ID NO: 224981 - DNA, 25 bp, SARS Virus
acaagtgtccaaggtagttaaagaa

SEQ ID NO: 224982 - DNA, 25 bp, SARS Virus
caagtgtccaaagtagttaaagaag

SEQ ID NO: 224983 - DNA, 25 bp, SARS Virus
aagtgtccaaaggagttaaagaaga

SEQ ID NO: 224984 - DNA, 25 bp, SARS Virus
agtgtccaaagtggttaaagaagaa

SEQ ID NO: 224985 - DNA, 25 bp, SARS Virus
gtgtccaaagtagttaaagaagaag

SEQ ID NO: 224986 - DNA, 25 bp, SARS Virus
tgtccaaagtaggtaaagaagaagg

SEQ ID NO: 224987 - DNA, 25 bp, SARS Virus
gtccaaagtagtgaaagaagaagga

SEQ ID NO: 224988 - DNA, 25 bp, SARS Virus
tccaaagtagttgaagaagaaggag

SEQ ID NO: 224989 - DNA, 25 bp, SARS Virus
ccaaagtagttagagaagaaggagt

SEQ ID NO: 224990 - DNA, 25 bp, SARS Virus
caaagtagttaaggaagaaggagtg

SEQ ID NO: 224991 - DNA, 25 bp, SARS Virus
aaagtagttaaagaagaaggagtgt

SEQ ID NO: 224992 - DNA, 25 bp, SARS Virus
aagtagttaaaggagaaggagtgtg

SEQ ID NO: 224993 - DNA, 25 bp, SARS Virus
agtagttaaagaggaaggagtgtga

SEQ ID NO: 224994 - DNA, 25 bp, SARS Virus
gtagttaaagaagaaggagtgtgag

SEQ ID NO: 224995 - DNA, 25 bp, SARS Virus
tagttaaagaaggaggagtgtgaga

SEQ ID NO: 224996 - DNA, 25 bp, SARS Virus
agttaaagaagagggagtgtgagac

SEQ ID NO: 224997 - DNA, 25 bp, SARS Virus
gttaaagaagaaggagtgtgagacg

SEQ ID NO: 224998 - DNA, 25 bp, SARS Virus
ttaaagaagaaggagtgtgagacgt

SEQ ID NO: 224999 - DNA, 25 bp, SARS Virus
taaagaagaaggggtgtgagacgta

SEQ ID NO: 225000 - DNA, 25 bp, SARS Virus
aaagaagaaggagtgtgagacgtag

SEQ ID NO: 225001 - DNA, 25 bp, SARS Virus
aggagtggacgttaatccaatccag

SEQ ID NO: 225002 - DNA, 25 bp, SARS Virus
ggagtggacgtatatccaatccagg

SEQ ID NO: 225003 - DNA, 25 bp, SARS Virus
gagtggacgtaattccaatccaggt

SEQ ID NO: 225004 - DNA, 25 bp, SARS Virus
agtggacgtaaatccaatccaggtt

SEQ ID NO: 225005 - DNA, 25 bp, SARS Virus
gtggacgtaaattcaatccaggttg

SEQ ID NO: 225006 - DNA, 25 bp, SARS Virus
tggacgtaaatctaatccaggttgt

SEQ ID NO: 225007 - DNA, 25 bp, SARS Virus
ggacgtaaatcctatccaggttgtt

SEQ ID NO: 225008 - DNA, 25 bp, SARS Virus
gacgtaaatccattccaggttgttg

SEQ ID NO: 225009 - DNA, 25 bp, SARS Virus
acgtaaatccaatccaggttgttgt

SEQ ID NO: 225010 - DNA, 25 bp, SARS Virus
cgtaaatccaattcaggttgttgta

SEQ ID NO: 225011 - DNA, 25 bp, SARS Virus
gtaaatccaatctaggttgttgtac

SEQ ID NO: 225012 - DNA, 25 bp, SARS Virus
taaatccaatcctggttgttgtacg

SEQ ID NO: 225013 - DNA, 25 bp, SARS Virus
aaatccaatccatgttgttgtacgt

SEQ ID NO: 225014 - DNA, 25 bp, SARS Virus
aatccaatccagtttgttgtacgtc

SEQ ID NO: 225015 - DNA, 25 bp, SARS Virus
atccaatccaggttgttgtacgtct

SEQ ID NO: 225016 - DNA, 25 bp, SARS Virus
tccaatccaggttgttgtacgtctg

SEQ ID NO: 225017 - DNA, 25 bp, SARS Virus
ccaatccaggtttttgtacgtctgt

SEQ ID NO: 225018 - DNA, 25 bp, SARS Virus
caatccaggttgttgtacgtctgtg

SEQ ID NO: 225019 - DNA, 25 bp, SARS Virus
aatccaggttgttgtacgtctgtga

SEQ ID NO: 225020 - DNA, 25 bp, SARS Virus
atccaggttgttttacgtctgtgaa

SEQ ID NO: 225021 - DNA, 25 bp, SARS Virus
tccaggttgttgtacgtctgtgaag

SEQ ID NO: 225022 - DNA, 25 bp, SARS Virus
ccaggttgttgttcgtctgtgaaga

SEQ ID NO: 225023 - DNA, 25 bp, SARS Virus
caggttgttgtatgtctgtgaagaa

SEQ ID NO: 225024 - DNA, 25 bp, SARS Virus
aggttgttgtacttctgtgaagaat

SEQ ID NO: 225025 - DNA, 25 bp, SARS Virus
ggttgttgtacgtctgtgaagaatc

SEQ ID NO: 225026 - DNA, 25 bp, SARS Virus
gttgttgtacgtttgtgaagaatcg

SEQ ID NO: 225027 - DNA, 25 bp, SARS Virus
ttgttgtacgtctgtgaagaatcgt

SEQ ID NO: 225028 - DNA, 25 bp, SARS Virus
tgttgtacgtctttgaagaatcgtt

SEQ ID NO: 225029 - DNA, 25 bp, SARS Virus
gttgtacgtctgtgaagaatcgttc

SEQ ID NO: 225030 - DNA, 25 bp, SARS Virus
ttgtacgtctgttaagaatcgttct

SEQ ID NO: 225031 - DNA, 25 bp, SARS Virus
tgtacgtctgtgtagaatcgttcta

SEQ ID NO: 225032 - DNA, 25 bp, SARS Virus
gtacgtctgtgatgaatcgttctaa

SEQ ID NO: 225033 - DNA, 25 bp, SARS Virus
tacgtctgtgaataatcgttctaat

SEQ ID NO: 225034 - DNA, 25 bp, SARS Virus
acgtctgtgaagtatcgttctaata

SEQ ID NO: 225035 - DNA, 25 bp, SARS Virus
cgtctgtgaagattcgttctaatac

SEQ ID NO: 225036 - DNA, 25 bp, SARS Virus
gtctgtgaagaatcgttctaataca

SEQ ID NO: 225037 - DNA, 25 bp, SARS Virus
tctgtgaagaattgttctaatacag

SEQ ID NO: 225038 - DNA, 25 bp, SARS Virus
ctgtgaagaatctttctaatacagg

SEQ ID NO: 225039 - DNA, 25 bp, SARS Virus
tgtgaagaatcgttctaatacaggt

SEQ ID NO: 225040 - DNA, 25 bp, SARS Virus
gtgaagaatcgttctaatacaggtc

SEQ ID NO: 225041 - DNA, 25 bp, SARS Virus
tgaagaatcgttttaatacaggtct

SEQ ID NO: 225042 - DNA, 25 bp, SARS Virus
gaagaatcgttctaatacaggtctt

SEQ ID NO: 225043 - DNA, 25 bp, SARS Virus
aagaatcgttcttatacaggtcttt

SEQ ID NO: 225044 - DNA, 25 bp, SARS Virus
agaatcgttctattacaggtctttc

SEQ ID NO: 225045 - DNA, 25 bp, SARS Virus
gaatcgttctaatacaggtctttcg

SEQ ID NO: 225046 - DNA, 25 bp, SARS Virus
aatcgttctaattcaggtctttcgt

SEQ ID NO: 225047 - DNA, 25 bp, SARS Virus
atcgttctaatataggtctttcgtt

SEQ ID NO: 225048 - DNA, 25 bp, SARS Virus
tcgttctaatactggtctttcgttt

SEQ ID NO: 225049 - DNA, 25 bp, SARS Virus
cgttctaatacatgtctttcgtttg

SEQ ID NO: 225050 - DNA, 25 bp, SARS Virus
gttctaatacagttctttcgtttgt

SEQ ID NO: 225051 - DNA, 25 bp, SARS Virus
ttctaatacaggtctttcgtttgtt

SEQ ID NO: 225052 - DNA, 25 bp, SARS Virus
tctaatacaggtttttcgtttgttc

SEQ ID NO: 225053 - DNA, 25 bp, SARS Virus
ctaatacaggtctttcgtttgttct

SEQ ID NO: 225054 - DNA, 25 bp, SARS Virus
taatacaggtctttcgtttgttctg

SEQ ID NO: 225055 - DNA, 25 bp, SARS Virus
aatacaggtctttcgtttgttctgg

SEQ ID NO: 225056 - DNA, 25 bp, SARS Virus
atacaggtcttttgtttgttctggg

SEQ ID NO: 225057 - DNA, 25 bp, SARS Virus
tacaggtctttcttttgttctggga

SEQ ID NO: 225058 - DNA, 25 bp, SARS Virus
acaggtctttcgtttgttctgggag

SEQ ID NO: 225059 - DNA, 25 bp, SARS Virus
caggtctttcgtttgttctgggagg

SEQ ID NO: 225060 - DNA, 25 bp, SARS Virus
aggtctttcgtttgttctgggagga

SEQ ID NO: 225061 - DNA, 25 bp, SARS Virus
ggtctttcgttttttctgggaggat

SEQ ID NO: 225062 - DNA, 25 bp, SARS Virus
gtctttcgtttgttctgggaggatg

SEQ ID NO: 225063 - DNA, 25 bp, SARS Virus
tctttcgtttgttctgggaggatga

SEQ ID NO: 225064 - DNA, 25 bp, SARS Virus
ctttcgtttgttttgggaggatgac

SEQ ID NO: 225065 - DNA, 25 bp, SARS Virus
tttcgtttgttctgggaggatgaca

SEQ ID NO: 225066 - DNA, 25 bp, SARS Virus
ttcgtttgttcttggaggatgacat

SEQ ID NO: 225067 - DNA, 25 bp, SARS Virus
tcgtttgttctgtgaggatgacatt

SEQ ID NO: 225068 - DNA, 25 bp, SARS Virus
cgtttgttctggtaggatgacattc

SEQ ID NO: 225069 - DNA, 25 bp, SARS Virus
gtttgttctgggtggatgacattct

SEQ ID NO: 225070 - DNA, 25 bp, SARS Virus
tttgttctgggatgatgacattctc

SEQ ID NO: 225071 - DNA, 25 bp, SARS Virus
ttgttctgggagtatgacattctcc

SEQ ID NO: 225072 - DNA, 25 bp, SARS Virus
tgttctgggaggttgacattctccc

SEQ ID NO: 225073 - DNA, 25 bp, SARS Virus
gttctgggaggatgacattctcccg

SEQ ID NO: 225074 - DNA, 25 bp, SARS Virus
ttctgggaggattacattctcccgg

SEQ ID NO: 225075 - DNA, 25 bp, SARS Virus
tctgggaggatgtcattctcccggt

SEQ ID NO: 225076 - DNA, 25 bp, SARS Virus
ctgggaggatgatattctcccggta

SEQ ID NO: 225077 - DNA, 25 bp, SARS Virus
tgggaggatgactttctcccggtaa

SEQ ID NO: 225078 - DNA, 25 bp, SARS Virus
gggaggatgacattctcccggtaaa

SEQ ID NO: 225079 - DNA, 25 bp, SARS Virus
ggaggatgacattctcccggtaaat

SEQ ID NO: 225080 - DNA, 25 bp, SARS Virus
gaggatgacattttcccggtaaatc

SEQ ID NO: 225081 - DNA, 25 bp, SARS Virus
aggatgacattctcccggtaaatcg

SEQ ID NO: 225082 - DNA, 25 bp, SARS Virus
ggatgacattcttccggtaaatcga

SEQ ID NO: 225083 - DNA, 25 bp, SARS Virus
gatgacattctctcggtaaatcgaa

SEQ ID NO: 225084 - DNA, 25 bp, SARS Virus
atgacattctcctggtaaatcgaat

SEQ ID NO: 225085 - DNA, 25 bp, SARS Virus
tgacattctccctgtaaatcgaatt

SEQ ID NO: 225086 - DNA, 25 bp, SARS Virus
gacattctcccgttaaatcgaatta

SEQ ID NO: 225087 - DNA, 25 bp, SARS Virus
acattctcccggtaaatcgaattac

SEQ ID NO: 225088 - DNA, 25 bp, SARS Virus
cattctcccggttaatcgaattaca

SEQ ID NO: 225089 - DNA, 25 bp, SARS Virus
attctcccggtatatcgaattacat

SEQ ID NO: 225090 - DNA, 25 bp, SARS Virus
ttctcccggtaattcgaattacatt

SEQ ID NO: 225091 - DNA, 25 bp, SARS Virus
tctcccggtaaatcgaattacatta

SEQ ID NO: 225092 - DNA, 25 bp, SARS Virus
ctcccggtaaattgaattacattag

SEQ ID NO: 225093 - DNA, 25 bp, SARS Virus
tcccggtaaatctaattacattagt

SEQ ID NO: 225094 - DNA, 25 bp, SARS Virus
cccggtaaatcgtattacattagta

SEQ ID NO: 225095 - DNA, 25 bp, SARS Virus
ccggtaaatcgatttacattagtag

SEQ ID NO: 225096 - DNA, 25 bp, SARS Virus
cggtaaatcgaattacattagtagt

SEQ ID NO: 225097 - DNA, 25 bp, SARS Virus
ggtaaatcgaattacattagtagtg

SEQ ID NO: 225098 - DNA, 25 bp, SARS Virus
gtaaatcgaatttcattagtagtga

SEQ ID NO: 225099 - DNA, 25 bp, SARS Virus
taaatcgaattatattagtagtgag

SEQ ID NO: 225100 - DNA, 25 bp, SARS Virus
aaatcgaattactttagtagtgaga

SEQ ID NO: 225101 - DNA, 25 bp, SARS Virus
aatcgaattacattagtagtgagag

SEQ ID NO: 225102 - DNA, 25 bp, SARS Virus
atcgaattacattagtagtgagagg

SEQ ID NO: 225103 - DNA, 25 bp, SARS Virus
tcgaattacatttgtagtgagagga

SEQ ID NO: 225104 - DNA, 25 bp, SARS Virus
cgaattacattattagtgagaggaa

SEQ ID NO: 225105 - DNA, 25 bp, SARS Virus
gaattacattagtagtgagaggaaa

SEQ ID NO: 225106 - DNA, 25 bp, SARS Virus
aattacattagttgtgagaggaaaa

SEQ ID NO: 225107 - DNA, 25 bp, SARS Virus
attacattagtattgagaggaaaac

SEQ ID NO: 225108 - DNA, 25 bp, SARS Virus
ttacattagtagtgagaggaaaacg

SEQ ID NO: 225109 - DNA, 25 bp, SARS Virus
tacattagtagttagaggaaaacgt

SEQ ID NO: 225110 - DNA, 25 bp, SARS Virus
acattagtagtgtgaggaaaacgta

SEQ ID NO: 225111 - DNA, 25 bp, SARS Virus
cattagtagtgataggaaaacgtac

SEQ ID NO: 225112 - DNA, 25 bp, SARS Virus
attagtagtgagtggaaaacgtacc

SEQ ID NO: 225113 - DNA, 25 bp, SARS Virus
ttagtagtgagatgaaaacgtaccg

SEQ ID NO: 225114 - DNA, 25 bp, SARS Virus
tagtagtgagagtaaaacgtaccgt

SEQ ID NO: 225115 - DNA, 25 bp, SARS Virus
agtagtgagaggtaaacgtaccgtg

SEQ ID NO: 225116 - DNA, 25 bp, SARS Virus
gtagtgagaggataacgtaccgtgg

SEQ ID NO: 225117 - DNA, 25 bp, SARS Virus
tagtgagaggaatacgtaccgtggt

SEQ ID NO: 225118 - DNA, 25 bp, SARS Virus
agtgagaggaaatcgtaccgtggta

SEQ ID NO: 225119 - DNA, 25 bp, SARS Virus
gtgagaggaaaatgtaccgtggtaa

SEQ ID NO: 225120 - DNA, 25 bp, SARS Virus
tgagaggaaaacttaccgtggtaac

SEQ ID NO: 225121 - DNA, 25 bp, SARS Virus
gagaggaaaacgtaccgtggtaacc

SEQ ID NO: 225122 - DNA, 25 bp, SARS Virus
agaggaaaacgttccgtggtaacca

SEQ ID NO: 225123 - DNA, 25 bp, SARS Virus
gaggaaaacgtatcgtggtaaccaa

SEQ ID NO: 225124 - DNA, 25 bp, SARS Virus
aggaaaacgtactgtggtaaccaac

SEQ ID NO: 225125 - DNA, 25 bp, SARS Virus
ggaaaacgtaccttggtaaccaacg

SEQ ID NO: 225126 - DNA, 25 bp, SARS Virus
gaaaacgtaccgtggtaaccaacgg

SEQ ID NO: 225127 - DNA, 25 bp, SARS Virus
aaaacgtaccgttgtaaccaacgga

SEQ ID NO: 225128 - DNA, 25 bp, SARS Virus
aaacgtaccgtgttaaccaacggaa

SEQ ID NO: 225129 - DNA, 25 bp, SARS Virus
aacgtaccgtggtaaccaacggaac

SEQ ID NO: 225130 - DNA, 25 bp, SARS Virus
acgtaccgtggttaccaacggaaca

SEQ ID NO: 225131 - DNA, 25 bp, SARS Virus
cgtaccgtggtatccaacggaacaa

SEQ ID NO: 225132 - DNA, 25 bp, SARS Virus
gtaccgtggtaatcaacggaacaac

SEQ ID NO: 225133 - DNA, 25 bp, SARS Virus
taccgtggtaactaacggaacaact

SEQ ID NO: 225134 - DNA, 25 bp, SARS Virus
accgtggtaacctacggaacaactc

SEQ ID NO: 225135 - DNA, 25 bp, SARS Virus
ccgtggtaaccatcggaacaactca

SEQ ID NO: 225136 - DNA, 25 bp, SARS Virus
cgtggtaaccaatggaacaactcac

SEQ ID NO: 225137 - DNA, 25 bp, SARS Virus
gtggtaaccaactgaacaactcacg

SEQ ID NO: 225138 - DNA, 25 bp, SARS Virus
tggtaaccaacgtaacaactcacgt

SEQ ID NO: 225139 - DNA, 25 bp, SARS Virus
ggtaaccaacggtacaactcacgtg

SEQ ID NO: 225140 - DNA, 25 bp, SARS Virus
gtaaccaacggatcaactcacgtgg

SEQ ID NO: 225141 - DNA, 25 bp, SARS Virus
taaccaacggaataactcacgtgga

SEQ ID NO: 225142 - DNA, 25 bp, SARS Virus
aaccaacggaactactcacgtggac

SEQ ID NO: 225143 - DNA, 25 bp, SARS Virus
accaacggaacatctcacgtggacg

SEQ ID NO: 225144 - DNA, 25 bp, SARS Virus
ccaacggaacaattcacgtggacga

SEQ ID NO: 225145 - DNA, 25 bp, SARS Virus
caacggaacaactcacgtggacgat

SEQ ID NO: 225146 - DNA, 25 bp, SARS Virus
aacggaacaacttacgtggacgatg

SEQ ID NO: 225147 - DNA, 25 bp, SARS Virus
acggaacaactctcgtggacgatgt

SEQ ID NO: 225148 - DNA, 25 bp, SARS Virus
cggaacaactcatgtggacgatgtg

SEQ ID NO: 225149 - DNA, 25 bp, SARS Virus
ggaacaactcacttggacgatgtgg

SEQ ID NO: 225150 - DNA, 25 bp, SARS Virus
gaacaactcacgtggacgatgtggt

SEQ ID NO: 225151 - DNA, 25 bp, SARS Virus
aacaactcacgttgacgatgtggtg

SEQ ID NO: 225152 - DNA, 25 bp, SARS Virus
acaactcacgtgtacgatgtggtgg

SEQ ID NO: 225153 - DNA, 25 bp, SARS Virus
caactcacgtggtcgatgtggtggt

SEQ ID NO: 225154 - DNA, 25 bp, SARS Virus
aactcacgtggatgatgtggtggtg

SEQ ID NO: 225155 - DNA, 25 bp, SARS Virus
actcacgtggactatgtggtggtgg

SEQ ID NO: 225156 - DNA, 25 bp, SARS Virus
ctcacgtggacgttgtggtggtggt

SEQ ID NO: 225157 - DNA, 25 bp, SARS Virus
tcacgtggacgatgtggtggtggta

SEQ ID NO: 225158 - DNA, 25 bp, SARS Virus
cacgtggacgatttggtggtggtac

SEQ ID NO: 225159 - DNA, 25 bp, SARS Virus
acgtggacgatgtggtggtggtaca

SEQ ID NO: 225160 - DNA, 25 bp, SARS Virus
cgtggacgatgttgtggtggtacaa

SEQ ID NO: 225161 - DNA, 25 bp, SARS Virus
gtggacgatgtgttggtggtacaaa

SEQ ID NO: 225162 - DNA, 25 bp, SARS Virus
tggacgatgtggtggtggtacaaag

SEQ ID NO: 225163 - DNA, 25 bp, SARS Virus
ggacgatgtggttgtggtacaaagt

SEQ ID NO: 225164 - DNA, 25 bp, SARS Virus
gacgatgtggtgttggtacaaagtc

SEQ ID NO: 225165 - DNA, 25 bp, SARS Virus
acgatgtggtggtggtacaaagtcc

SEQ ID NO: 225166 - DNA, 25 bp, SARS Virus
cgatgtggtggttgtacaaagtcca

SEQ ID NO: 225167 - DNA, 25 bp, SARS Virus
gatgtggtggtgttacaaagtccac

SEQ ID NO: 225168 - DNA, 25 bp, SARS Virus
atgtggtggtggtacaaagtccaca

SEQ ID NO: 225169 - DNA, 25 bp, SARS Virus
tgtggtggtggttcaaagtccacat

SEQ ID NO: 225170 - DNA, 25 bp, SARS Virus
gtggtggtggtataaagtccacata

SEQ ID NO: 225171 - DNA, 25 bp, SARS Virus
tggtggtggtactaagtccacatac

SEQ ID NO: 225172 - DNA, 25 bp, SARS Virus
ggtggtggtacatagtccacataca

SEQ ID NO: 225173 - DNA, 25 bp, SARS Virus
gtggtggtacaatgtccacatacaa

SEQ ID NO: 225174 - DNA, 25 bp, SARS Virus
tggtggtacaaattccacatacaat

SEQ ID NO: 225175 - DNA, 25 bp, SARS Virus
ggtggtacaaagtccacatacaatc

SEQ ID NO: 225176 - DNA, 25 bp, SARS Virus
gtggtacaaagttcacatacaatcg

SEQ ID NO: 225177 - DNA, 25 bp, SARS Virus
tggtacaaagtctacatacaatcgt

SEQ ID NO: 225178 - DNA, 25 bp, SARS Virus
ggtacaaagtcctcatacaatcgtc

SEQ ID NO: 225179 - DNA, 25 bp, SARS Virus
gtacaaagtccatatacaatcgtcg

SEQ ID NO: 225180 - DNA, 25 bp, SARS Virus
tacaaagtccacttacaatcgtcgt

SEQ ID NO: 225181 - DNA, 25 bp, SARS Virus
acaaagtccacatacaatcgtcgta

SEQ ID NO: 225182 - DNA, 25 bp, SARS Virus
caaagtccacattcaatcgtcgtaa

SEQ ID NO: 225183 - DNA, 25 bp, SARS Virus
aaagtccacatataatcgtcgtaaa

SEQ ID NO: 225184 - DNA, 25 bp, SARS Virus
aagtccacatactatcgtcgtaaat

SEQ ID NO: 225185 - DNA, 25 bp, SARS Virus
agtccacatacattcgtcgtaaatg

SEQ ID NO: 225186 - DNA, 25 bp, SARS Virus
gtccacatacaatcgtcgtaaatgt

SEQ ID NO: 225187 - DNA, 25 bp, SARS Virus
tccacatacaattgtcgtaaatgtt

SEQ ID NO: 225188 - DNA, 25 bp, SARS Virus
ccacatacaatcttcgtaaatgtta

SEQ ID NO: 225189 - DNA, 25 bp, SARS Virus
cacatacaatcgtcgtaaatgttag

SEQ ID NO: 225190 - DNA, 25 bp, SARS Virus
acatacaatcgttgtaaatgttagt

SEQ ID NO: 225191 - DNA, 25 bp, SARS Virus
catacaatcgtcttaaatgttagtg

SEQ ID NO: 225192 - DNA, 25 bp, SARS Virus
atacaatcgtcgtaaatgttagtgg

SEQ ID NO: 225193 - DNA, 25 bp, SARS Virus
tacaatcgtcgttaatgttagtggt

SEQ ID NO: 225194 - DNA, 25 bp, SARS Virus
acaatcgtcgtatatgttagtggta

SEQ ID NO: 225195 - DNA, 25 bp, SARS Virus
caatcgtcgtaattgttagtggtat

SEQ ID NO: 225196 - DNA, 25 bp, SARS Virus
aatcgtcgtaaatgttagtggtatc

SEQ ID NO: 225197 - DNA, 25 bp, SARS Virus
atcgtcgtaaattttagtggtatcc

SEQ ID NO: 225198 - DNA, 25 bp, SARS Virus
tcgtcgtaaatgttagtggtatcct

SEQ ID NO: 225199 - DNA, 25 bp, SARS Virus
cgtcgtaaatgttagtggtatccta

SEQ ID NO: 225200 - DNA, 25 bp, SARS Virus
gtcgtaaatgtttgtggtatcctaa

SEQ ID NO: 225201 - DNA, 25 bp, SARS Virus
tcgtaaatgttattggtatcctaat

SEQ ID NO: 225202 - DNA, 25 bp, SARS Virus
cgtaaatgttagtggtatcctaatc

SEQ ID NO: 225203 - DNA, 25 bp, SARS Virus
gtaaatgttagttgtatcctaatcg

SEQ ID NO: 225204 - DNA, 25 bp, SARS Virus
taaatgttagtgttatcctaatcgt

SEQ ID NO: 225205 - DNA, 25 bp, SARS Virus
aaatgttagtggtatcctaatcgtg

SEQ ID NO: 225206 - DNA, 25 bp, SARS Virus
aatgttagtggtttcctaatcgtga

SEQ ID NO: 225207 - DNA, 25 bp, SARS Virus
atgttagtggtatcctaatcgtgaa

SEQ ID NO: 225208 - DNA, 25 bp, SARS Virus
tgttagtggtattctaatcgtgaaa

SEQ ID NO: 225209 - DNA, 25 bp, SARS Virus
gttagtggtatcttaatcgtgaaac

SEQ ID NO: 225210 - DNA, 25 bp, SARS Virus
ttagtggtatcctaatcgtgaaaca

SEQ ID NO: 225211 - DNA, 25 bp, SARS Virus
tagtggtatccttatcgtgaaacac

SEQ ID NO: 225212 - DNA, 25 bp, SARS Virus
agtggtatcctattcgtgaaacacg

SEQ ID NO: 225213 - DNA, 25 bp, SARS Virus
gtggtatcctaatcgtgaaacacgg

SEQ ID NO: 225214 - DNA, 25 bp, SARS Virus
tggtatcctaattgtgaaacacgga

SEQ ID NO: 225215 - DNA, 25 bp, SARS Virus
ggtatcctaatcttgaaacacggag

SEQ ID NO: 225216 - DNA, 25 bp, SARS Virus
gtatcctaatcgtgaaacacggagg

SEQ ID NO: 225217 - DNA, 25 bp, SARS Virus
tatcctaatcgttaaacacggagga

SEQ ID NO: 225218 - DNA, 25 bp, SARS Virus
atcctaatcgtgtaacacggaggaa

SEQ ID NO: 225219 - DNA, 25 bp, SARS Virus
tcctaatcgtgatacacggaggaat

SEQ ID NO: 225220 - DNA, 25 bp, SARS Virus
cctaatcgtgaatcacggaggaatt

SEQ ID NO: 225221 - DNA, 25 bp, SARS Virus
ctaatcgtgaaatacggaggaattg

SEQ ID NO: 225222 - DNA, 25 bp, SARS Virus
taatcgtgaaactcggaggaattgc

SEQ ID NO: 225223 - DNA, 25 bp, SARS Virus
aatcgtgaaacatggaggaattgct

SEQ ID NO: 225224 - DNA, 25 bp, SARS Virus
atcgtgaaacactgaggaattgcta

SEQ ID NO: 225225 - DNA, 25 bp, SARS Virus
tcgtgaaacacgtaggaattgctac

SEQ ID NO: 225226 - DNA, 25 bp, SARS Virus
cgtgaaacacggtggaattgctaca

SEQ ID NO: 225227 - DNA, 25 bp, SARS Virus
gtgaaacacggatgaattgctacag

SEQ ID NO: 225228 - DNA, 25 bp, SARS Virus
tgaaacacggagtaattgctacagt

SEQ ID NO: 225229 - DNA, 25 bp, SARS Virus
gaaacacggaggtattgctacagtt

SEQ ID NO: 225230 - DNA, 25 bp, SARS Virus
aaacacggaggatttgctacagttg

SEQ ID NO: 225231 - DNA, 25 bp, SARS Virus
aacacggaggaattgctacagttgt

SEQ ID NO: 225232 - DNA, 25 bp, SARS Virus
acacggaggaattgctacagttgtg

SEQ ID NO: 225233 - DNA, 25 bp, SARS Virus
cacggaggaatttctacagttgtgt

SEQ ID NO: 225234 - DNA, 25 bp, SARS Virus
acggaggaattgttacagttgtgta

SEQ ID NO: 225235 - DNA, 25 bp, SARS Virus
cggaggaattgctacagttgtgtaa

SEQ ID NO: 225236 - DNA, 25 bp, SARS Virus
ggaggaattgcttcagttgtgtaaa

SEQ ID NO: 225237 - DNA, 25 bp, SARS Virus
gaggaattgctatagttgtgtaaat

SEQ ID NO: 225238 - DNA, 25 bp, SARS Virus
aggaattgctactgttgtgtaaatt

SEQ ID NO: 225239 - DNA, 25 bp, SARS Virus
ggaattgctacatttgtgtaaatta

SEQ ID NO: 225240 - DNA, 25 bp, SARS Virus
gaattgctacagttgtgtaaattac

SEQ ID NO: 225241 - DNA, 25 bp, SARS Virus
aattgctacagttgtgtaaattacc

SEQ ID NO: 225242 - DNA, 25 bp, SARS Virus
attgctacagttttgtaaattaccg

SEQ ID NO: 225243 - DNA, 25 bp, SARS Virus
ttgctacagttgtgtaaattaccgt

SEQ ID NO: 225244 - DNA, 25 bp, SARS Virus
tgctacagttgtttaaattaccgtt

SEQ ID NO: 225245 - DNA, 25 bp, SARS Virus
gctacagttgtgtaaattaccgttg

SEQ ID NO: 225246 - DNA, 25 bp, SARS Virus
ctacagttgtgttaattaccgttgt

SEQ ID NO: 225247 - DNA, 25 bp, SARS Virus
tacagttgtgtatattaccgttgta

SEQ ID NO: 225248 - DNA, 25 bp, SARS Virus
acagttgtgtaatttaccgttgtaa

SEQ ID NO: 225249 - DNA, 25 bp, SARS Virus
cagttgtgtaaattaccgttgtaac

SEQ ID NO: 225250 - DNA, 25 bp, SARS Virus
agttgtgtaaattaccgttgtaaca

SEQ ID NO: 225251 - DNA, 25 bp, SARS Virus
gttgtgtaaatttccgttgtaacag

SEQ ID NO: 225252 - DNA, 25 bp, SARS Virus
ttgtgtaaattatcgttgtaacagt

SEQ ID NO: 225253 - DNA, 25 bp, SARS Virus
tgtgtaaattactgttgtaacagtc

SEQ ID NO: 225254 - DNA, 25 bp, SARS Virus
gtgtaaattacctttgtaacagtca

SEQ ID NO: 225255 - DNA, 25 bp, SARS Virus
tgtaaattaccgttgtaacagtcat

SEQ ID NO: 225256 - DNA, 25 bp, SARS Virus
gtaaattaccgttgtaacagtcatt

SEQ ID NO: 225257 - DNA, 25 bp, SARS Virus
taaattaccgttttaacagtcattc

SEQ ID NO: 225258 - DNA, 25 bp, SARS Virus
aaattaccgttgtaacagtcattca

SEQ ID NO: 225259 - DNA, 25 bp, SARS Virus
aattaccgttgttacagtcattcaa

SEQ ID NO: 225260 - DNA, 25 bp, SARS Virus
attaccgttgtatcagtcattcaaa

SEQ ID NO: 225261 - DNA, 25 bp, SARS Virus
ttaccgttgtaatagtcattcaaaa

SEQ ID NO: 225262 - DNA, 25 bp, SARS Virus
taccgttgtaactgtcattcaaaat

SEQ ID NO: 225263 - DNA, 25 bp, SARS Virus
accgttgtaacattcattcaaaatt

SEQ ID NO: 225264 - DNA, 25 bp, SARS Virus
ccgttgtaacagtcattcaaaattt

SEQ ID NO: 225265 - DNA, 25 bp, SARS Virus
cgttgtaacagttattcaaaattta

SEQ ID NO: 225266 - DNA, 25 bp, SARS Virus
gttgtaacagtctttcaaaatttat

SEQ ID NO: 225267 - DNA, 25 bp, SARS Virus
ttgtaacagtcattcaaaatttatt

SEQ ID NO: 225268 - DNA, 25 bp, SARS Virus
tgtaacagtcattcaaaatttattg

SEQ ID NO: 225269 - DNA, 25 bp, SARS Virus
gtaacagtcatttaaaatttattgg

SEQ ID NO: 225270 - DNA, 25 bp, SARS Virus
taacagtcattctaaatttattggt

SEQ ID NO: 225271 - DNA, 25 bp, SARS Virus
aacagtcattcataatttattggtc

SEQ ID NO: 225272 - DNA, 25 bp, SARS Virus
acagtcattcaatatttattggtca

SEQ ID NO: 225273 - DNA, 25 bp, SARS Virus
cagtcattcaaattttattggtcat

SEQ ID NO: 225274 - DNA, 25 bp, SARS Virus
agtcattcaaaatttattggtcatt

SEQ ID NO: 225275 - DNA, 25 bp, SARS Virus
gtcattcaaaatttattggtcattt

SEQ ID NO: 225276 - DNA, 25 bp, SARS Virus
tcattcaaaatttattggtcatttg

SEQ ID NO: 225277 - DNA, 25 bp, SARS Virus
cattcaaaattttttggtcatttga

SEQ ID NO: 225278 - DNA, 25 bp, SARS Virus
attcaaaatttattggtcatttgac

SEQ ID NO: 225279 - DNA, 25 bp, SARS Virus
ttcaaaatttattggtcatttgact

SEQ ID NO: 225280 - DNA, 25 bp, SARS Virus
tcaaaatttatttgtcatttgacta

SEQ ID NO: 225281 - DNA, 25 bp, SARS Virus
caaaatttattgttcatttgactaa

SEQ ID NO: 225282 - DNA, 25 bp, SARS Virus
aaaatttattggtcatttgactaat

SEQ ID NO: 225283 - DNA, 25 bp, SARS Virus
aaatttattggttatttgactaatt

SEQ ID NO: 225284 - DNA, 25 bp, SARS Virus
aatttattggtcttttgactaattg

SEQ ID NO: 225285 - DNA, 25 bp, SARS Virus
atttattggtcatttgactaattga

SEQ ID NO: 225286 - DNA, 25 bp, SARS Virus
tttattggtcatttgactaattgac

SEQ ID NO: 225287 - DNA, 25 bp, SARS Virus
ttattggtcatttgactaattgacc

SEQ ID NO: 225288 - DNA, 25 bp, SARS Virus
tattggtcattttactaattgacca

SEQ ID NO: 225289 - DNA, 25 bp, SARS Virus
attggtcatttgtctaattgaccaa

SEQ ID NO: 225290 - DNA, 25 bp, SARS Virus
ttggtcatttgattaattgaccaag

SEQ ID NO: 225291 - DNA, 25 bp, SARS Virus
tggtcatttgactaattgaccaaga

SEQ ID NO: 225292 - DNA, 25 bp, SARS Virus
ggtcatttgacttattgaccaagaa

SEQ ID NO: 225293 - DNA, 25 bp, SARS Virus
gtcatttgactatttgaccaagaag

SEQ ID NO: 225294 - DNA, 25 bp, SARS Virus
tcatttgactaattgaccaagaagt

SEQ ID NO: 225295 - DNA, 25 bp, SARS Virus
catttgactaattgaccaagaagtc

SEQ ID NO: 225296 - DNA, 25 bp, SARS Virus
atttgactaatttaccaagaagtcc

SEQ ID NO: 225297 - DNA, 25 bp, SARS Virus
tttgactaattgtccaagaagtcca

SEQ ID NO: 225298 - DNA, 25 bp, SARS Virus
ttgactaattgatcaagaagtccac

SEQ ID NO: 225299 - DNA, 25 bp, SARS Virus
tgactaattgactaagaagtccaca

SEQ ID NO: 225300 - DNA, 25 bp, SARS Virus
gactaattgacctagaagtccacat

SEQ ID NO: 225301 - DNA, 25 bp, SARS Virus
actaattgaccatgaagtccacatc

SEQ ID NO: 225302 - DNA, 25 bp, SARS Virus
ctaattgaccaataagtccacatcc

SEQ ID NO: 225303 - DNA, 25 bp, SARS Virus
taattgaccaagtagtccacatcca

SEQ ID NO: 225304 - DNA, 25 bp, SARS Virus
aattgaccaagatgtccacatccaa

SEQ ID NO: 225305 - DNA, 25 bp, SARS Virus
attgaccaagaattccacatccaag

SEQ ID NO: 225306 - DNA, 25 bp, SARS Virus
ttgaccaagaagtccacatccaaga

SEQ ID NO: 225307 - DNA, 25 bp, SARS Virus
tgaccaagaagttcacatccaagac

SEQ ID NO: 225308 - DNA, 25 bp, SARS Virus
gaccaagaagtctacatccaagacc

SEQ ID NO: 225309 - DNA, 25 bp, SARS Virus
accaagaagtcctcatccaagacca

SEQ ID NO: 225310 - DNA, 25 bp, SARS Virus
ccaagaagtccatatccaagaccaa

SEQ ID NO: 225311 - DNA, 25 bp, SARS Virus
caagaagtccacttccaagaccaag

SEQ ID NO: 225312 - DNA, 25 bp, SARS Virus
aagaagtccacatccaagaccaaga

SEQ ID NO: 225313 - DNA, 25 bp, SARS Virus
agaagtccacattcaagaccaagac

SEQ ID NO: 225314 - DNA, 25 bp, SARS Virus
gaagtccacatctaagaccaagacc

SEQ ID NO: 225315 - DNA, 25 bp, SARS Virus
aagtccacatcctagaccaagaccg

SEQ ID NO: 225316 - DNA, 25 bp, SARS Virus
agtccacatccatgaccaagaccga

SEQ ID NO: 225317 - DNA, 25 bp, SARS Virus
gtccacatccaataccaagaccgag

SEQ ID NO: 225318 - DNA, 25 bp, SARS Virus
tccacatccaagtccaagaccgagt

SEQ ID NO: 225319 - DNA, 25 bp, SARS Virus
ccacatccaagatcaagaccgagtt

SEQ ID NO: 225320 - DNA, 25 bp, SARS Virus
cacatccaagactaagaccgagtta

SEQ ID NO: 225321 - DNA, 25 bp, SARS Virus
acatccaagacctagaccgagttag

SEQ ID NO: 225322 - DNA, 25 bp, SARS Virus
catccaagaccatgaccgagttaga

SEQ ID NO: 225323 - DNA, 25 bp, SARS Virus
atccaagaccaataccgagttagag

SEQ ID NO: 225324 - DNA, 25 bp, SARS Virus
tccaagaccaagtccgagttagaga

SEQ ID NO: 225325 - DNA, 25 bp, SARS Virus
ccaagaccaagatcgagttagagac

SEQ ID NO: 225326 - DNA, 25 bp, SARS Virus
caagaccaagactgagttagagact

SEQ ID NO: 225327 - DNA, 25 bp, SARS Virus
aagaccaagacctagttagagacta

SEQ ID NO: 225328 - DNA, 25 bp, SARS Virus
agaccaagaccgtgttagagactaa

SEQ ID NO: 225329 - DNA, 25 bp, SARS Virus
gaccaagaccgatttagagactaac

SEQ ID NO: 225330 - DNA, 25 bp, SARS Virus
accaagaccgagttagagactaacg

SEQ ID NO: 225331 - DNA, 25 bp, SARS Virus
ccaagaccgagttagagactaacga

SEQ ID NO: 225332 - DNA, 25 bp, SARS Virus
caagaccgagtttgagactaacgag

SEQ ID NO: 225333 - DNA, 25 bp, SARS Virus
aagaccgagttatagactaacgagt

SEQ ID NO: 225334 - DNA, 25 bp, SARS Virus
agaccgagttagtgactaacgagtc

SEQ ID NO: 225335 - DNA, 25 bp, SARS Virus
gaccgagttagatactaacgagtca

SEQ ID NO: 225336 - DNA, 25 bp, SARS Virus
accgagttagagtctaacgagtcat

SEQ ID NO: 225337 - DNA, 25 bp, SARS Virus
ccgagttagagattaacgagtcatc

SEQ ID NO: 225338 - DNA, 25 bp, SARS Virus
cgagttagagactaacgagtcatca

SEQ ID NO: 225339 - DNA, 25 bp, SARS Virus
gagttagagacttacgagtcatcat

SEQ ID NO: 225340 - DNA, 25 bp, SARS Virus
agttagagactatcgagtcatcata

SEQ ID NO: 225341 - DNA, 25 bp, SARS Virus
gttagagactaatgagtcatcatag

SEQ ID NO: 225342 - DNA, 25 bp, SARS Virus
ttagagactaactagtcatcatagt

SEQ ID NO: 225343 - DNA, 25 bp, SARS Virus
tagagactaacgtgtcatcatagta

SEQ ID NO: 225344 - DNA, 25 bp, SARS Virus
agagactaacgattcatcatagtag

SEQ ID NO: 225345 - DNA, 25 bp, SARS Virus
gagactaacgagtcatcatagtagg

SEQ ID NO: 225346 - DNA, 25 bp, SARS Virus
agactaacgagttatcatagtaggt

SEQ ID NO: 225347 - DNA, 25 bp, SARS Virus
gactaacgagtcttcatagtaggtc

SEQ ID NO: 225348 - DNA, 25 bp, SARS Virus
actaacgagtcatcatagtaggtcg

SEQ ID NO: 225349 - DNA, 25 bp, SARS Virus
ctaacgagtcattatagtaggtcgg

SEQ ID NO: 225350 - DNA, 25 bp, SARS Virus
taacgagtcatcttagtaggtcggt

SEQ ID NO: 225351 - DNA, 25 bp, SARS Virus
aacgagtcatcatagtaggtcggtc

SEQ ID NO: 225352 - DNA, 25 bp, SARS Virus
acgagtcatcattgtaggtcggtca

SEQ ID NO: 225353 - DNA, 25 bp, SARS Virus
cgagtcatcatattaggtcggtcag

SEQ ID NO: 225354 - DNA, 25 bp, SARS Virus
gagtcatcatagtaggtcggtcaga

SEQ ID NO: 225355 - DNA, 25 bp, SARS Virus
agtcatcatagttggtcggtcagaa

SEQ ID NO: 225356 - DNA, 25 bp, SARS Virus
gtcatcatagtatgtcggtcagaag

SEQ ID NO: 225357 - DNA, 25 bp, SARS Virus
tcatcatagtagttcggtcagaagg

SEQ ID NO: 225358 - DNA, 25 bp, SARS Virus
catcatagtaggtcggtcagaagga

SEQ ID NO: 225359 - DNA, 25 bp, SARS Virus
atcatagtaggttggtcagaaggag

SEQ ID NO: 225360 - DNA, 25 bp, SARS Virus
tcatagtaggtctgtcagaaggaga

SEQ ID NO: 225361 - DNA, 25 bp, SARS Virus
catagtaggtcgttcagaaggagaa

SEQ ID NO: 225362 - DNA, 25 bp, SARS Virus
atagtaggtcggtcagaaggagaag

SEQ ID NO: 225363 - DNA, 25 bp, SARS Virus
tagtaggtcggttagaaggagaaga

SEQ ID NO: 225364 - DNA, 25 bp, SARS Virus
agtaggtcggtctgaaggagaagaa

SEQ ID NO: 225365 - DNA, 25 bp, SARS Virus
gtaggtcggtcataaggagaagaag

SEQ ID NO: 225366 - DNA, 25 bp, SARS Virus
taggtcggtcagtaggagaagaaga

SEQ ID NO: 225367 - DNA, 25 bp, SARS Virus
aggtcggtcagatggagaagaagaa

SEQ ID NO: 225368 - DNA, 25 bp, SARS Virus
ggtcggtcagaatgagaagaagaag

SEQ ID NO: 225369 - DNA, 25 bp, SARS Virus
gtcggtcagaagtagaagaagaagg

SEQ ID NO: 225370 - DNA, 25 bp, SARS Virus
tcggtcagaaggtgaagaagaagga

SEQ ID NO: 225371 - DNA, 25 bp, SARS Virus
cggtcagaaggataagaagaaggag

SEQ ID NO: 225372 - DNA, 25 bp, SARS Virus
ggtcagaaggagtagaagaaggagt

SEQ ID NO: 225373 - DNA, 25 bp, SARS Virus
gtcagaaggagatgaagaaggagtt

SEQ ID NO: 225374 - DNA, 25 bp, SARS Virus
tcagaaggagaataagaaggagttg

SEQ ID NO: 225375 - DNA, 25 bp, SARS Virus
cagaaggagaagtagaaggagttga

SEQ ID NO: 225376 - DNA, 25 bp, SARS Virus
agaaggagaagatgaaggagttgag

SEQ ID NO: 225377 - DNA, 25 bp, SARS Virus
gaaggagaagaataaggagttgagc

SEQ ID NO: 225378 - DNA, 25 bp, SARS Virus
aaggagaagaagtaggagttgagct

SEQ ID NO: 225379 - DNA, 25 bp, SARS Virus
aggagaagaagatggagttgagctt

SEQ ID NO: 225380 - DNA, 25 bp, SARS Virus
ggagaagaagaatgagttgagcttg

SEQ ID NO: 225381 - DNA, 25 bp, SARS Virus
gagaagaagaagtagttgagcttga

SEQ ID NO: 225382 - DNA, 25 bp, SARS Virus
agaagaagaaggtgttgagcttgac

SEQ ID NO: 225383 - DNA, 25 bp, SARS Virus
gaagaagaaggatttgagcttgaca

SEQ ID NO: 225384 - DNA, 25 bp, SARS Virus
aagaagaaggagttgagcttgacaa

SEQ ID NO: 225385 - DNA, 25 bp, SARS Virus
agaagaaggagttgagcttgacaaa

SEQ ID NO: 225386 - DNA, 25 bp, SARS Virus
gaagaaggagtttagcttgacaaag

SEQ ID NO: 225387 - DNA, 25 bp, SARS Virus
aagaaggagttgtgcttgacaaagt

SEQ ID NO: 225388 - DNA, 25 bp, SARS Virus
agaaggagttgatcttgacaaagtc

SEQ ID NO: 225389 - DNA, 25 bp, SARS Virus
gaaggagttgagtttgacaaagtcg

SEQ ID NO: 225390 - DNA, 25 bp, SARS Virus
aaggagttgagcttgacaaagtcga

SEQ ID NO: 225391 - DNA, 25 bp, SARS Virus
aggagttgagcttgacaaagtcgac

SEQ ID NO: 225392 - DNA, 25 bp, SARS Virus
ggagttgagctttacaaagtcgact

SEQ ID NO: 225393 - DNA, 25 bp, SARS Virus
gagttgagcttgtcaaagtcgactc

SEQ ID NO: 225394 - DNA, 25 bp, SARS Virus
agttgagcttgataaagtcgactcc

SEQ ID NO: 225395 - DNA, 25 bp, SARS Virus
gttgagcttgactaagtcgactccg

SEQ ID NO: 225396 - DNA, 25 bp, SARS Virus
ttgagcttgacatagtcgactccgt

SEQ ID NO: 225397 - DNA, 25 bp, SARS Virus
tgagcttgacaatgtcgactccgtg

SEQ ID NO: 225398 - DNA, 25 bp, SARS Virus
gagcttgacaaattcgactccgtgg

SEQ ID NO: 225399 - DNA, 25 bp, SARS Virus
agcttgacaaagtcgactccgtggt

SEQ ID NO: 225400 - DNA, 25 bp, SARS Virus
gcttgacaaagttgactccgtggtt

SEQ ID NO: 225401 - DNA, 25 bp, SARS Virus
cttgacaaagtctactccgtggttt

SEQ ID NO: 225402 - DNA, 25 bp, SARS Virus
ttgacaaagtcgtctccgtggttta

SEQ ID NO: 225403 - DNA, 25 bp, SARS Virus
tgacaaagtcgattccgtggtttaa

SEQ ID NO: 225404 - DNA, 25 bp, SARS Virus
gacaaagtcgactccgtggtttaag

SEQ ID NO: 225405 - DNA, 25 bp, SARS Virus
acaaagtcgacttcgtggtttaagg

SEQ ID NO: 225406 - DNA, 25 bp, SARS Virus
caaagtcgactctgtggtttaaggt

SEQ ID NO: 225407 - DNA, 25 bp, SARS Virus
aaagtcgactccttggtttaaggtc

SEQ ID NO: 225408 - DNA, 25 bp, SARS Virus
aagtcgactccgtggtttaaggtct

SEQ ID NO: 225409 - DNA, 25 bp, SARS Virus
agtcgactccgttgtttaaggtctc

SEQ ID NO: 225410 - DNA, 25 bp, SARS Virus
gtcgactccgtgttttaaggtctcc

SEQ ID NO: 225411 - DNA, 25 bp, SARS Virus
tcgactccgtggtttaaggtctccc

SEQ ID NO: 225412 - DNA, 25 bp, SARS Virus
cgactccgtggtttaaggtctccct

SEQ ID NO: 225413 - DNA, 25 bp, SARS Virus
gactccgtggtttaaggtctccctc

SEQ ID NO: 225414 - DNA, 25 bp, SARS Virus
actccgtggttttaggtctccctct

SEQ ID NO: 225415 - DNA, 25 bp, SARS Virus
ctccgtggtttatggtctccctctg

SEQ ID NO: 225416 - DNA, 25 bp, SARS Virus
tccgtggtttaatgtctccctctgg

SEQ ID NO: 225417 - DNA, 25 bp, SARS Virus
ccgtggtttaagttctccctctgga

SEQ ID NO: 225418 - DNA, 25 bp, SARS Virus
cgtggtttaaggtctccctctggaa

SEQ ID NO: 225419 - DNA, 25 bp, SARS Virus
gtggtttaaggtttccctctggaac

SEQ ID NO: 225420 - DNA, 25 bp, SARS Virus
tggtttaaggtctccctctggaact

SEQ ID NO: 225421 - DNA, 25 bp, SARS Virus
ggtttaaggtcttcctctggaacta

SEQ ID NO: 225422 - DNA, 25 bp, SARS Virus
gtttaaggtctctctctggaactat

SEQ ID NO: 225423 - DNA, 25 bp, SARS Virus
tttaaggtctccttctggaactatt

SEQ ID NO: 225424 - DNA, 25 bp, SARS Virus
ttaaggtctccctctggaactatta

SEQ ID NO: 225425 - DNA, 25 bp, SARS Virus
taaggtctccctttggaactattag

SEQ ID NO: 225426 - DNA, 25 bp, SARS Virus
aaggtctccctctggaactattagt

SEQ ID NO: 225427 - DNA, 25 bp, SARS Virus
aggtctccctcttgaactattagta

SEQ ID NO: 225428 - DNA, 25 bp, SARS Virus
ggtctccctctgtaactattagtag

SEQ ID NO: 225429 - DNA, 25 bp, SARS Virus
gtctccctctggtactattagtagg

SEQ ID NO: 225430 - DNA, 25 bp, SARS Virus
tctccctctggatctattagtagga

SEQ ID NO: 225431 - DNA, 25 bp, SARS Virus
ctccctctggaattattagtaggag

SEQ ID NO: 225432 - DNA, 25 bp, SARS Virus
tccctctggaactattagtaggaga

SEQ ID NO: 225433 - DNA, 25 bp, SARS Virus
ccctctggaacttttagtaggagac

SEQ ID NO: 225434 - DNA, 25 bp, SARS Virus
cctctggaactattagtaggagaca

SEQ ID NO: 225435 - DNA, 25 bp, SARS Virus
ctctggaactattagtaggagacat

SEQ ID NO: 225436 - DNA, 25 bp, SARS Virus
tctggaactatttgtaggagacatg

SEQ ID NO: 225437 - DNA, 25 bp, SARS Virus
ctggaactattattaggagacatgg

SEQ ID NO: 225438 - DNA, 25 bp, SARS Virus
tggaactattagtaggagacatggc

SEQ ID NO: 225439 - DNA, 25 bp, SARS Virus
ggaactattagttggagacatggca

SEQ ID NO: 225440 - DNA, 25 bp, SARS Virus
gaactattagtatgagacatggcat

SEQ ID NO: 225441 - DNA, 25 bp, SARS Virus
aactattagtagtagacatggcatg

SEQ ID NO: 225442 - DNA, 25 bp, SARS Virus
actattagtaggtgacatggcatga

SEQ ID NO: 225443 - DNA, 25 bp, SARS Virus
ctattagtaggatacatggcatgag

SEQ ID NO: 225444 - DNA, 25 bp, SARS Virus
tattagtaggagtcatggcatgagt

SEQ ID NO: 225445 - DNA, 25 bp, SARS Virus
attagtaggagatatggcatgagta

SEQ ID NO: 225446 - DNA, 25 bp, SARS Virus
ttagtaggagacttggcatgagtac

SEQ ID NO: 225447 - DNA, 25 bp, SARS Virus
tagtaggagacatggcatgagtaca

SEQ ID NO: 225448 - DNA, 25 bp, SARS Virus
agtaggagacattgcatgagtacaa

SEQ ID NO: 225449 - DNA, 25 bp, SARS Virus
gtaggagacatgtcatgagtacaag

SEQ ID NO: 225450 - DNA, 25 bp, SARS Virus
taggagacatggtatgagtacaagt

SEQ ID NO: 225451 - DNA, 25 bp, SARS Virus
aggagacatggcttgagtacaagtg

SEQ ID NO: 225452 - DNA, 25 bp, SARS Virus
ggagacatggcatgagtacaagtgt

SEQ ID NO: 225453 - DNA, 25 bp, SARS Virus
gagacatggcattagtacaagtgtc

SEQ ID NO: 225454 - DNA, 25 bp, SARS Virus
agacatggcatgtgtacaagtgtcc

SEQ ID NO: 225455 - DNA, 25 bp, SARS Virus
gacatggcatgattacaagtgtcca

SEQ ID NO: 225456 - DNA, 25 bp, SARS Virus
acatggcatgagtacaagtgtccaa

SEQ ID NO: 225457 - DNA, 25 bp, SARS Virus
catggcatgagttcaagtgtccaaa

SEQ ID NO: 225458 - DNA, 25 bp, SARS Virus
atggcatgagtataagtgtccaaag

SEQ ID NO: 225459 - DNA, 25 bp, SARS Virus
tggcatgagtactagtgtccaaagt

SEQ ID NO: 225460 - DNA, 25 bp, SARS Virus
ggcatgagtacatgtgtccaaagta

SEQ ID NO: 225461 - DNA, 25 bp, SARS Virus
gcatgagtacaattgtccaaagtag

SEQ ID NO: 225462 - DNA, 25 bp, SARS Virus
catgagtacaagtgtccaaagtagt

SEQ ID NO: 225463 - DNA, 25 bp, SARS Virus
atgagtacaagtttccaaagtagtt

SEQ ID NO: 225464 - DNA, 25 bp, SARS Virus
tgagtacaagtgtccaaagtagtta

SEQ ID NO: 225465 - DNA, 25 bp, SARS Virus
gagtacaagtgttcaaagtagttaa

SEQ ID NO: 225466 - DNA, 25 bp, SARS Virus
agtacaagtgtctaaagtagttaaa

SEQ ID NO: 225467 - DNA, 25 bp, SARS Virus
gtacaagtgtcctaagtagttaaag

SEQ ID NO: 225468 - DNA, 25 bp, SARS Virus
tacaagtgtccatagtagttaaaga

SEQ ID NO: 225469 - DNA, 25 bp, SARS Virus
acaagtgtccaatgtagttaaagaa

SEQ ID NO: 225470 - DNA, 25 bp, SARS Virus
caagtgtccaaattagttaaagaag

SEQ ID NO: 225471 - DNA, 25 bp, SARS Virus
aagtgtccaaagtagttaaagaaga

SEQ ID NO: 225472 - DNA, 25 bp, SARS Virus
agtgtccaaagttgttaaagaagaa

SEQ ID NO: 225473 - DNA, 25 bp, SARS Virus
gtgtccaaagtatttaaagaagaag

SEQ ID NO: 225474 - DNA, 25 bp, SARS Virus
tgtccaaagtagttaaagaagaagg

SEQ ID NO: 225475 - DNA, 25 bp, SARS Virus
gtccaaagtagttaaagaagaagga

SEQ ID NO: 225476 - DNA, 25 bp, SARS Virus
tccaaagtagtttaagaagaaggag

SEQ ID NO: 225477 - DNA, 25 bp, SARS Virus
ccaaagtagttatagaagaaggagt

SEQ ID NO: 225478 - DNA, 25 bp, SARS Virus
caaagtagttaatgaagaaggagtg

SEQ ID NO: 225479 - DNA, 25 bp, SARS Virus
aaagtagttaaataagaaggagtgt

SEQ ID NO: 225480 - DNA, 25 bp, SARS Virus
aagtagttaaagtagaaggagtgtg

SEQ ID NO: 225481 - DNA, 25 bp, SARS Virus
agtagttaaagatgaaggagtgtga

SEQ ID NO: 225482 - DNA, 25 bp, SARS Virus
gtagttaaagaataaggagtgtgag

SEQ ID NO: 225483 - DNA, 25 bp, SARS Virus
tagttaaagaagtaggagtgtgaga

SEQ ID NO: 225484 - DNA, 25 bp, SARS Virus
agttaaagaagatggagtgtgagac

SEQ ID NO: 225485 - DNA, 25 bp, SARS Virus
gttaaagaagaatgagtgtgagacg

SEQ ID NO: 225486 - DNA, 25 bp, SARS Virus
ttaaagaagaagtagtgtgagacgt

SEQ ID NO: 225487 - DNA, 25 bp, SARS Virus
taaagaagaaggtgtgtgagacgta

SEQ ID NO: 225488 - DNA, 25 bp, SARS Virus
aaagaagaaggattgtgagacgtag

SEQ ID NO: 225489 - DNA, 25 bp, SARS Virus
aagaagaaggagagtgagacgtagc

SEQ ID NO: 225490 - DNA, 25 bp, SARS Virus
agaagaaggagtatgagacgtagca

SEQ ID NO: 225491 - DNA, 25 bp, SARS Virus
gaagaaggagtgagagacgtagcag

SEQ ID NO: 225492 - DNA, 25 bp, SARS Virus
aagaaggagtgtaagacgtagcagg

SEQ ID NO: 225493 - DNA, 25 bp, SARS Virus
agaaggagtgtgagacgtagcagga

SEQ ID NO: 225494 - DNA, 25 bp, SARS Virus
gaaggagtgtgaaacgtagcaggag

SEQ ID NO: 225495 - DNA, 25 bp, SARS Virus
aaggagtgtgagacgtagcaggaga

SEQ ID NO: 225496 - DNA, 25 bp, SARS Virus
aggagtgtgagaagtagcaggagaa

SEQ ID NO: 225497 - DNA, 25 bp, SARS Virus
ggagtgtgagacatagcaggagaag

SEQ ID NO: 225498 - DNA, 25 bp, SARS Virus
gagtgtgagacgaagcaggagaaga

SEQ ID NO: 225499 - DNA, 25 bp, SARS Virus
agtgtgagacgtagcaggagaagaa

SEQ ID NO: 225500 - DNA, 25 bp, SARS Virus
gtgtgagacgtaacaggagaagaag

SEQ ID NO: 225501 - DNA, 25 bp, SARS Virus
tgtgagacgtagaaggagaagaagg

SEQ ID NO: 225502 - DNA, 25 bp, SARS Virus
gtgagacgtagcaggagaagaagga

SEQ ID NO: 225503 - DNA, 25 bp, SARS Virus
tgagacgtagcaagagaagaaggag

SEQ ID NO: 225504 - DNA, 25 bp, SARS Virus
gagacgtagcagaagaagaaggagt

SEQ ID NO: 225505 - DNA, 25 bp, SARS Virus
agacgtagcaggagaagaaggagta

SEQ ID NO: 225506 - DNA, 25 bp, SARS Virus
gacgtagcaggaaaagaaggagtag

SEQ ID NO: 225507 - DNA, 25 bp, SARS Virus
acgtagcaggagaagaaggagtaga

SEQ ID NO: 225508 - DNA, 25 bp, SARS Virus
cgtagcaggagaagaaggagtagac

SEQ ID NO: 225509 - DNA, 25 bp, SARS Virus
gtagcaggagaaaaaggagtagacc

SEQ ID NO: 225510 - DNA, 25 bp, SARS Virus
tagcaggagaagaaggagtagacct

SEQ ID NO: 225511 - DNA, 25 bp, SARS Virus
agcaggagaagaaggagtagacctc

SEQ ID NO: 225512 - DNA, 25 bp, SARS Virus
gcaggagaagaaagagtagacctcc

SEQ ID NO: 225513 - DNA, 25 bp, SARS Virus
caggagaagaagaagtagacctccc

SEQ ID NO: 225514 - DNA, 25 bp, SARS Virus
aggagaagaaggagtagacctccca

SEQ ID NO: 225515 - DNA, 25 bp, SARS Virus
ggagaagaaggaatagacctcccat

SEQ ID NO: 225516 - DNA, 25 bp, SARS Virus
gagaagaaggagaagacctcccatt

SEQ ID NO: 225517 - DNA, 25 bp, SARS Virus
agaagaaggagtagacctcccattt

SEQ ID NO: 225518 - DNA, 25 bp, SARS Virus
gaagaaggagtaaacctcccatttt

SEQ ID NO: 225519 - DNA, 25 bp, SARS Virus
aagaaggagtagacctcccattttc

SEQ ID NO: 225520 - DNA, 25 bp, SARS Virus
agaaggagtagaactcccattttcc

SEQ ID NO: 225521 - DNA, 25 bp, SARS Virus
gaaggagtagacatcccattttcct

SEQ ID NO: 225522 - DNA, 25 bp, SARS Virus
aaggagtagaccacccattttcctt

SEQ ID NO: 225523 - DNA, 25 bp, SARS Virus
aggagtagacctaccattttccttg

SEQ ID NO: 225524 - DNA, 25 bp, SARS Virus
ggagtagacctcacattttccttgt

SEQ ID NO: 225525 - DNA, 25 bp, SARS Virus
gagtagacctccaattttccttgtt

SEQ ID NO: 225526 - DNA, 25 bp, SARS Virus
agtagacctcccattttccttgtta

SEQ ID NO: 225527 - DNA, 25 bp, SARS Virus
gtagacctcccaatttccttgttat

SEQ ID NO: 225528 - DNA, 25 bp, SARS Virus
tagacctcccatattccttgttatg

SEQ ID NO: 225529 - DNA, 25 bp, SARS Virus
agacctcccattatccttgttatgt

SEQ ID NO: 225530 - DNA, 25 bp, SARS Virus
gacctcccatttaccttgttatgta

SEQ ID NO: 225531 - DNA, 25 bp, SARS Virus
acctcccattttacttgttatgtat

SEQ ID NO: 225532 - DNA, 25 bp, SARS Virus
cctcccattttcattgttatgtatg

SEQ ID NO: 225533 - DNA, 25 bp, SARS Virus
ctcccattttccatgttatgtatgc

SEQ ID NO: 225534 - DNA, 25 bp, SARS Virus
tcccattttcctagttatgtatgca

SEQ ID NO: 225535 - DNA, 25 bp, SARS Virus
cccattttccttattatgtatgcac

SEQ ID NO: 225536 - DNA, 25 bp, SARS Virus
ccattttccttgatatgtatgcact

SEQ ID NO: 225537 - DNA, 25 bp, SARS Virus
cattttccttgtaatgtatgcacta

SEQ ID NO: 225538 - DNA, 25 bp, SARS Virus
attttccttgttatgtatgcactac

SEQ ID NO: 225539 - DNA, 25 bp, SARS Virus
ttttccttgttaagtatgcactact

SEQ ID NO: 225540 - DNA, 25 bp, SARS Virus
tttccttgttatatatgcactactt

SEQ ID NO: 225541 - DNA, 25 bp, SARS Virus
ttccttgttatgaatgcactacttt

SEQ ID NO: 225542 - DNA, 25 bp, SARS Virus
tccttgttatgtatgcactactttt

SEQ ID NO: 225543 - DNA, 25 bp, SARS Virus
ccttgttatgtaagcactacttttc

SEQ ID NO: 225544 - DNA, 25 bp, SARS Virus
cttgttatgtatacactacttttca

SEQ ID NO: 225545 - DNA, 25 bp, SARS Virus
ttgttatgtatgaactacttttcaa

SEQ ID NO: 225546 - DNA, 25 bp, SARS Virus
tgttatgtatgcactacttttcaaa

SEQ ID NO: 225547 - DNA, 25 bp, SARS Virus
gttatgtatgcaatacttttcaaaa

SEQ ID NO: 225548 - DNA, 25 bp, SARS Virus
ttatgtatgcacaacttttcaaaag

SEQ ID NO: 225549 - DNA, 25 bp, SARS Virus
tatgtatgcactacttttcaaaaga

SEQ ID NO: 225550 - DNA, 25 bp, SARS Virus
atgtatgcactaattttcaaaagaa

SEQ ID NO: 225551 - DNA, 25 bp, SARS Virus
tgtatgcactacatttcaaaagaag

SEQ ID NO: 225552 - DNA, 25 bp, SARS Virus
gtatgcactactattcaaaagaagt

SEQ ID NO: 225553 - DNA, 25 bp, SARS Virus
tatgcactacttatcaaaagaagtg

SEQ ID NO: 225554 - DNA, 25 bp, SARS Virus
atgcactactttacaaaagaagtgg

SEQ ID NO: 225555 - DNA, 25 bp, SARS Virus
tgcactacttttaaaaagaagtggt

SEQ ID NO: 225556 - DNA, 25 bp, SARS Virus
gcactacttttcaaaagaagtggtc

SEQ ID NO: 225557 - DNA, 25 bp, SARS Virus
cactacttttcaaaagaagtggtcg

SEQ ID NO: 225558 - DNA, 25 bp, SARS Virus
actacttttcaaaagaagtggtcgt

SEQ ID NO: 225559 - DNA, 25 bp, SARS Virus
ctacttttcaaaagaagtggtcgta

SEQ ID NO: 225560 - DNA, 25 bp, SARS Virus
tacttttcaaaaaaagtggtcgtag

SEQ ID NO: 225561 - DNA, 25 bp, SARS Virus
acttttcaaaagaagtggtcgtagt

SEQ ID NO: 225562 - DNA, 25 bp, SARS Virus
cttttcaaaagaagtggtcgtagta

SEQ ID NO: 225563 - DNA, 25 bp, SARS Virus
ttttcaaaagaaatggtcgtagtag

SEQ ID NO: 225564 - DNA, 25 bp, SARS Virus
tttcaaaagaagaggtcgtagtagt

SEQ ID NO: 225565 - DNA, 25 bp, SARS Virus
ttcaaaagaagtagtcgtagtagtt

SEQ ID NO: 225566 - DNA, 25 bp, SARS Virus
tcaaaagaagtgatcgtagtagttt

SEQ ID NO: 225567 - DNA, 25 bp, SARS Virus
caaaagaagtggacgtagtagttta

SEQ ID NO: 225568 - DNA, 25 bp, SARS Virus
aaaagaagtggtagtagtagtttat

SEQ ID NO: 225569 - DNA, 25 bp, SARS Virus
aaagaagtggtcatagtagtttatt

SEQ ID NO: 225570 - DNA, 25 bp, SARS Virus
aagaagtggtcgaagtagtttattc

SEQ ID NO: 225571 - DNA, 25 bp, SARS Virus
agaagtggtcgtagtagtttattca

SEQ ID NO: 225572 - DNA, 25 bp, SARS Virus
gaagtggtcgtaatagtttattcat

SEQ ID NO: 225573 - DNA, 25 bp, SARS Virus
aagtggtcgtagaagtttattcatc

SEQ ID NO: 225574 - DNA, 25 bp, SARS Virus
agtggtcgtagtagtttattcatct

SEQ ID NO: 225575 - DNA, 25 bp, SARS Virus
gtggtcgtagtaatttattcatctt

SEQ ID NO: 225576 - DNA, 25 bp, SARS Virus
tggtcgtagtagattattcatctta

SEQ ID NO: 225577 - DNA, 25 bp, SARS Virus
ggtcgtagtagtatattcatcttac

SEQ ID NO: 225578 - DNA, 25 bp, SARS Virus
gtcgtagtagttaattcatcttaca

SEQ ID NO: 225579 - DNA, 25 bp, SARS Virus
tcgtagtagtttattcatcttacat

SEQ ID NO: 225580 - DNA, 25 bp, SARS Virus
cgtagtagtttaatcatcttacatc

SEQ ID NO: 225581 - DNA, 25 bp, SARS Virus
gtagtagtttatacatcttacatcg

SEQ ID NO: 225582 - DNA, 25 bp, SARS Virus
tagtagtttattaatcttacatcga

SEQ ID NO: 225583 - DNA, 25 bp, SARS Virus
agtagtttattcatcttacatcgat

SEQ ID NO: 225584 - DNA, 25 bp, SARS Virus
gtagtttattcaacttacatcgatg

SEQ ID NO: 225585 - DNA, 25 bp, SARS Virus
tagtttattcatattacatcgatgt

SEQ ID NO: 225586 - DNA, 25 bp, SARS Virus
agtttattcatcatacatcgatgtg

SEQ ID NO: 225587 - DNA, 25 bp, SARS Virus
gtttattcatctaacatcgatgtga

SEQ ID NO: 225588 - DNA, 25 bp, SARS Virus
tttattcatcttacatcgatgtgag

SEQ ID NO: 225589 - DNA, 25 bp, SARS Virus
ttattcatcttaaatcgatgtgagg

SEQ ID NO: 225590 - DNA, 25 bp, SARS Virus
tattcatcttacatcgatgtgaggt

SEQ ID NO: 225591 - DNA, 25 bp, SARS Virus
attcatcttacaacgatgtgaggtg

SEQ ID NO: 225592 - DNA, 25 bp, SARS Virus
ttcatcttacatagatgtgaggtga

SEQ ID NO: 225593 - DNA, 25 bp, SARS Virus
tcatcttacatcaatgtgaggtgag

SEQ ID NO: 225594 - DNA, 25 bp, SARS Virus
catcttacatcgatgtgaggtgagt

SEQ ID NO: 225595 - DNA, 25 bp, SARS Virus
atcttacatcgaagtgaggtgagta

SEQ ID NO: 225596 - DNA, 25 bp, SARS Virus
tcttacatcgatatgaggtgagtag

SEQ ID NO: 225597 - DNA, 25 bp, SARS Virus
cttacatcgatgagaggtgagtagt

SEQ ID NO: 225598 - DNA, 25 bp, SARS Virus
ttacatcgatgtaaggtgagtagtt

SEQ ID NO: 225599 - DNA, 25 bp, SARS Virus
tacatcgatgtgaggtgagtagttc

SEQ ID NO: 225600 - DNA, 25 bp, SARS Virus
acatcgatgtgaagtgagtagttct

SEQ ID NO: 225601 - DNA, 25 bp, SARS Virus
catcgatgtgagatgagtagttcta

SEQ ID NO: 225602 - DNA, 25 bp, SARS Virus
atcgatgtgaggagagtagttctag

SEQ ID NO: 225603 - DNA, 25 bp, SARS Virus
tcgatgtgaggtaagtagttctagt

SEQ ID NO: 225604 - DNA, 25 bp, SARS Virus
cgatgtgaggtgagtagttctagtt

SEQ ID NO: 225605 - DNA, 25 bp, SARS Virus
gatgtgaggtgaatagttctagtta

SEQ ID NO: 225606 - DNA, 25 bp, SARS Virus
atgtgaggtgagaagttctagttat

SEQ ID NO: 225607 - DNA, 25 bp, SARS Virus
tgtgaggtgagtagttctagttatg

SEQ ID NO: 225608 - DNA, 25 bp, SARS Virus
gtgaggtgagtaattctagttatgg

SEQ ID NO: 225609 - DNA, 25 bp, SARS Virus
tgaggtgagtagatctagttatggg

SEQ ID NO: 225610 - DNA, 25 bp, SARS Virus
gaggtgagtagtactagttatgggt

SEQ ID NO: 225611 - DNA, 25 bp, SARS Virus
aggtgagtagttatagttatgggta

SEQ ID NO: 225612 - DNA, 25 bp, SARS Virus
ggtgagtagttcaagttatgggtac

SEQ ID NO: 225613 - DNA, 25 bp, SARS Virus
gtgagtagttctagttatgggtaca

SEQ ID NO: 225614 - DNA, 25 bp, SARS Virus
tgagtagttctaattatgggtacaa

SEQ ID NO: 225615 - DNA, 25 bp, SARS Virus
gagtagttctagatatgggtacaac

SEQ ID NO: 225616 - DNA, 25 bp, SARS Virus
agtagttctagtaatgggtacaacc

SEQ ID NO: 225617 - DNA, 25 bp, SARS Virus
gtagttctagttatgggtacaacca

SEQ ID NO: 225618 - DNA, 25 bp, SARS Virus
tagttctagttaagggtacaaccat

SEQ ID NO: 225619 - DNA, 25 bp, SARS Virus
agttctagttataggtacaaccatt

SEQ ID NO: 225620 - DNA, 25 bp, SARS Virus
gttctagttatgagtacaaccattc

SEQ ID NO: 225621 - DNA, 25 bp, SARS Virus
ttctagttatggatacaaccattcc

SEQ ID NO: 225622 - DNA, 25 bp, SARS Virus
tctagttatgggaacaaccattcct

SEQ ID NO: 225623 - DNA, 25 bp, SARS Virus
ctagttatgggtacaaccattcctc

SEQ ID NO: 225624 - DNA, 25 bp, SARS Virus
tagttatgggtaaaaccattcctct

SEQ ID NO: 225625 - DNA, 25 bp, SARS Virus
agttatgggtacaaccattcctcta

SEQ ID NO: 225626 - DNA, 25 bp, SARS Virus
gttatgggtacaaccattcctctag

SEQ ID NO: 225627 - DNA, 25 bp, SARS Virus
ttatgggtacaaacattcctctagt

SEQ ID NO: 225628 - DNA, 25 bp, SARS Virus
tatgggtacaacaattcctctagtc

SEQ ID NO: 225629 - DNA, 25 bp, SARS Virus
atgggtacaaccattcctctagtct

SEQ ID NO: 225630 - DNA, 25 bp, SARS Virus
tgggtacaaccaatcctctagtctt

SEQ ID NO: 225631 - DNA, 25 bp, SARS Virus
gggtacaaccatacctctagtcttt

SEQ ID NO: 225632 - DNA, 25 bp, SARS Virus
ggtacaaccattactctagtctttg

SEQ ID NO: 225633 - DNA, 25 bp, SARS Virus
gtacaaccattcatctagtctttga

SEQ ID NO: 225634 - DNA, 25 bp, SARS Virus
tacaaccattccactagtctttgac

SEQ ID NO: 225635 - DNA, 25 bp, SARS Virus
acaaccattcctatagtctttgacc

SEQ ID NO: 225636 - DNA, 25 bp, SARS Virus
caaccattcctcaagtctttgacca

SEQ ID NO: 225637 - DNA, 25 bp, SARS Virus
aaccattcctctagtctttgaccaa

SEQ ID NO: 225638 - DNA, 25 bp, SARS Virus
accattcctctaatctttgaccaac

SEQ ID NO: 225639 - DNA, 25 bp, SARS Virus
ccattcctctagactttgaccaaca

SEQ ID NO: 225640 - DNA, 25 bp, SARS Virus
cattcctctagtatttgaccaacat

SEQ ID NO: 225641 - DNA, 25 bp, SARS Virus
attcctctagtcattgaccaacatt

SEQ ID NO: 225642 - DNA, 25 bp, SARS Virus
ttcctctagtctatgaccaacattt

SEQ ID NO: 225643 - DNA, 25 bp, SARS Virus
tcctctagtcttagaccaacatttc

SEQ ID NO: 225644 - DNA, 25 bp, SARS Virus
cctctagtctttaaccaacatttca

SEQ ID NO: 225645 - DNA, 25 bp, SARS Virus
ctctagtctttgaccaacatttcag

SEQ ID NO: 225646 - DNA, 25 bp, SARS Virus
tctagtctttgaacaacatttcaga

SEQ ID NO: 225647 - DNA, 25 bp, SARS Virus
ctagtctttgacaaacatttcagaa

SEQ ID NO: 225648 - DNA, 25 bp, SARS Virus
tagtctttgaccaacatttcagaag

SEQ ID NO: 225649 - DNA, 25 bp, SARS Virus
agtctttgaccaacatttcagaagt

SEQ ID NO: 225650 - DNA, 25 bp, SARS Virus
gtctttgaccaaaatttcagaagtg

SEQ ID NO: 225651 - DNA, 25 bp, SARS Virus
tctttgaccaacatttcagaagtgt

SEQ ID NO: 225652 - DNA, 25 bp, SARS Virus
ctttgaccaacaattcagaagtgtt

SEQ ID NO: 225653 - DNA, 25 bp, SARS Virus
tttgaccaacatatcagaagtgttg

SEQ ID NO: 225654 - DNA, 25 bp, SARS Virus
ttgaccaacattacagaagtgttgt

SEQ ID NO: 225655 - DNA, 25 bp, SARS Virus
tgaccaacatttaagaagtgttgtc

SEQ ID NO: 225656 - DNA, 25 bp, SARS Virus
gaccaacatttcagaagtgttgtcg

SEQ ID NO: 225657 - DNA, 25 bp, SARS Virus
accaacatttcaaaagtgttgtcgg

SEQ ID NO: 225658 - DNA, 25 bp, SARS Virus
ccaacatttcagaagtgttgtcgga

SEQ ID NO: 225659 - DNA, 25 bp, SARS Virus
caacatttcagaagtgttgtcggag

SEQ ID NO: 225660 - DNA, 25 bp, SARS Virus
aacatttcagaaatgttgtcggaga

SEQ ID NO: 225661 - DNA, 25 bp, SARS Virus
acatttcagaagagttgtcggagac

SEQ ID NO: 225662 - DNA, 25 bp, SARS Virus
catttcagaagtattgtcggagacg

SEQ ID NO: 225663 - DNA, 25 bp, SARS Virus
atttcagaagtgatgtcggagacga

SEQ ID NO: 225664 - DNA, 25 bp, SARS Virus
tttcagaagtgtagtcggagacgat

SEQ ID NO: 225665 - DNA, 25 bp, SARS Virus
ttcagaagtgttatcggagacgatg

SEQ ID NO: 225666 - DNA, 25 bp, SARS Virus
tcagaagtgttgacggagacgatgt

SEQ ID NO: 225667 - DNA, 25 bp, SARS Virus
cagaagtgttgtaggagacgatgtt

SEQ ID NO: 225668 - DNA, 25 bp, SARS Virus
agaagtgttgtcagagacgatgttg

SEQ ID NO: 225669 - DNA, 25 bp, SARS Virus
gaagtgttgtcgaagacgatgttgt

SEQ ID NO: 225670 - DNA, 25 bp, SARS Virus
aagtgttgtcggagacgatgttgtg

SEQ ID NO: 225671 - DNA, 25 bp, SARS Virus
agtgttgtcggaaacgatgttgtgt

SEQ ID NO: 225672 - DNA, 25 bp, SARS Virus
gtgttgtcggagacgatgttgtgta

SEQ ID NO: 225673 - DNA, 25 bp, SARS Virus
tgttgtcggagaagatgttgtgtac

SEQ ID NO: 225674 - DNA, 25 bp, SARS Virus
gttgtcggagacaatgttgtgtacg

SEQ ID NO: 225675 - DNA, 25 bp, SARS Virus
ttgtcggagacgatgttgtgtacgt

SEQ ID NO: 225676 - DNA, 25 bp, SARS Virus
tgtcggagacgaagttgtgtacgtt

SEQ ID NO: 225677 - DNA, 25 bp, SARS Virus
gtcggagacgatattgtgtacgttt

SEQ ID NO: 225678 - DNA, 25 bp, SARS Virus
tcggagacgatgatgtgtacgtttg

SEQ ID NO: 225679 - DNA, 25 bp, SARS Virus
cggagacgatgtagtgtacgtttga

SEQ ID NO: 225680 - DNA, 25 bp, SARS Virus
ggagacgatgttatgtacgtttgag

SEQ ID NO: 225681 - DNA, 25 bp, SARS Virus
gagacgatgttgagtacgtttgagt

SEQ ID NO: 225682 - DNA, 25 bp, SARS Virus
agacgatgttgtatacgtttgagtc

SEQ ID NO: 225683 - DNA, 25 bp, SARS Virus
gacgatgttgtgaacgtttgagtca

SEQ ID NO: 225684 - DNA, 25 bp, SARS Virus
acgatgttgtgtacgtttgagtcat

SEQ ID NO: 225685 - DNA, 25 bp, SARS Virus
cgatgttgtgtaagtttgagtcatt

SEQ ID NO: 225686 - DNA, 25 bp, SARS Virus
gatgttgtgtacatttgagtcattg

SEQ ID NO: 225687 - DNA, 25 bp, SARS Virus
atgttgtgtacgattgagtcattga

SEQ ID NO: 225688 - DNA, 25 bp, SARS Virus
tgttgtgtacgtatgagtcattgaa

SEQ ID NO: 225689 - DNA, 25 bp, SARS Virus
gttgtgtacgttagagtcattgaag

SEQ ID NO: 225690 - DNA, 25 bp, SARS Virus
ttgtgtacgtttaagtcattgaagc

SEQ ID NO: 225691 - DNA, 25 bp, SARS Virus
tgtgtacgtttgagtcattgaagcc

SEQ ID NO: 225692 - DNA, 25 bp, SARS Virus
gtgtacgtttgaatcattgaagcca

SEQ ID NO: 225693 - DNA, 25 bp, SARS Virus
tgtacgtttgagacattgaagccat

SEQ ID NO: 225694 - DNA, 25 bp, SARS Virus
gtacgtttgagtaattgaagccatg

SEQ ID NO: 225695 - DNA, 25 bp, SARS Virus
tacgtttgagtcattgaagccatgg

SEQ ID NO: 225696 - DNA, 25 bp, SARS Virus
acgtttgagtcaatgaagccatggc

SEQ ID NO: 225697 - DNA, 25 bp, SARS Virus
cgtttgagtcatagaagccatggcc

SEQ ID NO: 225698 - DNA, 25 bp, SARS Virus
gtttgagtcattaaagccatggcct

SEQ ID NO: 225699 - DNA, 25 bp, SARS Virus
tttgagtcattgaagccatggccta

SEQ ID NO: 225700 - DNA, 25 bp, SARS Virus
ttgagtcattgaagccatggcctaa

SEQ ID NO: 225701 - DNA, 25 bp, SARS Virus
tgagtcattgaaaccatggcctaag

SEQ ID NO: 225702 - DNA, 25 bp, SARS Virus
gagtcattgaagacatggcctaagt

SEQ ID NO: 225703 - DNA, 25 bp, SARS Virus
agtcattgaagcaatggcctaagtt

SEQ ID NO: 225704 - DNA, 25 bp, SARS Virus
gtcattgaagccatggcctaagttg

SEQ ID NO: 225705 - DNA, 25 bp, SARS Virus
tcattgaagccaaggcctaagttgt

SEQ ID NO: 225706 - DNA, 25 bp, SARS Virus
cattgaagccatagcctaagttgtc

SEQ ID NO: 225707 - DNA, 25 bp, SARS Virus
attgaagccatgacctaagttgtca

SEQ ID NO: 225708 - DNA, 25 bp, SARS Virus
ttgaagccatggactaagttgtcac

SEQ ID NO: 225709 - DNA, 25 bp, SARS Virus
tgaagccatggcataagttgtcaca

SEQ ID NO: 225710 - DNA, 25 bp, SARS Virus
gaagccatggccaaagttgtcacat

SEQ ID NO: 225711 - DNA, 25 bp, SARS Virus
aagccatggcctaagttgtcacatc

SEQ ID NO: 225712 - DNA, 25 bp, SARS Virus
agccatggcctaagttgtcacatct

SEQ ID NO: 225713 - DNA, 25 bp, SARS Virus
gccatggcctaaattgtcacatctg

SEQ ID NO: 225714 - DNA, 25 bp, SARS Virus
ccatggcctaagatgtcacatctgt

SEQ ID NO: 225715 - DNA, 25 bp, SARS Virus
catggcctaagtagtcacatctgtc

SEQ ID NO: 225716 - DNA, 25 bp, SARS Virus
atggcctaagttatcacatctgtct

SEQ ID NO: 225717 - DNA, 25 bp, SARS Virus
tggcctaagttgacacatctgtctc

SEQ ID NO: 225718 - DNA, 25 bp, SARS Virus
ggcctaagttgtaacatctgtctcg

SEQ ID NO: 225719 - DNA, 25 bp, SARS Virus
gcctaagttgtcacatctgtctcgt

SEQ ID NO: 225720 - DNA, 25 bp, SARS Virus
cctaagttgtcaaatctgtctcgtg

SEQ ID NO: 225721 - DNA, 25 bp, SARS Virus
ctaagttgtcacatctgtctcgtga

SEQ ID NO: 225722 - DNA, 25 bp, SARS Virus
taagttgtcacaactgtctcgtgaa

SEQ ID NO: 225723 - DNA, 25 bp, SARS Virus
aagttgtcacatatgtctcgtgaaa

SEQ ID NO: 225724 - DNA, 25 bp, SARS Virus
agttgtcacatcagtctcgtgaaaa

SEQ ID NO: 225725 - DNA, 25 bp, SARS Virus
gttgtcacatctatctcgtgaaaag

SEQ ID NO: 225726 - DNA, 25 bp, SARS Virus
ttgtcacatctgactcgtgaaaagt

SEQ ID NO: 225727 - DNA, 25 bp, SARS Virus
tgtcacatctgtatcgtgaaaagta

SEQ ID NO: 225728 - DNA, 25 bp, SARS Virus
gtcacatctgtcacgtgaaaagtaa

SEQ ID NO: 225729 - DNA, 25 bp, SARS Virus
tcacatctgtctagtgaaaagtaat

SEQ ID NO: 225730 - DNA, 25 bp, SARS Virus
cacatctgtctcatgaaaagtaatt

SEQ ID NO: 225731 - DNA, 25 bp, SARS Virus
acatctgtctcgagaaaagtaattc

SEQ ID NO: 225732 - DNA, 25 bp, SARS Virus
catctgtctcgtaaaaagtaattcg

SEQ ID NO: 225733 - DNA, 25 bp, SARS Virus
atctgtctcgtgaaaagtaattcgt

SEQ ID NO: 225734 - DNA, 25 bp, SARS Virus
tctgtctcgtgaaaagtaattcgtg

SEQ ID NO: 225735 - DNA, 25 bp, SARS Virus
ctgtctcgtgaaaagtaattcgtga

SEQ ID NO: 225736 - DNA, 25 bp, SARS Virus
tgtctcgtgaaaagtaattcgtgaa

SEQ ID NO: 225737 - DNA, 25 bp, SARS Virus
gtctcgtgaaaaataattcgtgaaa

SEQ ID NO: 225738 - DNA, 25 bp, SARS Virus
tctcgtgaaaagaaattcgtgaaac

SEQ ID NO: 225739 - DNA, 25 bp, SARS Virus
ctcgtgaaaagtaattcgtgaaaca

SEQ ID NO: 225740 - DNA, 25 bp, SARS Virus
tcgtgaaaagtaattcgtgaaacag

SEQ ID NO: 225741 - DNA, 25 bp, SARS Virus
cgtgaaaagtaaatcgtgaaacagt

SEQ ID NO: 225742 - DNA, 25 bp, SARS Virus
gtgaaaagtaatacgtgaaacagtt

SEQ ID NO: 225743 - DNA, 25 bp, SARS Virus
tgaaaagtaattagtgaaacagttg

SEQ ID NO: 225744 - DNA, 25 bp, SARS Virus
gaaaagtaattcatgaaacagttgt

SEQ ID NO: 225745 - DNA, 25 bp, SARS Virus
aaaagtaattcgagaaacagttgtg

SEQ ID NO: 225746 - DNA, 25 bp, SARS Virus
aaagtaattcgtaaaacagttgtgc

SEQ ID NO: 225747 - DNA, 25 bp, SARS Virus
aagtaattcgtgaaacagttgtgca

SEQ ID NO: 225748 - DNA, 25 bp, SARS Virus
agtaattcgtgaaacagttgtgcaa

SEQ ID NO: 225749 - DNA, 25 bp, SARS Virus
gtaattcgtgaaacagttgtgcaag

SEQ ID NO: 225750 - DNA, 25 bp, SARS Virus
taattcgtgaaaaagttgtgcaagt

SEQ ID NO: 225751 - DNA, 25 bp, SARS Virus
aattcgtgaaacagttgtgcaagta

SEQ ID NO: 225752 - DNA, 25 bp, SARS Virus
attcgtgaaacaattgtgcaagtag

SEQ ID NO: 225753 - DNA, 25 bp, SARS Virus
ttcgtgaaacagatgtgcaagtagt

SEQ ID NO: 225754 - DNA, 25 bp, SARS Virus
tcgtgaaacagtagtgcaagtagtt

SEQ ID NO: 225755 - DNA, 25 bp, SARS Virus
cgtgaaacagttatgcaagtagttc

SEQ ID NO: 225756 - DNA, 25 bp, SARS Virus
gtgaaacagttgagcaagtagttcg

SEQ ID NO: 225757 - DNA, 25 bp, SARS Virus
tgaaacagttgtacaagtagttcga

SEQ ID NO: 225758 - DNA, 25 bp, SARS Virus
gaaacagttgtgaaagtagttcgag

SEQ ID NO: 225759 - DNA, 25 bp, SARS Virus
aaacagttgtgcaagtagttcgagt

SEQ ID NO: 225760 - DNA, 25 bp, SARS Virus
aacagttgtgcaagtagttcgagtt

SEQ ID NO: 225761 - DNA, 25 bp, SARS Virus
acagttgtgcaaatagttcgagttt

SEQ ID NO: 225762 - DNA, 25 bp, SARS Virus
cagttgtgcaagaagttcgagttta

SEQ ID NO: 225763 - DNA, 25 bp, SARS Virus
agttgtgcaagtagttcgagtttac

SEQ ID NO: 225764 - DNA, 25 bp, SARS Virus
gttgtgcaagtaattcgagtttaca

SEQ ID NO: 225765 - DNA, 25 bp, SARS Virus
ttgtgcaagtagatcgagtttacac

SEQ ID NO: 225766 - DNA, 25 bp, SARS Virus
tgtgcaagtagtacgagtttacact

SEQ ID NO: 225767 - DNA, 25 bp, SARS Virus
gtgcaagtagttagagtttacacta

SEQ ID NO: 225768 - DNA, 25 bp, SARS Virus
tgcaagtagttcaagtttacactaa

SEQ ID NO: 225769 - DNA, 25 bp, SARS Virus
gcaagtagttcgagtttacactaag

SEQ ID NO: 225770 - DNA, 25 bp, SARS Virus
caagtagttcgaatttacactaaga

SEQ ID NO: 225771 - DNA, 25 bp, SARS Virus
aagtagttcgagattacactaagag

SEQ ID NO: 225772 - DNA, 25 bp, SARS Virus
agtagttcgagtatacactaagagt

SEQ ID NO: 225773 - DNA, 25 bp, SARS Virus
gtagttcgagttaacactaagagtg

SEQ ID NO: 225774 - DNA, 25 bp, SARS Virus
tagttcgagtttacactaagagtgt

SEQ ID NO: 225775 - DNA, 25 bp, SARS Virus
agttcgagtttaaactaagagtgta

SEQ ID NO: 225776 - DNA, 25 bp, SARS Virus
gttcgagtttacactaagagtgtaa

SEQ ID NO: 225777 - DNA, 25 bp, SARS Virus
ttcgagtttacaataagagtgtaag

SEQ ID NO: 225778 - DNA, 25 bp, SARS Virus
tcgagtttacacaaagagtgtaaga

SEQ ID NO: 225779 - DNA, 25 bp, SARS Virus
cgagtttacactaagagtgtaagaa

SEQ ID NO: 225780 - DNA, 25 bp, SARS Virus
gagtttacactaagagtgtaagaac

SEQ ID NO: 225781 - DNA, 25 bp, SARS Virus
agtttacactaaaagtgtaagaaca

SEQ ID NO: 225782 - DNA, 25 bp, SARS Virus
gtttacactaagagtgtaagaacat

SEQ ID NO: 225783 - DNA, 25 bp, SARS Virus
tttacactaagaatgtaagaacatt

SEQ ID NO: 225784 - DNA, 25 bp, SARS Virus
ttacactaagagagtaagaacattg

SEQ ID NO: 225785 - DNA, 25 bp, SARS Virus
tacactaagagtataagaacattgg

SEQ ID NO: 225786 - DNA, 25 bp, SARS Virus
acactaagagtgaaagaacattgga

SEQ ID NO: 225787 - DNA, 25 bp, SARS Virus
cactaagagtgtaagaacattggaa

SEQ ID NO: 225788 - DNA, 25 bp, SARS Virus
actaagagtgtaagaacattggaac

SEQ ID NO: 225789 - DNA, 25 bp, SARS Virus
ctaagagtgtaaaaacattggaact

SEQ ID NO: 225790 - DNA, 25 bp, SARS Virus
taagagtgtaagaacattggaactt

SEQ ID NO: 225791 - DNA, 25 bp, SARS Virus
aagagtgtaagaacattggaacttg

SEQ ID NO: 225792 - DNA, 25 bp, SARS Virus
agagtgtaagaaaattggaacttga

SEQ ID NO: 225793 - DNA, 25 bp, SARS Virus
gagtgtaagaacattggaacttgaa

SEQ ID NO: 225794 - DNA, 25 bp, SARS Virus
agtgtaagaacaatggaacttgaag

SEQ ID NO: 225795 - DNA, 25 bp, SARS Virus
gtgtaagaacataggaacttgaagg

SEQ ID NO: 225796 - DNA, 25 bp, SARS Virus
tgtaagaacattagaacttgaaggg

SEQ ID NO: 225797 - DNA, 25 bp, SARS Virus
gtaagaacattgaaacttgaagggt

SEQ ID NO: 225798 - DNA, 25 bp, SARS Virus
taagaacattggaacttgaagggtt

SEQ ID NO: 225799 - DNA, 25 bp, SARS Virus
aagaacattggaacttgaagggttt

SEQ ID NO: 225800 - DNA, 25 bp, SARS Virus
agaacattggaaattgaagggtttg

SEQ ID NO: 225801 - DNA, 25 bp, SARS Virus
gaacattggaacatgaagggtttgt

SEQ ID NO: 225802 - DNA, 25 bp, SARS Virus
aacattggaactagaagggtttgtc

SEQ ID NO: 225803 - DNA, 25 bp, SARS Virus
acattggaacttaaagggtttgtca

SEQ ID NO: 225804 - DNA, 25 bp, SARS Virus
cattggaacttgaagggtttgtcat

SEQ ID NO: 225805 - DNA, 25 bp, SARS Virus
attggaacttgaagggtttgtcata

SEQ ID NO: 225806 - DNA, 25 bp, SARS Virus
ttggaacttgaaaggtttgtcatag

SEQ ID NO: 225807 - DNA, 25 bp, SARS Virus
tggaacttgaagagtttgtcataga

SEQ ID NO: 225808 - DNA, 25 bp, SARS Virus
ggaacttgaaggatttgtcatagaa

SEQ ID NO: 225809 - DNA, 25 bp, SARS Virus
gaacttgaagggattgtcatagaag

SEQ ID NO: 225810 - DNA, 25 bp, SARS Virus
aacttgaagggtatgtcatagaaga

SEQ ID NO: 225811 - DNA, 25 bp, SARS Virus
acttgaagggttagtcatagaagag

SEQ ID NO: 225812 - DNA, 25 bp, SARS Virus
cttgaagggtttatcatagaagagg

SEQ ID NO: 225813 - DNA, 25 bp, SARS Virus
ttgaagggtttgacatagaagaggt

SEQ ID NO: 225814 - DNA, 25 bp, SARS Virus
tgaagggtttgtaatagaagaggtt

SEQ ID NO: 225815 - DNA, 25 bp, SARS Virus
gaagggtttgtcatagaagaggttt

SEQ ID NO: 225816 - DNA, 25 bp, SARS Virus
aagggtttgtcaaagaagaggtttc

SEQ ID NO: 225817 - DNA, 25 bp, SARS Virus
agggtttgtcatagaagaggtttcc

SEQ ID NO: 225818 - DNA, 25 bp, SARS Virus
gggtttgtcataaaagaggtttcca

SEQ ID NO: 225819 - DNA, 25 bp, SARS Virus
ggtttgtcatagaagaggtttccaa

SEQ ID NO: 225820 - DNA, 25 bp, SARS Virus
gtttgtcatagaagaggtttccaat

SEQ ID NO: 225821 - DNA, 25 bp, SARS Virus
tttgtcatagaaaaggtttccaatg

SEQ ID NO: 225822 - DNA, 25 bp, SARS Virus
ttgtcatagaagaggtttccaatgt

SEQ ID NO: 225823 - DNA, 25 bp, SARS Virus
tgtcatagaagaagtttccaatgtg

SEQ ID NO: 225824 - DNA, 25 bp, SARS Virus
gtcatagaagagatttccaatgtgg

SEQ ID NO: 225825 - DNA, 25 bp, SARS Virus
tcatagaagaggattccaatgtgga

SEQ ID NO: 225826 - DNA, 25 bp, SARS Virus
catagaagaggtatccaatgtggaa

SEQ ID NO: 225827 - DNA, 25 bp, SARS Virus
atagaagaggttaccaatgtggaaa

SEQ ID NO: 225828 - DNA, 25 bp, SARS Virus
tagaagaggtttacaatgtggaaat

SEQ ID NO: 225829 - DNA, 25 bp, SARS Virus
agaagaggtttcaaatgtggaaatt

SEQ ID NO: 225830 - DNA, 25 bp, SARS Virus
gaagaggtttccaatgtggaaatta

SEQ ID NO: 225831 - DNA, 25 bp, SARS Virus
aagaggtttccaatgtggaaattaa

SEQ ID NO: 225832 - DNA, 25 bp, SARS Virus
agaggtttccaaagtggaaattaac

SEQ ID NO: 225833 - DNA, 25 bp, SARS Virus
gaggtttccaatatggaaattaacc

SEQ ID NO: 225834 - DNA, 25 bp, SARS Virus
aggtttccaatgaggaaattaacca

SEQ ID NO: 225835 - DNA, 25 bp, SARS Virus
ggtttccaatgtagaaattaaccac

SEQ ID NO: 225836 - DNA, 25 bp, SARS Virus
gtttccaatgtgaaaattaaccacg

SEQ ID NO: 225837 - DNA, 25 bp, SARS Virus
tttccaatgtggaaattaaccacgt

SEQ ID NO: 225838 - DNA, 25 bp, SARS Virus
ttccaatgtggaaattaaccacgtg

SEQ ID NO: 225839 - DNA, 25 bp, SARS Virus
tccaatgtggaaattaaccacgtgg

SEQ ID NO: 225840 - DNA, 25 bp, SARS Virus
ccaatgtggaaaataaccacgtggg

SEQ ID NO: 225841 - DNA, 25 bp, SARS Virus
caatgtggaaataaaccacgtgggg

SEQ ID NO: 225842 - DNA, 25 bp, SARS Virus
aatgtggaaattaaccacgtggggg

SEQ ID NO: 225843 - DNA, 25 bp, SARS Virus
atgtggaaattaaccacgtggggga

SEQ ID NO: 225844 - DNA, 25 bp, SARS Virus
tgtggaaattaaacacgtgggggaa

SEQ ID NO: 225845 - DNA, 25 bp, SARS Virus
gtggaaattaacaacgtgggggaaa

SEQ ID NO: 225846 - DNA, 25 bp, SARS Virus
tggaaattaaccacgtgggggaaaa

SEQ ID NO: 225847 - DNA, 25 bp, SARS Virus
ggaaattaaccaagtgggggaaaat

SEQ ID NO: 225848 - DNA, 25 bp, SARS Virus
gaaattaaccacatgggggaaaatt

SEQ ID NO: 225849 - DNA, 25 bp, SARS Virus
aaattaaccacgagggggaaaattc

SEQ ID NO: 225850 - DNA, 25 bp, SARS Virus
aattaaccacgtaggggaaaattcg

SEQ ID NO: 225851 - DNA, 25 bp, SARS Virus
attaaccacgtgagggaaaattcgc

SEQ ID NO: 225852 - DNA, 25 bp, SARS Virus
ttaaccacgtggaggaaaattcgct

SEQ ID NO: 225853 - DNA, 25 bp, SARS Virus
taaccacgtgggagaaaattcgctt

SEQ ID NO: 225854 - DNA, 25 bp, SARS Virus
aaccacgtggggaaaaattcgcttt

SEQ ID NO: 225855 - DNA, 25 bp, SARS Virus
accacgtgggggaaaattcgctttc

SEQ ID NO: 225856 - DNA, 25 bp, SARS Virus
ccacgtgggggaaaattcgctttct

SEQ ID NO: 225857 - DNA, 25 bp, SARS Virus
cacgtgggggaaaattcgctttctg

SEQ ID NO: 225858 - DNA, 25 bp, SARS Virus
acgtgggggaaaattcgctttctgt

SEQ ID NO: 225859 - DNA, 25 bp, SARS Virus
cgtgggggaaaaatcgctttctgta

SEQ ID NO: 225860 - DNA, 25 bp, SARS Virus
gtgggggaaaatacgctttctgtaa

SEQ ID NO: 225861 - DNA, 25 bp, SARS Virus
tgggggaaaattagctttctgtaac

SEQ ID NO: 225862 - DNA, 25 bp, SARS Virus
gggggaaaattcactttctgtaaca

SEQ ID NO: 225863 - DNA, 25 bp, SARS Virus
ggggaaaattcgatttctgtaacaa

SEQ ID NO: 225864 - DNA, 25 bp, SARS Virus
gggaaaattcgcattctgtaacaaa

SEQ ID NO: 225865 - DNA, 25 bp, SARS Virus
ggaaaattcgctatctgtaacaaac

SEQ ID NO: 225866 - DNA, 25 bp, SARS Virus
gaaaattcgcttactgtaacaaaca

SEQ ID NO: 225867 - DNA, 25 bp, SARS Virus
aaaattcgctttatgtaacaaacat

SEQ ID NO: 225868 - DNA, 25 bp, SARS Virus
aaattcgctttcagtaacaaacatc

SEQ ID NO: 225869 - DNA, 25 bp, SARS Virus
aattcgctttctataacaaacatcg

SEQ ID NO: 225870 - DNA, 25 bp, SARS Virus
attcgctttctgaaacaaacatcgg

SEQ ID NO: 225871 - DNA, 25 bp, SARS Virus
ttcgctttctgtaacaaacatcggt

SEQ ID NO: 225872 - DNA, 25 bp, SARS Virus
tcgctttctgtaacaaacatcggtc

SEQ ID NO: 225873 - DNA, 25 bp, SARS Virus
cgctttctgtaaaaaacatcggtca

SEQ ID NO: 225874 - DNA, 25 bp, SARS Virus
gctttctgtaacaaacatcggtcat

SEQ ID NO: 225875 - DNA, 25 bp, SARS Virus
ctttctgtaacaaacatcggtcatt

SEQ ID NO: 225876 - DNA, 25 bp, SARS Virus
tttctgtaacaaacatcggtcattt

SEQ ID NO: 225877 - DNA, 25 bp, SARS Virus
ttctgtaacaaaaatcggtcatttg

SEQ ID NO: 225878 - DNA, 25 bp, SARS Virus
tctgtaacaaacatcggtcatttgg

SEQ ID NO: 225879 - DNA, 25 bp, SARS Virus
ctgtaacaaacaacggtcatttggt

SEQ ID NO: 225880 - DNA, 25 bp, SARS Virus
tgtaacaaacataggtcatttggtc

SEQ ID NO: 225881 - DNA, 25 bp, SARS Virus
gtaacaaacatcagtcatttggtcc

SEQ ID NO: 225882 - DNA, 25 bp, SARS Virus
taacaaacatcgatcatttggtcct

SEQ ID NO: 225883 - DNA, 25 bp, SARS Virus
aacaaacatcggacatttggtcctc

SEQ ID NO: 225884 - DNA, 25 bp, SARS Virus
acaaacatcggtaatttggtcctct

SEQ ID NO: 225885 - DNA, 25 bp, SARS Virus
caaacatcggtcatttggtcctctg

SEQ ID NO: 225886 - DNA, 25 bp, SARS Virus
aaacatcggtcaattggtcctctgt

SEQ ID NO: 225887 - DNA, 25 bp, SARS Virus
aacatcggtcatatggtcctctgtt

SEQ ID NO: 225888 - DNA, 25 bp, SARS Virus
acatcggtcattaggtcctctgtta

SEQ ID NO: 225889 - DNA, 25 bp, SARS Virus
catcggtcatttagtcctctgttac

SEQ ID NO: 225890 - DNA, 25 bp, SARS Virus
atcggtcatttgatcctctgttacg

SEQ ID NO: 225891 - DNA, 25 bp, SARS Virus
tcggtcatttggacctctgttacgc

SEQ ID NO: 225892 - DNA, 25 bp, SARS Virus
cggtcatttggtactctgttacgcg

SEQ ID NO: 225893 - DNA, 25 bp, SARS Virus
ggtcatttggtcatctgttacgcgt

SEQ ID NO: 225894 - DNA, 25 bp, SARS Virus
gtcatttggtccactgttacgcgtc

SEQ ID NO: 225895 - DNA, 25 bp, SARS Virus
tcatttggtcctatgttacgcgtca

SEQ ID NO: 225896 - DNA, 25 bp, SARS Virus
catttggtcctcagttacgcgtcat

SEQ ID NO: 225897 - DNA, 25 bp, SARS Virus
atttggtcctctattacgcgtcata

SEQ ID NO: 225898 - DNA, 25 bp, SARS Virus
tttggtcctctgatacgcgtcataa

SEQ ID NO: 225899 - DNA, 25 bp, SARS Virus
ttggtcctctgtaacgcgtcataac

SEQ ID NO: 225900 - DNA, 25 bp, SARS Virus
tggtcctctgttacgcgtcataaca

SEQ ID NO: 225901 - DNA, 25 bp, SARS Virus
ggtcctctgttaagcgtcataacaa

SEQ ID NO: 225902 - DNA, 25 bp, SARS Virus
gtcctctgttacacgtcataacaag

SEQ ID NO: 225903 - DNA, 25 bp, SARS Virus
tcctctgttacgagtcataacaaga

SEQ ID NO: 225904 - DNA, 25 bp, SARS Virus
cctctgttacgcatcataacaagaa

SEQ ID NO: 225905 - DNA, 25 bp, SARS Virus
ctctgttacgcgacataacaagaaa

SEQ ID NO: 225906 - DNA, 25 bp, SARS Virus
tctgttacgcgtaataacaagaaac

SEQ ID NO: 225907 - DNA, 25 bp, SARS Virus
ctgttacgcgtcataacaagaaaca

SEQ ID NO: 225908 - DNA, 25 bp, SARS Virus
tgttacgcgtcaaaacaagaaacag

SEQ ID NO: 225909 - DNA, 25 bp, SARS Virus
gttacgcgtcataacaagaaacagg

SEQ ID NO: 225910 - DNA, 25 bp, SARS Virus
ttacgcgtcataacaagaaacagga

SEQ ID NO: 225911 - DNA, 25 bp, SARS Virus
tacgcgtcataaaaagaaacaggaa

SEQ ID NO: 225912 - DNA, 25 bp, SARS Virus
acgcgtcataacaagaaacaggaat

SEQ ID NO: 225913 - DNA, 25 bp, SARS Virus
cgcgtcataacaagaaacaggaatt

SEQ ID NO: 225914 - DNA, 25 bp, SARS Virus
gcgtcataacaaaaaacaggaatta

SEQ ID NO: 225915 - DNA, 25 bp, SARS Virus
cgtcataacaagaaacaggaattag

SEQ ID NO: 225916 - DNA, 25 bp, SARS Virus
gtcataacaagaaacaggaattaga

SEQ ID NO: 225917 - DNA, 25 bp, SARS Virus
tcataacaagaaacaggaattagag

SEQ ID NO: 225918 - DNA, 25 bp, SARS Virus
cataacaagaaaaaggaattagaga

SEQ ID NO: 225919 - DNA, 25 bp, SARS Virus
ataacaagaaacaggaattagagat

SEQ ID NO: 225920 - DNA, 25 bp, SARS Virus
taacaagaaacaagaattagagatt

SEQ ID NO: 225921 - DNA, 25 bp, SARS Virus
aacaagaaacagaaattagagattc

SEQ ID NO: 225922 - DNA, 25 bp, SARS Virus
acaagaaacaggaattagagattct

SEQ ID NO: 225923 - DNA, 25 bp, SARS Virus
caagaaacaggaattagagattctc

SEQ ID NO: 225924 - DNA, 25 bp, SARS Virus
aagaaacaggaaatagagattctcg

SEQ ID NO: 225925 - DNA, 25 bp, SARS Virus
agaaacaggaataagagattctcgt

SEQ ID NO: 225926 - DNA, 25 bp, SARS Virus
gaaacaggaattagagattctcgta

SEQ ID NO: 225927 - DNA, 25 bp, SARS Virus
aaacaggaattaaagattctcgtac

SEQ ID NO: 225928 - DNA, 25 bp, SARS Virus
aacaggaattagagattctcgtact

SEQ ID NO: 225929 - DNA, 25 bp, SARS Virus
acaggaattagaaattctcgtactc

SEQ ID NO: 225930 - DNA, 25 bp, SARS Virus
caggaattagagattctcgtactcc

SEQ ID NO: 225931 - DNA, 25 bp, SARS Virus
aggaattagagaatctcgtactccg

SEQ ID NO: 225932 - DNA, 25 bp, SARS Virus
ggaattagagatactcgtactccgg

SEQ ID NO: 225933 - DNA, 25 bp, SARS Virus
gaattagagattatcgtactccggt

SEQ ID NO: 225934 - DNA, 25 bp, SARS Virus
aattagagattcacgtactccggta

SEQ ID NO: 225935 - DNA, 25 bp, SARS Virus
attagagattctagtactccggtaa

SEQ ID NO: 225936 - DNA, 25 bp, SARS Virus
ttagagattctcatactccggtaaa

SEQ ID NO: 225937 - DNA, 25 bp, SARS Virus
tagagattctcgaactccggtaaat

SEQ ID NO: 225938 - DNA, 25 bp, SARS Virus
agagattctcgtactccggtaaatg

SEQ ID NO: 225939 - DNA, 25 bp, SARS Virus
gagattctcgtaatccggtaaatgt

SEQ ID NO: 225940 - DNA, 25 bp, SARS Virus
agattctcgtacaccggtaaatgtg

SEQ ID NO: 225941 - DNA, 25 bp, SARS Virus
gattctcgtactacggtaaatgtgt

SEQ ID NO: 225942 - DNA, 25 bp, SARS Virus
attctcgtactcaggtaaatgtgtc

SEQ ID NO: 225943 - DNA, 25 bp, SARS Virus
ttctcgtactccagtaaatgtgtct

SEQ ID NO: 225944 - DNA, 25 bp, SARS Virus
tctcgtactccgataaatgtgtctg

SEQ ID NO: 225945 - DNA, 25 bp, SARS Virus
ctcgtactccggaaaatgtgtctga

SEQ ID NO: 225946 - DNA, 25 bp, SARS Virus
tcgtactccggtaaatgtgtctgac

SEQ ID NO: 225947 - DNA, 25 bp, SARS Virus
cgtactccggtaaatgtgtctgacc

SEQ ID NO: 225948 - DNA, 25 bp, SARS Virus
gtactccggtaaatgtgtctgacca

SEQ ID NO: 225949 - DNA, 25 bp, SARS Virus
tactccggtaaaagtgtctgaccac

SEQ ID NO: 225950 - DNA, 25 bp, SARS Virus
actccggtaaatatgtctgaccaca

SEQ ID NO: 225951 - DNA, 25 bp, SARS Virus
ctccggtaaatgagtctgaccacac

SEQ ID NO: 225952 - DNA, 25 bp, SARS Virus
tccggtaaatgtatctgaccacacg

SEQ ID NO: 225953 - DNA, 25 bp, SARS Virus
ccggtaaatgtgactgaccacacgg

SEQ ID NO: 225954 - DNA, 25 bp, SARS Virus
cggtaaatgtgtatgaccacacggt

SEQ ID NO: 225955 - DNA, 25 bp, SARS Virus
ggtaaatgtgtcagaccacacggtt

SEQ ID NO: 225956 - DNA, 25 bp, SARS Virus
gtaaatgtgtctaaccacacggttg

SEQ ID NO: 225957 - DNA, 25 bp, SARS Virus
taaatgtgtctgaccacacggttgc

SEQ ID NO: 225958 - DNA, 25 bp, SARS Virus
aaatgtgtctgaacacacggttgct

SEQ ID NO: 225959 - DNA, 25 bp, SARS Virus
aatgtgtctgacaacacggttgcta

SEQ ID NO: 225960 - DNA, 25 bp, SARS Virus
atgtgtctgaccacacggttgctat

SEQ ID NO: 225961 - DNA, 25 bp, SARS Virus
tgtgtctgaccaaacggttgctatc

SEQ ID NO: 225962 - DNA, 25 bp, SARS Virus
gtgtctgaccacacggttgctatcg

SEQ ID NO: 225963 - DNA, 25 bp, SARS Virus
tgtctgaccacaaggttgctatcga

SEQ ID NO: 225964 - DNA, 25 bp, SARS Virus
gtctgaccacacagttgctatcgag

SEQ ID NO: 225965 - DNA, 25 bp, SARS Virus
tctgaccacacgattgctatcgagg

SEQ ID NO: 225966 - DNA, 25 bp, SARS Virus
ctgaccacacggatgctatcgaggt

SEQ ID NO: 225967 - DNA, 25 bp, SARS Virus
tgaccacacggtagctatcgaggta

SEQ ID NO: 225968 - DNA, 25 bp, SARS Virus
gaccacacggttactatcgaggtaa

SEQ ID NO: 225969 - DNA, 25 bp, SARS Virus
accacacggttgatatcgaggtaaa

SEQ ID NO: 225970 - DNA, 25 bp, SARS Virus
ccacacggttgcaatcgaggtaaac

SEQ ID NO: 225971 - DNA, 25 bp, SARS Virus
cacacggttgctatcgaggtaaaca

SEQ ID NO: 225972 - DNA, 25 bp, SARS Virus
acacggttgctaacgaggtaaacac

SEQ ID NO: 225973 - DNA, 25 bp, SARS Virus
cacggttgctatagaggtaaacact

SEQ ID NO: 225974 - DNA, 25 bp, SARS Virus
acggttgctatcaaggtaaacactt

SEQ ID NO: 225975 - DNA, 25 bp, SARS Virus
cggttgctatcgaggtaaacacttc

SEQ ID NO: 225976 - DNA, 25 bp, SARS Virus
ggttgctatcgaagtaaacacttcg

SEQ ID NO: 225977 - DNA, 25 bp, SARS Virus
aagaagaaggagcgtgagacgtagc

SEQ ID NO: 225978 - DNA, 25 bp, SARS Virus
agaagaaggagtctgagacgtagca

SEQ ID NO: 225979 - DNA, 25 bp, SARS Virus
gaagaaggagtgcgagacgtagcag

SEQ ID NO: 225980 - DNA, 25 bp, SARS Virus
aagaaggagtgtcagacgtagcagg

SEQ ID NO: 225981 - DNA, 25 bp, SARS Virus
agaaggagtgtgcgacgtagcagga

SEQ ID NO: 225982 - DNA, 25 bp, SARS Virus
gaaggagtgtgacacgtagcaggag

SEQ ID NO: 225983 - DNA, 25 bp, SARS Virus
aaggagtgtgagccgtagcaggaga

SEQ ID NO: 225984 - DNA, 25 bp, SARS Virus
aggagtgtgagacgtagcaggagaa

SEQ ID NO: 225985 - DNA, 25 bp, SARS Virus
ggagtgtgagacctagcaggagaag

SEQ ID NO: 225986 - DNA, 25 bp, SARS Virus
gagtgtgagacgcagcaggagaaga

SEQ ID NO: 225987 - DNA, 25 bp, SARS Virus
agtgtgagacgtcgcaggagaagaa

SEQ ID NO: 225988 - DNA, 25 bp, SARS Virus
gtgtgagacgtaccaggagaagaag

SEQ ID NO: 225989 - DNA, 25 bp, SARS Virus
tgtgagacgtagcaggagaagaagg

SEQ ID NO: 225990 - DNA, 25 bp, SARS Virus
gtgagacgtagccggagaagaagga

SEQ ID NO: 225991 - DNA, 25 bp, SARS Virus
tgagacgtagcacgagaagaaggag

SEQ ID NO: 225992 - DNA, 25 bp, SARS Virus
gagacgtagcagcagaagaaggagt

SEQ ID NO: 225993 - DNA, 25 bp, SARS Virus
agacgtagcaggcgaagaaggagta

SEQ ID NO: 225994 - DNA, 25 bp, SARS Virus
gacgtagcaggacaagaaggagtag

SEQ ID NO: 225995 - DNA, 25 bp, SARS Virus
acgtagcaggagcagaaggagtaga

SEQ ID NO: 225996 - DNA, 25 bp, SARS Virus
cgtagcaggagacgaaggagtagac

SEQ ID NO: 225997 - DNA, 25 bp, SARS Virus
gtagcaggagaacaaggagtagacc

SEQ ID NO: 225998 - DNA, 25 bp, SARS Virus
tagcaggagaagcaggagtagacct

SEQ ID NO: 225999 - DNA, 25 bp, SARS Virus
agcaggagaagacggagtagacctc

SEQ ID NO: 226000 - DNA, 25 bp, SARS Virus
gcaggagaagaacgagtagacctcc

SEQ ID NO: 226001 - DNA, 25 bp, SARS Virus
caggagaagaagcagtagacctccc

SEQ ID NO: 226002 - DNA, 25 bp, SARS Virus
aggagaagaaggcgtagacctccca

SEQ ID NO: 226003 - DNA, 25 bp, SARS Virus
ggagaagaaggactagacctcccat

SEQ ID NO: 226004 - DNA, 25 bp, SARS Virus
gagaagaaggagcagacctcccatt

SEQ ID NO: 226005 - DNA, 25 bp, SARS Virus
agaagaaggagtcgacctcccattt

SEQ ID NO: 226006 - DNA, 25 bp, SARS Virus
gaagaaggagtacacctcccatttt

SEQ ID NO: 226007 - DNA, 25 bp, SARS Virus
aagaaggagtagccctcccattttc

SEQ ID NO: 226008 - DNA, 25 bp, SARS Virus
agaaggagtagacctcccattttcc

SEQ ID NO: 226009 - DNA, 25 bp, SARS Virus
gaaggagtagacctcccattttcct

SEQ ID NO: 226010 - DNA, 25 bp, SARS Virus
aaggagtagaccccccattttcctt

SEQ ID NO: 226011 - DNA, 25 bp, SARS Virus
aggagtagacctcccattttccttg

SEQ ID NO: 226012 - DNA, 25 bp, SARS Virus
ggagtagacctcccattttccttgt

SEQ ID NO: 226013 - DNA, 25 bp, SARS Virus
gagtagacctcccattttccttgtt

SEQ ID NO: 226014 - DNA, 25 bp, SARS Virus
agtagacctccccttttccttgtta

SEQ ID NO: 226015 - DNA, 25 bp, SARS Virus
gtagacctcccactttccttgttat

SEQ ID NO: 226016 - DNA, 25 bp, SARS Virus
tagacctcccatcttccttgttatg

SEQ ID NO: 226017 - DNA, 25 bp, SARS Virus
agacctcccattctccttgttatgt

SEQ ID NO: 226018 - DNA, 25 bp, SARS Virus
gacctcccatttcccttgttatgta

SEQ ID NO: 226019 - DNA, 25 bp, SARS Virus
acctcccattttccttgttatgtat

SEQ ID NO: 226020 - DNA, 25 bp, SARS Virus
cctcccattttccttgttatgtatg

SEQ ID NO: 226021 - DNA, 25 bp, SARS Virus
ctcccattttccctgttatgtatgc

SEQ ID NO: 226022 - DNA, 25 bp, SARS Virus
tcccattttcctcgttatgtatgca

SEQ ID NO: 226023 - DNA, 25 bp, SARS Virus
cccattttccttcttatgtatgcac

SEQ ID NO: 226024 - DNA, 25 bp, SARS Virus
ccattttccttgctatgtatgcact

SEQ ID NO: 226025 - DNA, 25 bp, SARS Virus
cattttccttgtcatgtatgcacta

SEQ ID NO: 226026 - DNA, 25 bp, SARS Virus
attttccttgttctgtatgcactac

SEQ ID NO: 226027 - DNA, 25 bp, SARS Virus
ttttccttgttacgtatgcactact

SEQ ID NO: 226028 - DNA, 25 bp, SARS Virus
tttccttgttatctatgcactactt

SEQ ID NO: 226029 - DNA, 25 bp, SARS Virus
ttccttgttatgcatgcactacttt

SEQ ID NO: 226030 - DNA, 25 bp, SARS Virus
tccttgttatgtctgcactactttt

SEQ ID NO: 226031 - DNA, 25 bp, SARS Virus
ccttgttatgtacgcactacttttc

SEQ ID NO: 226032 - DNA, 25 bp, SARS Virus
cttgttatgtatccactacttttca

SEQ ID NO: 226033 - DNA, 25 bp, SARS Virus
ttgttatgtatgcactacttttcaa

SEQ ID NO: 226034 - DNA, 25 bp, SARS Virus
tgttatgtatgccctacttttcaaa

SEQ ID NO: 226035 - DNA, 25 bp, SARS Virus
gttatgtatgcactacttttcaaaa

SEQ ID NO: 226036 - DNA, 25 bp, SARS Virus
ttatgtatgcaccacttttcaaaag

SEQ ID NO: 226037 - DNA, 25 bp, SARS Virus
tatgtatgcactccttttcaaaaga

SEQ ID NO: 226038 - DNA, 25 bp, SARS Virus
atgtatgcactacttttcaaaagaa

SEQ ID NO: 226039 - DNA, 25 bp, SARS Virus
tgtatgcactacctttcaaaagaag

SEQ ID NO: 226040 - DNA, 25 bp, SARS Virus
gtatgcactactcttcaaaagaagt

SEQ ID NO: 226041 - DNA, 25 bp, SARS Virus
tatgcactacttctcaaaagaagtg

SEQ ID NO: 226042 - DNA, 25 bp, SARS Virus
atgcactactttccaaaagaagtgg

SEQ ID NO: 226043 - DNA, 25 bp, SARS Virus
tgcactacttttcaaaagaagtggt

SEQ ID NO: 226044 - DNA, 25 bp, SARS Virus
gcactacttttccaaagaagtggtc

SEQ ID NO: 226045 - DNA, 25 bp, SARS Virus
cactacttttcacaagaagtggtcg

SEQ ID NO: 226046 - DNA, 25 bp, SARS Virus
actacttttcaacagaagtggtcgt

SEQ ID NO: 226047 - DNA, 25 bp, SARS Virus
ctacttttcaaacgaagtggtcgta

SEQ ID NO: 226048 - DNA, 25 bp, SARS Virus
tacttttcaaaacaagtggtcgtag

SEQ ID NO: 226049 - DNA, 25 bp, SARS Virus
acttttcaaaagcagtggtcgtagt

SEQ ID NO: 226050 - DNA, 25 bp, SARS Virus
cttttcaaaagacgtggtcgtagta

SEQ ID NO: 226051 - DNA, 25 bp, SARS Virus
ttttcaaaagaactggtcgtagtag

SEQ ID NO: 226052 - DNA, 25 bp, SARS Virus
tttcaaaagaagcggtcgtagtagt

SEQ ID NO: 226053 - DNA, 25 bp, SARS Virus
ttcaaaagaagtcgtcgtagtagtt

SEQ ID NO: 226054 - DNA, 25 bp, SARS Virus
tcaaaagaagtgctcgtagtagttt

SEQ ID NO: 226055 - DNA, 25 bp, SARS Virus
caaaagaagtggccgtagtagttta

SEQ ID NO: 226056 - DNA, 25 bp, SARS Virus
aaaagaagtggtcgtagtagtttat

SEQ ID NO: 226057 - DNA, 25 bp, SARS Virus
aaagaagtggtcctagtagtttatt

SEQ ID NO: 226058 - DNA, 25 bp, SARS Virus
aagaagtggtcgcagtagtttattc

SEQ ID NO: 226059 - DNA, 25 bp, SARS Virus
agaagtggtcgtcgtagtttattca

SEQ ID NO: 226060 - DNA, 25 bp, SARS Virus
gaagtggtcgtactagtttattcat

SEQ ID NO: 226061 - DNA, 25 bp, SARS Virus
aagtggtcgtagcagtttattcatc

SEQ ID NO: 226062 - DNA, 25 bp, SARS Virus
agtggtcgtagtcgtttattcatct

SEQ ID NO: 226063 - DNA, 25 bp, SARS Virus
gtggtcgtagtactttattcatctt

SEQ ID NO: 226064 - DNA, 25 bp, SARS Virus
tggtcgtagtagcttattcatctta

SEQ ID NO: 226065 - DNA, 25 bp, SARS Virus
ggtcgtagtagtctattcatcttac

SEQ ID NO: 226066 - DNA, 25 bp, SARS Virus
gtcgtagtagttcattcatcttaca

SEQ ID NO: 226067 - DNA, 25 bp, SARS Virus
tcgtagtagtttcttcatcttacat

SEQ ID NO: 226068 - DNA, 25 bp, SARS Virus
cgtagtagtttactcatcttacatc

SEQ ID NO: 226069 - DNA, 25 bp, SARS Virus
gtagtagtttatccatcttacatcg

SEQ ID NO: 226070 - DNA, 25 bp, SARS Virus
tagtagtttattcatcttacatcga

SEQ ID NO: 226071 - DNA, 25 bp, SARS Virus
agtagtttattcctcttacatcgat

SEQ ID NO: 226072 - DNA, 25 bp, SARS Virus
gtagtttattcaccttacatcgatg

SEQ ID NO: 226073 - DNA, 25 bp, SARS Virus
tagtttattcatcttacatcgatgt

SEQ ID NO: 226074 - DNA, 25 bp, SARS Virus
agtttattcatcctacatcgatgtg

SEQ ID NO: 226075 - DNA, 25 bp, SARS Virus
gtttattcatctcacatcgatgtga

SEQ ID NO: 226076 - DNA, 25 bp, SARS Virus
tttattcatcttccatcgatgtgag

SEQ ID NO: 226077 - DNA, 25 bp, SARS Virus
ttattcatcttacatcgatgtgagg

SEQ ID NO: 226078 - DNA, 25 bp, SARS Virus
tattcatcttacctcgatgtgaggt

SEQ ID NO: 226079 - DNA, 25 bp, SARS Virus
attcatcttacaccgatgtgaggtg

SEQ ID NO: 226080 - DNA, 25 bp, SARS Virus
ttcatcttacatcgatgtgaggtga

SEQ ID NO: 226081 - DNA, 25 bp, SARS Virus
tcatcttacatccatgtgaggtgag

SEQ ID NO: 226082 - DNA, 25 bp, SARS Virus
catcttacatcgctgtgaggtgagt

SEQ ID NO: 226083 - DNA, 25 bp, SARS Virus
atcttacatcgacgtgaggtgagta

SEQ ID NO: 226084 - DNA, 25 bp, SARS Virus
tcttacatcgatctgaggtgagtag

SEQ ID NO: 226085 - DNA, 25 bp, SARS Virus
cttacatcgatgcgaggtgagtagt

SEQ ID NO: 226086 - DNA, 25 bp, SARS Virus
ttacatcgatgtcaggtgagtagtt

SEQ ID NO: 226087 - DNA, 25 bp, SARS Virus
tacatcgatgtgcggtgagtagttc

SEQ ID NO: 226088 - DNA, 25 bp, SARS Virus
acatcgatgtgacgtgagtagttct

SEQ ID NO: 226089 - DNA, 25 bp, SARS Virus
catcgatgtgagctgagtagttcta

SEQ ID NO: 226090 - DNA, 25 bp, SARS Virus
atcgatgtgaggcgagtagttctag

SEQ ID NO: 226091 - DNA, 25 bp, SARS Virus
tcgatgtgaggtcagtagttctagt

SEQ ID NO: 226092 - DNA, 25 bp, SARS Virus
cgatgtgaggtgcgtagttctagtt

SEQ ID NO: 226093 - DNA, 25 bp, SARS Virus
gatgtgaggtgactagttctagtta

SEQ ID NO: 226094 - DNA, 25 bp, SARS Virus
atgtgaggtgagcagttctagttat

SEQ ID NO: 226095 - DNA, 25 bp, SARS Virus
tgtgaggtgagtcgttctagttatg

SEQ ID NO: 226096 - DNA, 25 bp, SARS Virus
gtgaggtgagtacttctagttatgg

SEQ ID NO: 226097 - DNA, 25 bp, SARS Virus
tgaggtgagtagctctagttatggg

SEQ ID NO: 226098 - DNA, 25 bp, SARS Virus
gaggtgagtagtcctagttatgggt

SEQ ID NO: 226099 - DNA, 25 bp, SARS Virus
aggtgagtagttctagttatgggta

SEQ ID NO: 226100 - DNA, 25 bp, SARS Virus
ggtgagtagttccagttatgggtac

SEQ ID NO: 226101 - DNA, 25 bp, SARS Virus
gtgagtagttctcgttatgggtaca

SEQ ID NO: 226102 - DNA, 25 bp, SARS Virus
tgagtagttctacttatgggtacaa

SEQ ID NO: 226103 - DNA, 25 bp, SARS Virus
gagtagttctagctatgggtacaac

SEQ ID NO: 226104 - DNA, 25 bp, SARS Virus
agtagttctagtcatgggtacaacc

SEQ ID NO: 226105 - DNA, 25 bp, SARS Virus
gtagttctagttctgggtacaacca

SEQ ID NO: 226106 - DNA, 25 bp, SARS Virus
tagttctagttacgggtacaaccat

SEQ ID NO: 226107 - DNA, 25 bp, SARS Virus
agttctagttatcggtacaaccatt

SEQ ID NO: 226108 - DNA, 25 bp, SARS Virus
gttctagttatgcgtacaaccattc

SEQ ID NO: 226109 - DNA, 25 bp, SARS Virus
ttctagttatggctacaaccattcc

SEQ ID NO: 226110 - DNA, 25 bp, SARS Virus
tctagttatgggcacaaccattcct

SEQ ID NO: 226111 - DNA, 25 bp, SARS Virus
ctagttatgggtccaaccattcctc

SEQ ID NO: 226112 - DNA, 25 bp, SARS Virus
tagttatgggtacaaccattcctct

SEQ ID NO: 226113 - DNA, 25 bp, SARS Virus
agttatgggtaccaccattcctcta

SEQ ID NO: 226114 - DNA, 25 bp, SARS Virus
gttatgggtacacccattcctctag

SEQ ID NO: 226115 - DNA, 25 bp, SARS Virus
ttatgggtacaaccattcctctagt

SEQ ID NO: 226116 - DNA, 25 bp, SARS Virus
tatgggtacaaccattcctctagtc

SEQ ID NO: 226117 - DNA, 25 bp, SARS Virus
atgggtacaacccttcctctagtct

SEQ ID NO: 226118 - DNA, 25 bp, SARS Virus
tgggtacaaccactcctctagtctt

SEQ ID NO: 226119 - DNA, 25 bp, SARS Virus
gggtacaaccatccctctagtcttt

SEQ ID NO: 226120 - DNA, 25 bp, SARS Virus
ggtacaaccattcctctagtctttg

SEQ ID NO: 226121 - DNA, 25 bp, SARS Virus
gtacaaccattcctctagtctttga

SEQ ID NO: 226122 - DNA, 25 bp, SARS Virus
tacaaccattcccctagtctttgac

SEQ ID NO: 226123 - DNA, 25 bp, SARS Virus
acaaccattcctctagtctttgacc

SEQ ID NO: 226124 - DNA, 25 bp, SARS Virus
caaccattcctccagtctttgacca

SEQ ID NO: 226125 - DNA, 25 bp, SARS Virus
aaccattcctctcgtctttgaccaa

SEQ ID NO: 226126 - DNA, 25 bp, SARS Virus
accattcctctactctttgaccaac

SEQ ID NO: 226127 - DNA, 25 bp, SARS Virus
ccattcctctagcctttgaccaaca

SEQ ID NO: 226128 - DNA, 25 bp, SARS Virus
cattcctctagtctttgaccaacat

SEQ ID NO: 226129 - DNA, 25 bp, SARS Virus
attcctctagtccttgaccaacatt

SEQ ID NO: 226130 - DNA, 25 bp, SARS Virus
ttcctctagtctctgaccaacattt

SEQ ID NO: 226131 - DNA, 25 bp, SARS Virus
tcctctagtcttcgaccaacatttc

SEQ ID NO: 226132 - DNA, 25 bp, SARS Virus
cctctagtctttcaccaacatttca

SEQ ID NO: 226133 - DNA, 25 bp, SARS Virus
ctctagtctttgcccaacatttcag

SEQ ID NO: 226134 - DNA, 25 bp, SARS Virus
tctagtctttgaccaacatttcaga

SEQ ID NO: 226135 - DNA, 25 bp, SARS Virus
ctagtctttgaccaacatttcagaa

SEQ ID NO: 226136 - DNA, 25 bp, SARS Virus
tagtctttgacccacatttcagaag

SEQ ID NO: 226137 - DNA, 25 bp, SARS Virus
agtctttgaccaccatttcagaagt

SEQ ID NO: 226138 - DNA, 25 bp, SARS Virus
gtctttgaccaacatttcagaagtg

SEQ ID NO: 226139 - DNA, 25 bp, SARS Virus
tctttgaccaacctttcagaagtgt

SEQ ID NO: 226140 - DNA, 25 bp, SARS Virus
ctttgaccaacacttcagaagtgtt

SEQ ID NO: 226141 - DNA, 25 bp, SARS Virus
tttgaccaacatctcagaagtgttg

SEQ ID NO: 226142 - DNA, 25 bp, SARS Virus
ttgaccaacattccagaagtgttgt

SEQ ID NO: 226143 - DNA, 25 bp, SARS Virus
tgaccaacatttcagaagtgttgtc

SEQ ID NO: 226144 - DNA, 25 bp, SARS Virus
gaccaacatttccgaagtgttgtcg

SEQ ID NO: 226145 - DNA, 25 bp, SARS Virus
accaacatttcacaagtgttgtcgg

SEQ ID NO: 226146 - DNA, 25 bp, SARS Virus
ccaacatttcagcagtgttgtcgga

SEQ ID NO: 226147 - DNA, 25 bp, SARS Virus
caacatttcagacgtgttgtcggag

SEQ ID NO: 226148 - DNA, 25 bp, SARS Virus
aacatttcagaactgttgtcggaga

SEQ ID NO: 226149 - DNA, 25 bp, SARS Virus
acatttcagaagcgttgtcggagac

SEQ ID NO: 226150 - DNA, 25 bp, SARS Virus
catttcagaagtcttgtcggagacg

SEQ ID NO: 226151 - DNA, 25 bp, SARS Virus
atttcagaagtgctgtcggagacga

SEQ ID NO: 226152 - DNA, 25 bp, SARS Virus
tttcagaagtgtcgtcggagacgat

SEQ ID NO: 226153 - DNA, 25 bp, SARS Virus
ttcagaagtgttctcggagacgatg

SEQ ID NO: 226154 - DNA, 25 bp, SARS Virus
tcagaagtgttgccggagacgatgt

SEQ ID NO: 226155 - DNA, 25 bp, SARS Virus
cagaagtgttgtcggagacgatgtt

SEQ ID NO: 226156 - DNA, 25 bp, SARS Virus
agaagtgttgtccgagacgatgttg

SEQ ID NO: 226157 - DNA, 25 bp, SARS Virus
gaagtgttgtcgcagacgatgttgt

SEQ ID NO: 226158 - DNA, 25 bp, SARS Virus
aagtgttgtcggcgacgatgttgtg

SEQ ID NO: 226159 - DNA, 25 bp, SARS Virus
agtgttgtcggacacgatgttgtgt

SEQ ID NO: 226160 - DNA, 25 bp, SARS Virus
gtgttgtcggagccgatgttgtgta

SEQ ID NO: 226161 - DNA, 25 bp, SARS Virus
tgttgtcggagacgatgttgtgtac

SEQ ID NO: 226162 - DNA, 25 bp, SARS Virus
gttgtcggagaccatgttgtgtacg

SEQ ID NO: 226163 - DNA, 25 bp, SARS Virus
ttgtcggagacgctgttgtgtacgt

SEQ ID NO: 226164 - DNA, 25 bp, SARS Virus
tgtcggagacgacgttgtgtacgtt

SEQ ID NO: 226165 - DNA, 25 bp, SARS Virus
gtcggagacgatcttgtgtacgttt

SEQ ID NO: 226166 - DNA, 25 bp, SARS Virus
tcggagacgatgctgtgtacgtttg

SEQ ID NO: 226167 - DNA, 25 bp, SARS Virus
cggagacgatgtcgtgtacgtttga

SEQ ID NO: 226168 - DNA, 25 bp, SARS Virus
ggagacgatgttctgtacgtttgag

SEQ ID NO: 226169 - DNA, 25 bp, SARS Virus
gagacgatgttgcgtacgtttgagt

SEQ ID NO: 226170 - DNA, 25 bp, SARS Virus
agacgatgttgtctacgtttgagtc

SEQ ID NO: 226171 - DNA, 25 bp, SARS Virus
gacgatgttgtgcacgtttgagtca

SEQ ID NO: 226172 - DNA, 25 bp, SARS Virus
acgatgttgtgtccgtttgagtcat

SEQ ID NO: 226173 - DNA, 25 bp, SARS Virus
cgatgttgtgtacgtttgagtcatt

SEQ ID NO: 226174 - DNA, 25 bp, SARS Virus
gatgttgtgtacctttgagtcattg

SEQ ID NO: 226175 - DNA, 25 bp, SARS Virus
atgttgtgtacgcttgagtcattga

SEQ ID NO: 226176 - DNA, 25 bp, SARS Virus
tgttgtgtacgtctgagtcattgaa

SEQ ID NO: 226177 - DNA, 25 bp, SARS Virus
gttgtgtacgttcgagtcattgaag

SEQ ID NO: 226178 - DNA, 25 bp, SARS Virus
ttgtgtacgtttcagtcattgaagc

SEQ ID NO: 226179 - DNA, 25 bp, SARS Virus
tgtgtacgtttgcgtcattgaagcc

SEQ ID NO: 226180 - DNA, 25 bp, SARS Virus
gtgtacgtttgactcattgaagcca

SEQ ID NO: 226181 - DNA, 25 bp, SARS Virus
tgtacgtttgagccattgaagccat

SEQ ID NO: 226182 - DNA, 25 bp, SARS Virus
gtacgtttgagtcattgaagccatg

SEQ ID NO: 226183 - DNA, 25 bp, SARS Virus
tacgtttgagtccttgaagccatgg

SEQ ID NO: 226184 - DNA, 25 bp, SARS Virus
acgtttgagtcactgaagccatggc

SEQ ID NO: 226185 - DNA, 25 bp, SARS Virus
cgtttgagtcatcgaagccatggcc

SEQ ID NO: 226186 - DNA, 25 bp, SARS Virus
gtttgagtcattcaagccatggcct

SEQ ID NO: 226187 - DNA, 25 bp, SARS Virus
tttgagtcattgcagccatggccta

SEQ ID NO: 226188 - DNA, 25 bp, SARS Virus
ttgagtcattgacgccatggcctaa

SEQ ID NO: 226189 - DNA, 25 bp, SARS Virus
tgagtcattgaacccatggcctaag

SEQ ID NO: 226190 - DNA, 25 bp, SARS Virus
gagtcattgaagccatggcctaagt

SEQ ID NO: 226191 - DNA, 25 bp, SARS Virus
agtcattgaagccatggcctaagtt

SEQ ID NO: 226192 - DNA, 25 bp, SARS Virus
gtcattgaagccctggcctaagttg

SEQ ID NO: 226193 - DNA, 25 bp, SARS Virus
tcattgaagccacggcctaagttgt

SEQ ID NO: 226194 - DNA, 25 bp, SARS Virus
cattgaagccatcgcctaagttgtc

SEQ ID NO: 226195 - DNA, 25 bp, SARS Virus
attgaagccatgccctaagttgtca

SEQ ID NO: 226196 - DNA, 25 bp, SARS Virus
ttgaagccatggcctaagttgtcac

SEQ ID NO: 226197 - DNA, 25 bp, SARS Virus
tgaagccatggcctaagttgtcaca

SEQ ID NO: 226198 - DNA, 25 bp, SARS Virus
gaagccatggcccaagttgtcacat

SEQ ID NO: 226199 - DNA, 25 bp, SARS Virus
aagccatggcctcagttgtcacatc

SEQ ID NO: 226200 - DNA, 25 bp, SARS Virus
agccatggcctacgttgtcacatct

SEQ ID NO: 226201 - DNA, 25 bp, SARS Virus
gccatggcctaacttgtcacatctg

SEQ ID NO: 226202 - DNA, 25 bp, SARS Virus
ccatggcctaagctgtcacatctgt

SEQ ID NO: 226203 - DNA, 25 bp, SARS Virus
catggcctaagtcgtcacatctgtc

SEQ ID NO: 226204 - DNA, 25 bp, SARS Virus
atggcctaagttctcacatctgtct

SEQ ID NO: 226205 - DNA, 25 bp, SARS Virus
tggcctaagttgccacatctgtctc

SEQ ID NO: 226206 - DNA, 25 bp, SARS Virus
ggcctaagttgtcacatctgtctcg

SEQ ID NO: 226207 - DNA, 25 bp, SARS Virus
gcctaagttgtcccatctgtctcgt

SEQ ID NO: 226208 - DNA, 25 bp, SARS Virus
cctaagttgtcacatctgtctcgtg

SEQ ID NO: 226209 - DNA, 25 bp, SARS Virus
ctaagttgtcacctctgtctcgtga

SEQ ID NO: 226210 - DNA, 25 bp, SARS Virus
taagttgtcacacctgtctcgtgaa

SEQ ID NO: 226211 - DNA, 25 bp, SARS Virus
aagttgtcacatctgtctcgtgaaa

SEQ ID NO: 226212 - DNA, 25 bp, SARS Virus
agttgtcacatccgtctcgtgaaaa

SEQ ID NO: 226213 - DNA, 25 bp, SARS Virus
gttgtcacatctctctcgtgaaaag

SEQ ID NO: 226214 - DNA, 25 bp, SARS Virus
ttgtcacatctgcctcgtgaaaagt

SEQ ID NO: 226215 - DNA, 25 bp, SARS Virus
tgtcacatctgtctcgtgaaaagta

SEQ ID NO: 226216 - DNA, 25 bp, SARS Virus
gtcacatctgtcccgtgaaaagtaa

SEQ ID NO: 226217 - DNA, 25 bp, SARS Virus
tcacatctgtctcgtgaaaagtaat

SEQ ID NO: 226218 - DNA, 25 bp, SARS Virus
cacatctgtctcctgaaaagtaatt

SEQ ID NO: 226219 - DNA, 25 bp, SARS Virus
acatctgtctcgcgaaaagtaattc

SEQ ID NO: 226220 - DNA, 25 bp, SARS Virus
catctgtctcgtcaaaagtaattcg

SEQ ID NO: 226221 - DNA, 25 bp, SARS Virus
atctgtctcgtgcaaagtaattcgt

SEQ ID NO: 226222 - DNA, 25 bp, SARS Virus
tctgtctcgtgacaagtaattcgtg

SEQ ID NO: 226223 - DNA, 25 bp, SARS Virus
ctgtctcgtgaacagtaattcgtga

SEQ ID NO: 226224 - DNA, 25 bp, SARS Virus
tgtctcgtgaaacgtaattcgtgaa

SEQ ID NO: 226225 - DNA, 25 bp, SARS Virus
gtctcgtgaaaactaattcgtgaaa

SEQ ID NO: 226226 - DNA, 25 bp, SARS Virus
tctcgtgaaaagcaattcgtgaaac

SEQ ID NO: 226227 - DNA, 25 bp, SARS Virus
ctcgtgaaaagtcattcgtgaaaca

SEQ ID NO: 226228 - DNA, 25 bp, SARS Virus
tcgtgaaaagtacttcgtgaaacag

SEQ ID NO: 226229 - DNA, 25 bp, SARS Virus
cgtgaaaagtaactcgtgaaacagt

SEQ ID NO: 226230 - DNA, 25 bp, SARS Virus
gtgaaaagtaatccgtgaaacagtt

SEQ ID NO: 226231 - DNA, 25 bp, SARS Virus
tgaaaagtaattcgtgaaacagttg

SEQ ID NO: 226232 - DNA, 25 bp, SARS Virus
gaaaagtaattcctgaaacagttgt

SEQ ID NO: 226233 - DNA, 25 bp, SARS Virus
aaaagtaattcgcgaaacagttgtg

SEQ ID NO: 226234 - DNA, 25 bp, SARS Virus
aaagtaattcgtcaaacagttgtgc

SEQ ID NO: 226235 - DNA, 25 bp, SARS Virus
aagtaattcgtgcaacagttgtgca

SEQ ID NO: 226236 - DNA, 25 bp, SARS Virus
agtaattcgtgacacagttgtgcaa

SEQ ID NO: 226237 - DNA, 25 bp, SARS Virus
gtaattcgtgaaccagttgtgcaag

SEQ ID NO: 226238 - DNA, 25 bp, SARS Virus
taattcgtgaaacagttgtgcaagt

SEQ ID NO: 226239 - DNA, 25 bp, SARS Virus
aattcgtgaaaccgttgtgcaagta

SEQ ID NO: 226240 - DNA, 25 bp, SARS Virus
attcgtgaaacacttgtgcaagtag

SEQ ID NO: 226241 - DNA, 25 bp, SARS Virus
ttcgtgaaacagctgtgcaagtagt

SEQ ID NO: 226242 - DNA, 25 bp, SARS Virus
tcgtgaaacagtcgtgcaagtagtt

SEQ ID NO: 226243 - DNA, 25 bp, SARS Virus
cgtgaaacagttctgcaagtagttc

SEQ ID NO: 226244 - DNA, 25 bp, SARS Virus
gtgaaacagttgcgcaagtagttcg

SEQ ID NO: 226245 - DNA, 25 bp, SARS Virus
tgaaacagttgtccaagtagttcga

SEQ ID NO: 226246 - DNA, 25 bp, SARS Virus
gaaacagttgtgcaagtagttcgag

SEQ ID NO: 226247 - DNA, 25 bp, SARS Virus
aaacagttgtgccagtagttcgagt

SEQ ID NO: 226248 - DNA, 25 bp, SARS Virus
aacagttgtgcacgtagttcgagtt

SEQ ID NO: 226249 - DNA, 25 bp, SARS Virus
acagttgtgcaactagttcgagttt

SEQ ID NO: 226250 - DNA, 25 bp, SARS Virus
cagttgtgcaagcagttcgagttta

SEQ ID NO: 226251 - DNA, 25 bp, SARS Virus
agttgtgcaagtcgttcgagtttac

SEQ ID NO: 226252 - DNA, 25 bp, SARS Virus
gttgtgcaagtacttcgagtttaca

SEQ ID NO: 226253 - DNA, 25 bp, SARS Virus
ttgtgcaagtagctcgagtttacac

SEQ ID NO: 226254 - DNA, 25 bp, SARS Virus
tgtgcaagtagtccgagtttacact

SEQ ID NO: 226255 - DNA, 25 bp, SARS Virus
gtgcaagtagttcgagtttacacta

SEQ ID NO: 226256 - DNA, 25 bp, SARS Virus
tgcaagtagttccagtttacactaa

SEQ ID NO: 226257 - DNA, 25 bp, SARS Virus
gcaagtagttcgcgtttacactaag

SEQ ID NO: 226258 - DNA, 25 bp, SARS Virus
caagtagttcgactttacactaaga

SEQ ID NO: 226259 - DNA, 25 bp, SARS Virus
aagtagttcgagcttacactaagag

SEQ ID NO: 226260 - DNA, 25 bp, SARS Virus
agtagttcgagtctacactaagagt

SEQ ID NO: 226261 - DNA, 25 bp, SARS Virus
gtagttcgagttcacactaagagtg

SEQ ID NO: 226262 - DNA, 25 bp, SARS Virus
tagttcgagtttccactaagagtgt

SEQ ID NO: 226263 - DNA, 25 bp, SARS Virus
agttcgagtttacactaagagtgta

SEQ ID NO: 226264 - DNA, 25 bp, SARS Virus
gttcgagtttaccctaagagtgtaa

SEQ ID NO: 226265 - DNA, 25 bp, SARS Virus
ttcgagtttacactaagagtgtaag

SEQ ID NO: 226266 - DNA, 25 bp, SARS Virus
tcgagtttacaccaagagtgtaaga

SEQ ID NO: 226267 - DNA, 25 bp, SARS Virus
cgagtttacactcagagtgtaagaa

SEQ ID NO: 226268 - DNA, 25 bp, SARS Virus
gagtttacactacgagtgtaagaac

SEQ ID NO: 226269 - DNA, 25 bp, SARS Virus
agtttacactaacagtgtaagaaca

SEQ ID NO: 226270 - DNA, 25 bp, SARS Virus
gtttacactaagcgtgtaagaacat

SEQ ID NO: 226271 - DNA, 25 bp, SARS Virus
tttacactaagactgtaagaacatt

SEQ ID NO: 226272 - DNA, 25 bp, SARS Virus
ttacactaagagcgtaagaacattg

SEQ ID NO: 226273 - DNA, 25 bp, SARS Virus
tacactaagagtctaagaacattgg

SEQ ID NO: 226274 - DNA, 25 bp, SARS Virus
acactaagagtgcaagaacattgga

SEQ ID NO: 226275 - DNA, 25 bp, SARS Virus
cactaagagtgtcagaacattggaa

SEQ ID NO: 226276 - DNA, 25 bp, SARS Virus
actaagagtgtacgaacattggaac

SEQ ID NO: 226277 - DNA, 25 bp, SARS Virus
ctaagagtgtaacaacattggaact

SEQ ID NO: 226278 - DNA, 25 bp, SARS Virus
taagagtgtaagcacattggaactt

SEQ ID NO: 226279 - DNA, 25 bp, SARS Virus
aagagtgtaagaccattggaacttg

SEQ ID NO: 226280 - DNA, 25 bp, SARS Virus
agagtgtaagaacattggaacttga

SEQ ID NO: 226281 - DNA, 25 bp, SARS Virus
gagtgtaagaaccttggaacttgaa

SEQ ID NO: 226282 - DNA, 25 bp, SARS Virus
agtgtaagaacactggaacttgaag

SEQ ID NO: 226283 - DNA, 25 bp, SARS Virus
gtgtaagaacatcggaacttgaagg

SEQ ID NO: 226284 - DNA, 25 bp, SARS Virus
tgtaagaacattcgaacttgaaggg

SEQ ID NO: 226285 - DNA, 25 bp, SARS Virus
gtaagaacattgcaacttgaagggt

SEQ ID NO: 226286 - DNA, 25 bp, SARS Virus
taagaacattggcacttgaagggtt

SEQ ID NO: 226287 - DNA, 25 bp, SARS Virus
aagaacattggaccttgaagggttt

SEQ ID NO: 226288 - DNA, 25 bp, SARS Virus
agaacattggaacttgaagggtttg

SEQ ID NO: 226289 - DNA, 25 bp, SARS Virus
gaacattggaacctgaagggtttgt

SEQ ID NO: 226290 - DNA, 25 bp, SARS Virus
aacattggaactcgaagggtttgtc

SEQ ID NO: 226291 - DNA, 25 bp, SARS Virus
acattggaacttcaagggtttgtca

SEQ ID NO: 226292 - DNA, 25 bp, SARS Virus
cattggaacttgcagggtttgtcat

SEQ ID NO: 226293 - DNA, 25 bp, SARS Virus
attggaacttgacgggtttgtcata

SEQ ID NO: 226294 - DNA, 25 bp, SARS Virus
ttggaacttgaacggtttgtcatag

SEQ ID NO: 226295 - DNA, 25 bp, SARS Virus
tggaacttgaagcgtttgtcataga

SEQ ID NO: 226296 - DNA, 25 bp, SARS Virus
ggaacttgaaggctttgtcatagaa

SEQ ID NO: 226297 - DNA, 25 bp, SARS Virus
gaacttgaagggcttgtcatagaag

SEQ ID NO: 226298 - DNA, 25 bp, SARS Virus
aacttgaagggtctgtcatagaaga

SEQ ID NO: 226299 - DNA, 25 bp, SARS Virus
acttgaagggttcgtcatagaagag

SEQ ID NO: 226300 - DNA, 25 bp, SARS Virus
cttgaagggtttctcatagaagagg

SEQ ID NO: 226301 - DNA, 25 bp, SARS Virus
ttgaagggtttgccatagaagaggt

SEQ ID NO: 226302 - DNA, 25 bp, SARS Virus
tgaagggtttgtcatagaagaggtt

SEQ ID NO: 226303 - DNA, 25 bp, SARS Virus
gaagggtttgtcctagaagaggttt

SEQ ID NO: 226304 - DNA, 25 bp, SARS Virus
aagggtttgtcacagaagaggtttc

SEQ ID NO: 226305 - DNA, 25 bp, SARS Virus
agggtttgtcatcgaagaggtttcc

SEQ ID NO: 226306 - DNA, 25 bp, SARS Virus
gggtttgtcatacaagaggtttcca

SEQ ID NO: 226307 - DNA, 25 bp, SARS Virus
ggtttgtcatagcagaggtttccaa

SEQ ID NO: 226308 - DNA, 25 bp, SARS Virus
gtttgtcatagacgaggtttccaat

SEQ ID NO: 226309 - DNA, 25 bp, SARS Virus
tttgtcatagaacaggtttccaatg

SEQ ID NO: 226310 - DNA, 25 bp, SARS Virus
ttgtcatagaagcggtttccaatgt

SEQ ID NO: 226311 - DNA, 25 bp, SARS Virus
tgtcatagaagacgtttccaatgtg

SEQ ID NO: 226312 - DNA, 25 bp, SARS Virus
gtcatagaagagctttccaatgtgg

SEQ ID NO: 226313 - DNA, 25 bp, SARS Virus
tcatagaagaggcttccaatgtgga

SEQ ID NO: 226314 - DNA, 25 bp, SARS Virus
catagaagaggtctccaatgtggaa

SEQ ID NO: 226315 - DNA, 25 bp, SARS Virus
atagaagaggttcccaatgtggaaa

SEQ ID NO: 226316 - DNA, 25 bp, SARS Virus
tagaagaggtttccaatgtggaaat

SEQ ID NO: 226317 - DNA, 25 bp, SARS Virus
agaagaggtttccaatgtggaaatt

SEQ ID NO: 226318 - DNA, 25 bp, SARS Virus
gaagaggtttcccatgtggaaatta

SEQ ID NO: 226319 - DNA, 25 bp, SARS Virus
aagaggtttccactgtggaaattaa

SEQ ID NO: 226320 - DNA, 25 bp, SARS Virus
agaggtttccaacgtggaaattaac

SEQ ID NO: 226321 - DNA, 25 bp, SARS Virus
gaggtttccaatctggaaattaacc

SEQ ID NO: 226322 - DNA, 25 bp, SARS Virus
aggtttccaatgcggaaattaacca

SEQ ID NO: 226323 - DNA, 25 bp, SARS Virus
ggtttccaatgtcgaaattaaccac

SEQ ID NO: 226324 - DNA, 25 bp, SARS Virus
gtttccaatgtgcaaattaaccacg

SEQ ID NO: 226325 - DNA, 25 bp, SARS Virus
tttccaatgtggcaattaaccacgt

SEQ ID NO: 226326 - DNA, 25 bp, SARS Virus
ttccaatgtggacattaaccacgtg

SEQ ID NO: 226327 - DNA, 25 bp, SARS Virus
tccaatgtggaacttaaccacgtgg

SEQ ID NO: 226328 - DNA, 25 bp, SARS Virus
ccaatgtggaaactaaccacgtggg

SEQ ID NO: 226329 - DNA, 25 bp, SARS Virus
caatgtggaaatcaaccacgtgggg

SEQ ID NO: 226330 - DNA, 25 bp, SARS Virus
aatgtggaaattcaccacgtggggg

SEQ ID NO: 226331 - DNA, 25 bp, SARS Virus
atgtggaaattacccacgtggggga

SEQ ID NO: 226332 - DNA, 25 bp, SARS Virus
tgtggaaattaaccacgtgggggaa

SEQ ID NO: 226333 - DNA, 25 bp, SARS Virus
gtggaaattaaccacgtgggggaaa

SEQ ID NO: 226334 - DNA, 25 bp, SARS Virus
tggaaattaaccccgtgggggaaaa

SEQ ID NO: 226335 - DNA, 25 bp, SARS Virus
ggaaattaaccacgtgggggaaaat

SEQ ID NO: 226336 - DNA, 25 bp, SARS Virus
gaaattaaccacctgggggaaaatt

SEQ ID NO: 226337 - DNA, 25 bp, SARS Virus
aaattaaccacgcgggggaaaattc

SEQ ID NO: 226338 - DNA, 25 bp, SARS Virus
aattaaccacgtcggggaaaattcg

SEQ ID NO: 226339 - DNA, 25 bp, SARS Virus
attaaccacgtgcgggaaaattcgc

SEQ ID NO: 226340 - DNA, 25 bp, SARS Virus
ttaaccacgtggcggaaaattcgct

SEQ ID NO: 226341 - DNA, 25 bp, SARS Virus
taaccacgtgggcgaaaattcgctt

SEQ ID NO: 226342 - DNA, 25 bp, SARS Virus
aaccacgtggggcaaaattcgcttt

SEQ ID NO: 226343 - DNA, 25 bp, SARS Virus
accacgtgggggcaaattcgctttc

SEQ ID NO: 226344 - DNA, 25 bp, SARS Virus
ccacgtgggggacaattcgctttct

SEQ ID NO: 226345 - DNA, 25 bp, SARS Virus
cacgtgggggaacattcgctttctg

SEQ ID NO: 226346 - DNA, 25 bp, SARS Virus
acgtgggggaaacttcgctttctgt

SEQ ID NO: 226347 - DNA, 25 bp, SARS Virus
cgtgggggaaaactcgctttctgta

SEQ ID NO: 226348 - DNA, 25 bp, SARS Virus
gtgggggaaaatccgctttctgtaa

SEQ ID NO: 226349 - DNA, 25 bp, SARS Virus
tgggggaaaattcgctttctgtaac

SEQ ID NO: 226350 - DNA, 25 bp, SARS Virus
gggggaaaattccctttctgtaaca

SEQ ID NO: 226351 - DNA, 25 bp, SARS Virus
ggggaaaattcgctttctgtaacaa

SEQ ID NO: 226352 - DNA, 25 bp, SARS Virus
gggaaaattcgccttctgtaacaaa

SEQ ID NO: 226353 - DNA, 25 bp, SARS Virus
ggaaaattcgctctctgtaacaaac

SEQ ID NO: 226354 - DNA, 25 bp, SARS Virus
gaaaattcgcttcctgtaacaaaca

SEQ ID NO: 226355 - DNA, 25 bp, SARS Virus
aaaattcgctttctgtaacaaacat

SEQ ID NO: 226356 - DNA, 25 bp, SARS Virus
aaattcgctttccgtaacaaacatc

SEQ ID NO: 226357 - DNA, 25 bp, SARS Virus
aattcgctttctctaacaaacatcg

SEQ ID NO: 226358 - DNA, 25 bp, SARS Virus
attcgctttctgcaacaaacatcgg

SEQ ID NO: 226359 - DNA, 25 bp, SARS Virus
ttcgctttctgtcacaaacatcggt

SEQ ID NO: 226360 - DNA, 25 bp, SARS Virus
tcgctttctgtaccaaacatcggtc

SEQ ID NO: 226361 - DNA, 25 bp, SARS Virus
cgctttctgtaacaaacatcggtca

SEQ ID NO: 226362 - DNA, 25 bp, SARS Virus
gctttctgtaaccaacatcggtcat

SEQ ID NO: 226363 - DNA, 25 bp, SARS Virus
ctttctgtaacacacatcggtcatt

SEQ ID NO: 226364 - DNA, 25 bp, SARS Virus
tttctgtaacaaccatcggtcattt

SEQ ID NO: 226365 - DNA, 25 bp, SARS Virus
ttctgtaacaaacatcggtcatttg

SEQ ID NO: 226366 - DNA, 25 bp, SARS Virus
tctgtaacaaacctcggtcatttgg

SEQ ID NO: 226367 - DNA, 25 bp, SARS Virus
ctgtaacaaacaccggtcatttggt

SEQ ID NO: 226368 - DNA, 25 bp, SARS Virus
tgtaacaaacatcggtcatttggtc

SEQ ID NO: 226369 - DNA, 25 bp, SARS Virus
gtaacaaacatccgtcatttggtcc

SEQ ID NO: 226370 - DNA, 25 bp, SARS Virus
taacaaacatcgctcatttggtcct

SEQ ID NO: 226371 - DNA, 25 bp, SARS Virus
aacaaacatcggccatttggtcctc

SEQ ID NO: 226372 - DNA, 25 bp, SARS Virus
acaaacatcggtcatttggtcctct

SEQ ID NO: 226373 - DNA, 25 bp, SARS Virus
caaacatcggtcctttggtcctctg

SEQ ID NO: 226374 - DNA, 25 bp, SARS Virus
aaacatcggtcacttggtcctctgt

SEQ ID NO: 226375 - DNA, 25 bp, SARS Virus
aacatcggtcatctggtcctctgtt

SEQ ID NO: 226376 - DNA, 25 bp, SARS Virus
acatcggtcattcggtcctctgtta

SEQ ID NO: 226377 - DNA, 25 bp, SARS Virus
catcggtcatttcgtcctctgttac

SEQ ID NO: 226378 - DNA, 25 bp, SARS Virus
atcggtcatttgctcctctgttacg

SEQ ID NO: 226379 - DNA, 25 bp, SARS Virus
tcggtcatttggccctctgttacgc

SEQ ID NO: 226380 - DNA, 25 bp, SARS Virus
cggtcatttggtcctctgttacgcg

SEQ ID NO: 226381 - DNA, 25 bp, SARS Virus
ggtcatttggtcctctgttacgcgt

SEQ ID NO: 226382 - DNA, 25 bp, SARS Virus
gtcatttggtcccctgttacgcgtc

SEQ ID NO: 226383 - DNA, 25 bp, SARS Virus
tcatttggtcctctgttacgcgtca

SEQ ID NO: 226384 - DNA, 25 bp, SARS Virus
catttggtcctccgttacgcgtcat

SEQ ID NO: 226385 - DNA, 25 bp, SARS Virus
atttggtcctctcttacgcgtcata

SEQ ID NO: 226386 - DNA, 25 bp, SARS Virus
tttggtcctctgctacgcgtcataa

SEQ ID NO: 226387 - DNA, 25 bp, SARS Virus
ttggtcctctgtcacgcgtcataac

SEQ ID NO: 226388 - DNA, 25 bp, SARS Virus
tggtcctctgttccgcgtcataaca

SEQ ID NO: 226389 - DNA, 25 bp, SARS Virus
ggtcctctgttacgcgtcataacaa

SEQ ID NO: 226390 - DNA, 25 bp, SARS Virus
gtcctctgttacccgtcataacaag

SEQ ID NO: 226391 - DNA, 25 bp, SARS Virus
tcctctgttacgcgtcataacaaga

SEQ ID NO: 226392 - DNA, 25 bp, SARS Virus
cctctgttacgcctcataacaagaa

SEQ ID NO: 226393 - DNA, 25 bp, SARS Virus
ctctgttacgcgccataacaagaaa

SEQ ID NO: 226394 - DNA, 25 bp, SARS Virus
tctgttacgcgtcataacaagaaac

SEQ ID NO: 226395 - DNA, 25 bp, SARS Virus
ctgttacgcgtcctaacaagaaaca

SEQ ID NO: 226396 - DNA, 25 bp, SARS Virus
tgttacgcgtcacaacaagaaacag

SEQ ID NO: 226397 - DNA, 25 bp, SARS Virus
gttacgcgtcatcacaagaaacagg

SEQ ID NO: 226398 - DNA, 25 bp, SARS Virus
ttacgcgtcataccaagaaacagga

SEQ ID NO: 226399 - DNA, 25 bp, SARS Virus
tacgcgtcataacaagaaacaggaa

SEQ ID NO: 226400 - DNA, 25 bp, SARS Virus
acgcgtcataaccagaaacaggaat

SEQ ID NO: 226401 - DNA, 25 bp, SARS Virus
cgcgtcataacacgaaacaggaatt

SEQ ID NO: 226402 - DNA, 25 bp, SARS Virus
gcgtcataacaacaaacaggaatta

SEQ ID NO: 226403 - DNA, 25 bp, SARS Virus
cgtcataacaagcaacaggaattag

SEQ ID NO: 226404 - DNA, 25 bp, SARS Virus
gtcataacaagacacaggaattaga

SEQ ID NO: 226405 - DNA, 25 bp, SARS Virus
tcataacaagaaccaggaattagag

SEQ ID NO: 226406 - DNA, 25 bp, SARS Virus
cataacaagaaacaggaattagaga

SEQ ID NO: 226407 - DNA, 25 bp, SARS Virus
ataacaagaaaccggaattagagat

SEQ ID NO: 226408 - DNA, 25 bp, SARS Virus
taacaagaaacacgaattagagatt

SEQ ID NO: 226409 - DNA, 25 bp, SARS Virus
aacaagaaacagcaattagagattc

SEQ ID NO: 226410 - DNA, 25 bp, SARS Virus
acaagaaacaggcattagagattct

SEQ ID NO: 226411 - DNA, 25 bp, SARS Virus
caagaaacaggacttagagattctc

SEQ ID NO: 226412 - DNA, 25 bp, SARS Virus
aagaaacaggaactagagattctcg

SEQ ID NO: 226413 - DNA, 25 bp, SARS Virus
agaaacaggaatcagagattctcgt

SEQ ID NO: 226414 - DNA, 25 bp, SARS Virus
gaaacaggaattcgagattctcgta

SEQ ID NO: 226415 - DNA, 25 bp, SARS Virus
aaacaggaattacagattctcgtac

SEQ ID NO: 226416 - DNA, 25 bp, SARS Virus
aacaggaattagcgattctcgtact

SEQ ID NO: 226417 - DNA, 25 bp, SARS Virus
acaggaattagacattctcgtactc

SEQ ID NO: 226418 - DNA, 25 bp, SARS Virus
caggaattagagcttctcgtactcc

SEQ ID NO: 226419 - DNA, 25 bp, SARS Virus
aggaattagagactctcgtactccg

SEQ ID NO: 226420 - DNA, 25 bp, SARS Virus
ggaattagagatcctcgtactccgg

SEQ ID NO: 226421 - DNA, 25 bp, SARS Virus
gaattagagattctcgtactccggt

SEQ ID NO: 226422 - DNA, 25 bp, SARS Virus
aattagagattcccgtactccggta

SEQ ID NO: 226423 - DNA, 25 bp, SARS Virus
attagagattctcgtactccggtaa

SEQ ID NO: 226424 - DNA, 25 bp, SARS Virus
ttagagattctcctactccggtaaa

SEQ ID NO: 226425 - DNA, 25 bp, SARS Virus
tagagattctcgcactccggtaaat

SEQ ID NO: 226426 - DNA, 25 bp, SARS Virus
agagattctcgtcctccggtaaatg

SEQ ID NO: 226427 - DNA, 25 bp, SARS Virus
gagattctcgtactccggtaaatgt

SEQ ID NO: 226428 - DNA, 25 bp, SARS Virus
agattctcgtaccccggtaaatgtg

SEQ ID NO: 226429 - DNA, 25 bp, SARS Virus
gattctcgtactccggtaaatgtgt

SEQ ID NO: 226430 - DNA, 25 bp, SARS Virus
attctcgtactccggtaaatgtgtc

SEQ ID NO: 226431 - DNA, 25 bp, SARS Virus
ttctcgtactcccgtaaatgtgtct

SEQ ID NO: 226432 - DNA, 25 bp, SARS Virus
tctcgtactccgctaaatgtgtctg

SEQ ID NO: 226433 - DNA, 25 bp, SARS Virus
ctcgtactccggcaaatgtgtctga

SEQ ID NO: 226434 - DNA, 25 bp, SARS Virus
tcgtactccggtcaatgtgtctgac

SEQ ID NO: 226435 - DNA, 25 bp, SARS Virus
cgtactccggtacatgtgtctgacc

SEQ ID NO: 226436 - DNA, 25 bp, SARS Virus
gtactccggtaactgtgtctgacca

SEQ ID NO: 226437 - DNA, 25 bp, SARS Virus
tactccggtaaacgtgtctgaccac

SEQ ID NO: 226438 - DNA, 25 bp, SARS Virus
actccggtaaatctgtctgaccaca

SEQ ID NO: 226439 - DNA, 25 bp, SARS Virus
ctccggtaaatgcgtctgaccacac

SEQ ID NO: 226440 - DNA, 25 bp, SARS Virus
tccggtaaatgtctctgaccacacg

SEQ ID NO: 226441 - DNA, 25 bp, SARS Virus
ccggtaaatgtgcctgaccacacgg

SEQ ID NO: 226442 - DNA, 25 bp, SARS Virus
cggtaaatgtgtctgaccacacggt

SEQ ID NO: 226443 - DNA, 25 bp, SARS Virus
ggtaaatgtgtccgaccacacggtt

SEQ ID NO: 226444 - DNA, 25 bp, SARS Virus
gtaaatgtgtctcaccacacggttg

SEQ ID NO: 226445 - DNA, 25 bp, SARS Virus
taaatgtgtctgcccacacggttgc

SEQ ID NO: 226446 - DNA, 25 bp, SARS Virus
aaatgtgtctgaccacacggttgct

SEQ ID NO: 226447 - DNA, 25 bp, SARS Virus
aatgtgtctgaccacacggttgcta

SEQ ID NO: 226448 - DNA, 25 bp, SARS Virus
atgtgtctgaccccacggttgctat

SEQ ID NO: 226449 - DNA, 25 bp, SARS Virus
tgtgtctgaccacacggttgctatc

SEQ ID NO: 226450 - DNA, 25 bp, SARS Virus
gtgtctgaccacccggttgctatcg

SEQ ID NO: 226451 - DNA, 25 bp, SARS Virus
tgtctgaccacacggttgctatcga

SEQ ID NO: 226452 - DNA, 25 bp, SARS Virus
gtctgaccacaccgttgctatcgag

SEQ ID NO: 226453 - DNA, 25 bp, SARS Virus
tctgaccacacgcttgctatcgagg

SEQ ID NO: 226454 - DNA, 25 bp, SARS Virus
ctgaccacacggctgctatcgaggt

SEQ ID NO: 226455 - DNA, 25 bp, SARS Virus
tgaccacacggtcgctatcgaggta

SEQ ID NO: 226456 - DNA, 25 bp, SARS Virus
gaccacacggttcctatcgaggtaa

SEQ ID NO: 226457 - DNA, 25 bp, SARS Virus
accacacggttgctatcgaggtaaa

SEQ ID NO: 226458 - DNA, 25 bp, SARS Virus
ccacacggttgccatcgaggtaaac

SEQ ID NO: 226459 - DNA, 25 bp, SARS Virus
cacacggttgctctcgaggtaaaca

SEQ ID NO: 226460 - DNA, 25 bp, SARS Virus
acacggttgctaccgaggtaaacac

SEQ ID NO: 226461 - DNA, 25 bp, SARS Virus
cacggttgctatcgaggtaaacact

SEQ ID NO: 226462 - DNA, 25 bp, SARS Virus
acggttgctatccaggtaaacactt

SEQ ID NO: 226463 - DNA, 25 bp, SARS Virus
cggttgctatcgcggtaaacacttc

SEQ ID NO: 226464 - DNA, 25 bp, SARS Virus
ggttgctatcgacgtaaacacttcg

SEQ ID NO: 226465 - DNA, 25 bp, SARS Virus
aagaagaaggagggtgagacgtagc

SEQ ID NO: 226466 - DNA, 25 bp, SARS Virus
agaagaaggagtgtgagacgtagca

SEQ ID NO: 226467 - DNA, 25 bp, SARS Virus
gaagaaggagtgggagacgtagcag

SEQ ID NO: 226468 - DNA, 25 bp, SARS Virus
aagaaggagtgtgagacgtagcagg

SEQ ID NO: 226469 - DNA, 25 bp, SARS Virus
agaaggagtgtgggacgtagcagga

SEQ ID NO: 226470 - DNA, 25 bp, SARS Virus
gaaggagtgtgagacgtagcaggag

SEQ ID NO: 226471 - DNA, 25 bp, SARS Virus
aaggagtgtgaggcgtagcaggaga

SEQ ID NO: 226472 - DNA, 25 bp, SARS Virus
aggagtgtgagaggtagcaggagaa

SEQ ID NO: 226473 - DNA, 25 bp, SARS Virus
ggagtgtgagacgtagcaggagaag

SEQ ID NO: 226474 - DNA, 25 bp, SARS Virus
gagtgtgagacggagcaggagaaga

SEQ ID NO: 226475 - DNA, 25 bp, SARS Virus
agtgtgagacgtggcaggagaagaa

SEQ ID NO: 226476 - DNA, 25 bp, SARS Virus
gtgtgagacgtagcaggagaagaag

SEQ ID NO: 226477 - DNA, 25 bp, SARS Virus
tgtgagacgtaggaggagaagaagg

SEQ ID NO: 226478 - DNA, 25 bp, SARS Virus
gtgagacgtagcgggagaagaagga

SEQ ID NO: 226479 - DNA, 25 bp, SARS Virus
tgagacgtagcaggagaagaaggag

SEQ ID NO: 226480 - DNA, 25 bp, SARS Virus
gagacgtagcaggagaagaaggagt

SEQ ID NO: 226481 - DNA, 25 bp, SARS Virus
agacgtagcaggggaagaaggagta

SEQ ID NO: 226482 - DNA, 25 bp, SARS Virus
gacgtagcaggagaagaaggagtag

SEQ ID NO: 226483 - DNA, 25 bp, SARS Virus
acgtagcaggaggagaaggagtaga

SEQ ID NO: 226484 - DNA, 25 bp, SARS Virus
cgtagcaggagaggaaggagtagac

SEQ ID NO: 226485 - DNA, 25 bp, SARS Virus
gtagcaggagaagaaggagtagacc

SEQ ID NO: 226486 - DNA, 25 bp, SARS Virus
tagcaggagaaggaggagtagacct

SEQ ID NO: 226487 - DNA, 25 bp, SARS Virus
agcaggagaagagggagtagacctc

SEQ ID NO: 226488 - DNA, 25 bp, SARS Virus
gcaggagaagaaggagtagacctcc

SEQ ID NO: 226489 - DNA, 25 bp, SARS Virus
caggagaagaaggagtagacctccc

SEQ ID NO: 226490 - DNA, 25 bp, SARS Virus
aggagaagaaggggtagacctccca

SEQ ID NO: 226491 - DNA, 25 bp, SARS Virus
ggagaagaaggagtagacctcccat

SEQ ID NO: 226492 - DNA, 25 bp, SARS Virus
gagaagaaggaggagacctcccatt

SEQ ID NO: 226493 - DNA, 25 bp, SARS Virus
agaagaaggagtggacctcccattt

SEQ ID NO: 226494 - DNA, 25 bp, SARS Virus
gaagaaggagtagacctcccatttt

SEQ ID NO: 226495 - DNA, 25 bp, SARS Virus
aagaaggagtaggcctcccattttc

SEQ ID NO: 226496 - DNA, 25 bp, SARS Virus
agaaggagtagagctcccattttcc

SEQ ID NO: 226497 - DNA, 25 bp, SARS Virus
gaaggagtagacgtcccattttcct

SEQ ID NO: 226498 - DNA, 25 bp, SARS Virus
aaggagtagaccgcccattttcctt

SEQ ID NO: 226499 - DNA, 25 bp, SARS Virus
aggagtagacctgccattttccttg

SEQ ID NO: 226500 - DNA, 25 bp, SARS Virus
ggagtagacctcgcattttccttgt

SEQ ID NO: 226501 - DNA, 25 bp, SARS Virus
gagtagacctccgattttccttgtt

SEQ ID NO: 226502 - DNA, 25 bp, SARS Virus
agtagacctcccgttttccttgtta

SEQ ID NO: 226503 - DNA, 25 bp, SARS Virus
gtagacctcccagtttccttgttat

SEQ ID NO: 226504 - DNA, 25 bp, SARS Virus
tagacctcccatgttccttgttatg

SEQ ID NO: 226505 - DNA, 25 bp, SARS Virus
agacctcccattgtccttgttatgt

SEQ ID NO: 226506 - DNA, 25 bp, SARS Virus
gacctcccatttgccttgttatgta

SEQ ID NO: 226507 - DNA, 25 bp, SARS Virus
acctcccattttgcttgttatgtat

SEQ ID NO: 226508 - DNA, 25 bp, SARS Virus
cctcccattttcgttgttatgtatg

SEQ ID NO: 226509 - DNA, 25 bp, SARS Virus
ctcccattttccgtgttatgtatgc

SEQ ID NO: 226510 - DNA, 25 bp, SARS Virus
tcccattttcctggttatgtatgca

SEQ ID NO: 226511 - DNA, 25 bp, SARS Virus
cccattttccttgttatgtatgcac

SEQ ID NO: 226512 - DNA, 25 bp, SARS Virus
ccattttccttggtatgtatgcact

SEQ ID NO: 226513 - DNA, 25 bp, SARS Virus
cattttccttgtgatgtatgcacta

SEQ ID NO: 226514 - DNA, 25 bp, SARS Virus
attttccttgttgtgtatgcactac

SEQ ID NO: 226515 - DNA, 25 bp, SARS Virus
ttttccttgttaggtatgcactact

SEQ ID NO: 226516 - DNA, 25 bp, SARS Virus
tttccttgttatgtatgcactactt

SEQ ID NO: 226517 - DNA, 25 bp, SARS Virus
ttccttgttatggatgcactacttt

SEQ ID NO: 226518 - DNA, 25 bp, SARS Virus
tccttgttatgtgtgcactactttt

SEQ ID NO: 226519 - DNA, 25 bp, SARS Virus
ccttgttatgtaggcactacttttc

SEQ ID NO: 226520 - DNA, 25 bp, SARS Virus
cttgttatgtatgcactacttttca

SEQ ID NO: 226521 - DNA, 25 bp, SARS Virus
ttgttatgtatggactacttttcaa

SEQ ID NO: 226522 - DNA, 25 bp, SARS Virus
tgttatgtatgcgctacttttcaaa

SEQ ID NO: 226523 - DNA, 25 bp, SARS Virus
gttatgtatgcagtacttttcaaaa

SEQ ID NO: 226524 - DNA, 25 bp, SARS Virus
ttatgtatgcacgacttttcaaaag

SEQ ID NO: 226525 - DNA, 25 bp, SARS Virus
tatgtatgcactgcttttcaaaaga

SEQ ID NO: 226526 - DNA, 25 bp, SARS Virus
atgtatgcactagttttcaaaagaa

SEQ ID NO: 226527 - DNA, 25 bp, SARS Virus
tgtatgcactacgtttcaaaagaag

SEQ ID NO: 226528 - DNA, 25 bp, SARS Virus
gtatgcactactgttcaaaagaagt

SEQ ID NO: 226529 - DNA, 25 bp, SARS Virus
tatgcactacttgtcaaaagaagtg

SEQ ID NO: 226530 - DNA, 25 bp, SARS Virus
atgcactactttgcaaaagaagtgg

SEQ ID NO: 226531 - DNA, 25 bp, SARS Virus
tgcactacttttgaaaagaagtggt

SEQ ID NO: 226532 - DNA, 25 bp, SARS Virus
gcactacttttcgaaagaagtggtc

SEQ ID NO: 226533 - DNA, 25 bp, SARS Virus
cactacttttcagaagaagtggtcg

SEQ ID NO: 226534 - DNA, 25 bp, SARS Virus
actacttttcaagagaagtggtcgt

SEQ ID NO: 226535 - DNA, 25 bp, SARS Virus
ctacttttcaaaggaagtggtcgta

SEQ ID NO: 226536 - DNA, 25 bp, SARS Virus
tacttttcaaaagaagtggtcgtag

SEQ ID NO: 226537 - DNA, 25 bp, SARS Virus
acttttcaaaaggagtggtcgtagt

SEQ ID NO: 226538 - DNA, 25 bp, SARS Virus
cttttcaaaagaggtggtcgtagta

SEQ ID NO: 226539 - DNA, 25 bp, SARS Virus
ttttcaaaagaagtggtcgtagtag

SEQ ID NO: 226540 - DNA, 25 bp, SARS Virus
tttcaaaagaaggggtcgtagtagt

SEQ ID NO: 226541 - DNA, 25 bp, SARS Virus
ttcaaaagaagtggtcgtagtagtt

SEQ ID NO: 226542 - DNA, 25 bp, SARS Virus
tcaaaagaagtggtcgtagtagttt

SEQ ID NO: 226543 - DNA, 25 bp, SARS Virus
caaaagaagtgggcgtagtagttta

SEQ ID NO: 226544 - DNA, 25 bp, SARS Virus
aaaagaagtggtggtagtagtttat

SEQ ID NO: 226545 - DNA, 25 bp, SARS Virus
aaagaagtggtcgtagtagtttatt

SEQ ID NO: 226546 - DNA, 25 bp, SARS Virus
aagaagtggtcggagtagtttattc

SEQ ID NO: 226547 - DNA, 25 bp, SARS Virus
agaagtggtcgtggtagtttattca

SEQ ID NO: 226548 - DNA, 25 bp, SARS Virus
gaagtggtcgtagtagtttattcat

SEQ ID NO: 226549 - DNA, 25 bp, SARS Virus
aagtggtcgtaggagtttattcatc

SEQ ID NO: 226550 - DNA, 25 bp, SARS Virus
agtggtcgtagtggtttattcatct

SEQ ID NO: 226551 - DNA, 25 bp, SARS Virus
gtggtcgtagtagtttattcatctt

SEQ ID NO: 226552 - DNA, 25 bp, SARS Virus
tggtcgtagtaggttattcatctta

SEQ ID NO: 226553 - DNA, 25 bp, SARS Virus
ggtcgtagtagtgtattcatcttac

SEQ ID NO: 226554 - DNA, 25 bp, SARS Virus
gtcgtagtagttgattcatcttaca

SEQ ID NO: 226555 - DNA, 25 bp, SARS Virus
tcgtagtagtttgttcatcttacat

SEQ ID NO: 226556 - DNA, 25 bp, SARS Virus
cgtagtagtttagtcatcttacatc

SEQ ID NO: 226557 - DNA, 25 bp, SARS Virus
gtagtagtttatgcatcttacatcg

SEQ ID NO: 226558 - DNA, 25 bp, SARS Virus
tagtagtttattgatcttacatcga

SEQ ID NO: 226559 - DNA, 25 bp, SARS Virus
agtagtttattcgtcttacatcgat

SEQ ID NO: 226560 - DNA, 25 bp, SARS Virus
gtagtttattcagcttacatcgatg

SEQ ID NO: 226561 - DNA, 25 bp, SARS Virus
tagtttattcatgttacatcgatgt

SEQ ID NO: 226562 - DNA, 25 bp, SARS Virus
agtttattcatcgtacatcgatgtg

SEQ ID NO: 226563 - DNA, 25 bp, SARS Virus
gtttattcatctgacatcgatgtga

SEQ ID NO: 226564 - DNA, 25 bp, SARS Virus
tttattcatcttgcatcgatgtgag

SEQ ID NO: 226565 - DNA, 25 bp, SARS Virus
ttattcatcttagatcgatgtgagg

SEQ ID NO: 226566 - DNA, 25 bp, SARS Virus
tattcatcttacgtcgatgtgaggt

SEQ ID NO: 226567 - DNA, 25 bp, SARS Virus
attcatcttacagcgatgtgaggtg

SEQ ID NO: 226568 - DNA, 25 bp, SARS Virus
ttcatcttacatggatgtgaggtga

SEQ ID NO: 226569 - DNA, 25 bp, SARS Virus
tcatcttacatcgatgtgaggtgag

SEQ ID NO: 226570 - DNA, 25 bp, SARS Virus
catcttacatcggtgtgaggtgagt

SEQ ID NO: 226571 - DNA, 25 bp, SARS Virus
atcttacatcgaggtgaggtgagta

SEQ ID NO: 226572 - DNA, 25 bp, SARS Virus
tcttacatcgatgtgaggtgagtag

SEQ ID NO: 226573 - DNA, 25 bp, SARS Virus
cttacatcgatgggaggtgagtagt

SEQ ID NO: 226574 - DNA, 25 bp, SARS Virus
ttacatcgatgtgaggtgagtagtt

SEQ ID NO: 226575 - DNA, 25 bp, SARS Virus
tacatcgatgtggggtgagtagttc

SEQ ID NO: 226576 - DNA, 25 bp, SARS Virus
acatcgatgtgaggtgagtagttct

SEQ ID NO: 226577 - DNA, 25 bp, SARS Virus
catcgatgtgaggtgagtagttcta

SEQ ID NO: 226578 - DNA, 25 bp, SARS Virus
atcgatgtgaggggagtagttctag

SEQ ID NO: 226579 - DNA, 25 bp, SARS Virus
tcgatgtgaggtgagtagttctagt

SEQ ID NO: 226580 - DNA, 25 bp, SARS Virus
cgatgtgaggtgggtagttctagtt

SEQ ID NO: 226581 - DNA, 25 bp, SARS Virus
gatgtgaggtgagtagttctagtta

SEQ ID NO: 226582 - DNA, 25 bp, SARS Virus
atgtgaggtgaggagttctagttat

SEQ ID NO: 226583 - DNA, 25 bp, SARS Virus
tgtgaggtgagtggttctagttatg

SEQ ID NO: 226584 - DNA, 25 bp, SARS Virus
gtgaggtgagtagttctagttatgg

SEQ ID NO: 226585 - DNA, 25 bp, SARS Virus
tgaggtgagtaggtctagttatggg

SEQ ID NO: 226586 - DNA, 25 bp, SARS Virus
gaggtgagtagtgctagttatgggt

SEQ ID NO: 226587 - DNA, 25 bp, SARS Virus
aggtgagtagttgtagttatgggta

SEQ ID NO: 226588 - DNA, 25 bp, SARS Virus
ggtgagtagttcgagttatgggtac

SEQ ID NO: 226589 - DNA, 25 bp, SARS Virus
gtgagtagttctggttatgggtaca

SEQ ID NO: 226590 - DNA, 25 bp, SARS Virus
tgagtagttctagttatgggtacaa

SEQ ID NO: 226591 - DNA, 25 bp, SARS Virus
gagtagttctaggtatgggtacaac

SEQ ID NO: 226592 - DNA, 25 bp, SARS Virus
agtagttctagtgatgggtacaacc

SEQ ID NO: 226593 - DNA, 25 bp, SARS Virus
gtagttctagttgtgggtacaacca

SEQ ID NO: 226594 - DNA, 25 bp, SARS Virus
tagttctagttaggggtacaaccat

SEQ ID NO: 226595 - DNA, 25 bp, SARS Virus
agttctagttatgggtacaaccatt

SEQ ID NO: 226596 - DNA, 25 bp, SARS Virus
gttctagttatgggtacaaccattc

SEQ ID NO: 226597 - DNA, 25 bp, SARS Virus
ttctagttatgggtacaaccattcc

SEQ ID NO: 226598 - DNA, 25 bp, SARS Virus
tctagttatggggacaaccattcct

SEQ ID NO: 226599 - DNA, 25 bp, SARS Virus
ctagttatgggtgcaaccattcctc

SEQ ID NO: 226600 - DNA, 25 bp, SARS Virus
tagttatgggtagaaccattcctct

SEQ ID NO: 226601 - DNA, 25 bp, SARS Virus
agttatgggtacgaccattcctcta

SEQ ID NO: 226602 - DNA, 25 bp, SARS Virus
gttatgggtacagccattcctctag

SEQ ID NO: 226603 - DNA, 25 bp, SARS Virus
ttatgggtacaagcattcctctagt

SEQ ID NO: 226604 - DNA, 25 bp, SARS Virus
tatgggtacaacgattcctctagtc

SEQ ID NO: 226605 - DNA, 25 bp, SARS Virus
atgggtacaaccgttcctctagtct

SEQ ID NO: 226606 - DNA, 25 bp, SARS Virus
tgggtacaaccagtcctctagtctt

SEQ ID NO: 226607 - DNA, 25 bp, SARS Virus
gggtacaaccatgcctctagtcttt

SEQ ID NO: 226608 - DNA, 25 bp, SARS Virus
ggtacaaccattgctctagtctttg

SEQ ID NO: 226609 - DNA, 25 bp, SARS Virus
gtacaaccattcgtctagtctttga

SEQ ID NO: 226610 - DNA, 25 bp, SARS Virus
tacaaccattccgctagtctttgac

SEQ ID NO: 226611 - DNA, 25 bp, SARS Virus
acaaccattcctgtagtctttgacc

SEQ ID NO: 226612 - DNA, 25 bp, SARS Virus
caaccattcctcgagtctttgacca

SEQ ID NO: 226613 - DNA, 25 bp, SARS Virus
aaccattcctctggtctttgaccaa

SEQ ID NO: 226614 - DNA, 25 bp, SARS Virus
accattcctctagtctttgaccaac

SEQ ID NO: 226615 - DNA, 25 bp, SARS Virus
ccattcctctaggctttgaccaaca

SEQ ID NO: 226616 - DNA, 25 bp, SARS Virus
cattcctctagtgtttgaccaacat

SEQ ID NO: 226617 - DNA, 25 bp, SARS Virus
attcctctagtcgttgaccaacatt

SEQ ID NO: 226618 - DNA, 25 bp, SARS Virus
ttcctctagtctgtgaccaacattt

SEQ ID NO: 226619 - DNA, 25 bp, SARS Virus
tcctctagtcttggaccaacatttc

SEQ ID NO: 226620 - DNA, 25 bp, SARS Virus
cctctagtctttgaccaacatttca

SEQ ID NO: 226621 - DNA, 25 bp, SARS Virus
ctctagtctttggccaacatttcag

SEQ ID NO: 226622 - DNA, 25 bp, SARS Virus
tctagtctttgagcaacatttcaga

SEQ ID NO: 226623 - DNA, 25 bp, SARS Virus
ctagtctttgacgaacatttcagaa

SEQ ID NO: 226624 - DNA, 25 bp, SARS Virus
tagtctttgaccgacatttcagaag

SEQ ID NO: 226625 - DNA, 25 bp, SARS Virus
agtctttgaccagcatttcagaagt

SEQ ID NO: 226626 - DNA, 25 bp, SARS Virus
gtctttgaccaagatttcagaagtg

SEQ ID NO: 226627 - DNA, 25 bp, SARS Virus
tctttgaccaacgtttcagaagtgt

SEQ ID NO: 226628 - DNA, 25 bp, SARS Virus
ctttgaccaacagttcagaagtgtt

SEQ ID NO: 226629 - DNA, 25 bp, SARS Virus
tttgaccaacatgtcagaagtgttg

SEQ ID NO: 226630 - DNA, 25 bp, SARS Virus
ttgaccaacattgcagaagtgttgt

SEQ ID NO: 226631 - DNA, 25 bp, SARS Virus
tgaccaacatttgagaagtgttgtc

SEQ ID NO: 226632 - DNA, 25 bp, SARS Virus
gaccaacatttcggaagtgttgtcg

SEQ ID NO: 226633 - DNA, 25 bp, SARS Virus
accaacatttcagaagtgttgtcgg

SEQ ID NO: 226634 - DNA, 25 bp, SARS Virus
ccaacatttcaggagtgttgtcgga

SEQ ID NO: 226635 - DNA, 25 bp, SARS Virus
caacatttcagaggtgttgtcggag

SEQ ID NO: 226636 - DNA, 25 bp, SARS Virus
aacatttcagaagtgttgtcggaga

SEQ ID NO: 226637 - DNA, 25 bp, SARS Virus
acatttcagaagggttgtcggagac

SEQ ID NO: 226638 - DNA, 25 bp, SARS Virus
catttcagaagtgttgtcggagacg

SEQ ID NO: 226639 - DNA, 25 bp, SARS Virus
atttcagaagtggtgtcggagacga

SEQ ID NO: 226640 - DNA, 25 bp, SARS Virus
tttcagaagtgtggtcggagacgat

SEQ ID NO: 226641 - DNA, 25 bp, SARS Virus
ttcagaagtgttgtcggagacgatg

SEQ ID NO: 226642 - DNA, 25 bp, SARS Virus
tcagaagtgttggcggagacgatgt

SEQ ID NO: 226643 - DNA, 25 bp, SARS Virus
cagaagtgttgtgggagacgatgtt

SEQ ID NO: 226644 - DNA, 25 bp, SARS Virus
agaagtgttgtcggagacgatgttg

SEQ ID NO: 226645 - DNA, 25 bp, SARS Virus
gaagtgttgtcggagacgatgttgt

SEQ ID NO: 226646 - DNA, 25 bp, SARS Virus
aagtgttgtcggggacgatgttgtg

SEQ ID NO: 226647 - DNA, 25 bp, SARS Virus
agtgttgtcggagacgatgttgtgt

SEQ ID NO: 226648 - DNA, 25 bp, SARS Virus
gtgttgtcggaggcgatgttgtgta

SEQ ID NO: 226649 - DNA, 25 bp, SARS Virus
tgttgtcggagaggatgttgtgtac

SEQ ID NO: 226650 - DNA, 25 bp, SARS Virus
gttgtcggagacgatgttgtgtacg

SEQ ID NO: 226651 - DNA, 25 bp, SARS Virus
ttgtcggagacggtgttgtgtacgt

SEQ ID NO: 226652 - DNA, 25 bp, SARS Virus
tgtcggagacgaggttgtgtacgtt

SEQ ID NO: 226653 - DNA, 25 bp, SARS Virus
gtcggagacgatgttgtgtacgttt

SEQ ID NO: 226654 - DNA, 25 bp, SARS Virus
tcggagacgatggtgtgtacgtttg

SEQ ID NO: 226655 - DNA, 25 bp, SARS Virus
cggagacgatgtggtgtacgtttga

SEQ ID NO: 226656 - DNA, 25 bp, SARS Virus
ggagacgatgttgtgtacgtttgag

SEQ ID NO: 226657 - DNA, 25 bp, SARS Virus
gagacgatgttgggtacgtttgagt

SEQ ID NO: 226658 - DNA, 25 bp, SARS Virus
agacgatgttgtgtacgtttgagtc

SEQ ID NO: 226659 - DNA, 25 bp, SARS Virus
gacgatgttgtggacgtttgagtca

SEQ ID NO: 226660 - DNA, 25 bp, SARS Virus
acgatgttgtgtgcgtttgagtcat

SEQ ID NO: 226661 - DNA, 25 bp, SARS Virus
cgatgttgtgtaggtttgagtcatt

SEQ ID NO: 226662 - DNA, 25 bp, SARS Virus
gatgttgtgtacgtttgagtcattg

SEQ ID NO: 226663 - DNA, 25 bp, SARS Virus
atgttgtgtacggttgagtcattga

SEQ ID NO: 226664 - DNA, 25 bp, SARS Virus
tgttgtgtacgtgtgagtcattgaa

SEQ ID NO: 226665 - DNA, 25 bp, SARS Virus
gttgtgtacgttggagtcattgaag

SEQ ID NO: 226666 - DNA, 25 bp, SARS Virus
ttgtgtacgtttgagtcattgaagc

SEQ ID NO: 226667 - DNA, 25 bp, SARS Virus
tgtgtacgtttgggtcattgaagcc

SEQ ID NO: 226668 - DNA, 25 bp, SARS Virus
gtgtacgtttgagtcattgaagcca

SEQ ID NO: 226669 - DNA, 25 bp, SARS Virus
tgtacgtttgaggcattgaagccat

SEQ ID NO: 226670 - DNA, 25 bp, SARS Virus
gtacgtttgagtgattgaagccatg

SEQ ID NO: 226671 - DNA, 25 bp, SARS Virus
tacgtttgagtcgttgaagccatgg

SEQ ID NO: 226672 - DNA, 25 bp, SARS Virus
acgtttgagtcagtgaagccatggc

SEQ ID NO: 226673 - DNA, 25 bp, SARS Virus
cgtttgagtcatggaagccatggcc

SEQ ID NO: 226674 - DNA, 25 bp, SARS Virus
gtttgagtcattgaagccatggcct

SEQ ID NO: 226675 - DNA, 25 bp, SARS Virus
tttgagtcattggagccatggccta

SEQ ID NO: 226676 - DNA, 25 bp, SARS Virus
ttgagtcattgaggccatggcctaa

SEQ ID NO: 226677 - DNA, 25 bp, SARS Virus
tgagtcattgaagccatggcctaag

SEQ ID NO: 226678 - DNA, 25 bp, SARS Virus
gagtcattgaaggcatggcctaagt

SEQ ID NO: 226679 - DNA, 25 bp, SARS Virus
agtcattgaagcgatggcctaagtt

SEQ ID NO: 226680 - DNA, 25 bp, SARS Virus
gtcattgaagccgtggcctaagttg

SEQ ID NO: 226681 - DNA, 25 bp, SARS Virus
tcattgaagccagggcctaagttgt

SEQ ID NO: 226682 - DNA, 25 bp, SARS Virus
cattgaagccatggcctaagttgtc

SEQ ID NO: 226683 - DNA, 25 bp, SARS Virus
attgaagccatggcctaagttgtca

SEQ ID NO: 226684 - DNA, 25 bp, SARS Virus
ttgaagccatgggctaagttgtcac

SEQ ID NO: 226685 - DNA, 25 bp, SARS Virus
tgaagccatggcgtaagttgtcaca

SEQ ID NO: 226686 - DNA, 25 bp, SARS Virus
gaagccatggccgaagttgtcacat

SEQ ID NO: 226687 - DNA, 25 bp, SARS Virus
aagccatggcctgagttgtcacatc

SEQ ID NO: 226688 - DNA, 25 bp, SARS Virus
agccatggcctaggttgtcacatct

SEQ ID NO: 226689 - DNA, 25 bp, SARS Virus
gccatggcctaagttgtcacatctg

SEQ ID NO: 226690 - DNA, 25 bp, SARS Virus
ccatggcctaaggtgtcacatctgt

SEQ ID NO: 226691 - DNA, 25 bp, SARS Virus
catggcctaagtggtcacatctgtc

SEQ ID NO: 226692 - DNA, 25 bp, SARS Virus
atggcctaagttgtcacatctgtct

SEQ ID NO: 226693 - DNA, 25 bp, SARS Virus
tggcctaagttggcacatctgtctc

SEQ ID NO: 226694 - DNA, 25 bp, SARS Virus
ggcctaagttgtgacatctgtctcg

SEQ ID NO: 226695 - DNA, 25 bp, SARS Virus
gcctaagttgtcgcatctgtctcgt

SEQ ID NO: 226696 - DNA, 25 bp, SARS Virus
cctaagttgtcagatctgtctcgtg

SEQ ID NO: 226697 - DNA, 25 bp, SARS Virus
ctaagttgtcacgtctgtctcgtga

SEQ ID NO: 226698 - DNA, 25 bp, SARS Virus
taagttgtcacagctgtctcgtgaa

SEQ ID NO: 226699 - DNA, 25 bp, SARS Virus
aagttgtcacatgtgtctcgtgaaa

SEQ ID NO: 226700 - DNA, 25 bp, SARS Virus
agttgtcacatcggtctcgtgaaaa

SEQ ID NO: 226701 - DNA, 25 bp, SARS Virus
gttgtcacatctgtctcgtgaaaag

SEQ ID NO: 226702 - DNA, 25 bp, SARS Virus
ttgtcacatctggctcgtgaaaagt

SEQ ID NO: 226703 - DNA, 25 bp, SARS Virus
tgtcacatctgtgtcgtgaaaagta

SEQ ID NO: 226704 - DNA, 25 bp, SARS Virus
gtcacatctgtcgcgtgaaaagtaa

SEQ ID NO: 226705 - DNA, 25 bp, SARS Virus
tcacatctgtctggtgaaaagtaat

SEQ ID NO: 226706 - DNA, 25 bp, SARS Virus
cacatctgtctcgtgaaaagtaatt

SEQ ID NO: 226707 - DNA, 25 bp, SARS Virus
acatctgtctcgggaaaagtaattc

SEQ ID NO: 226708 - DNA, 25 bp, SARS Virus
catctgtctcgtgaaaagtaattcg

SEQ ID NO: 226709 - DNA, 25 bp, SARS Virus
atctgtctcgtggaaagtaattcgt

SEQ ID NO: 226710 - DNA, 25 bp, SARS Virus
tctgtctcgtgagaagtaattcgtg

SEQ ID NO: 226711 - DNA, 25 bp, SARS Virus
ctgtctcgtgaagagtaattcgtga

SEQ ID NO: 226712 - DNA, 25 bp, SARS Virus
tgtctcgtgaaaggtaattcgtgaa

SEQ ID NO: 226713 - DNA, 25 bp, SARS Virus
gtctcgtgaaaagtaattcgtgaaa

SEQ ID NO: 226714 - DNA, 25 bp, SARS Virus
tctcgtgaaaaggaattcgtgaaac

SEQ ID NO: 226715 - DNA, 25 bp, SARS Virus
ctcgtgaaaagtgattcgtgaaaca

SEQ ID NO: 226716 - DNA, 25 bp, SARS Virus
tcgtgaaaagtagttcgtgaaacag

SEQ ID NO: 226717 - DNA, 25 bp, SARS Virus
cgtgaaaagtaagtcgtgaaacagt

SEQ ID NO: 226718 - DNA, 25 bp, SARS Virus
gtgaaaagtaatgcgtgaaacagtt

SEQ ID NO: 226719 - DNA, 25 bp, SARS Virus
tgaaaagtaattggtgaaacagttg

SEQ ID NO: 226720 - DNA, 25 bp, SARS Virus
gaaaagtaattcgtgaaacagttgt

SEQ ID NO: 226721 - DNA, 25 bp, SARS Virus
aaaagtaattcgggaaacagttgtg

SEQ ID NO: 226722 - DNA, 25 bp, SARS Virus
aaagtaattcgtgaaacagttgtgc

SEQ ID NO: 226723 - DNA, 25 bp, SARS Virus
aagtaattcgtggaacagttgtgca

SEQ ID NO: 226724 - DNA, 25 bp, SARS Virus
agtaattcgtgagacagttgtgcaa

SEQ ID NO: 226725 - DNA, 25 bp, SARS Virus
gtaattcgtgaagcagttgtgcaag

SEQ ID NO: 226726 - DNA, 25 bp, SARS Virus
taattcgtgaaagagttgtgcaagt

SEQ ID NO: 226727 - DNA, 25 bp, SARS Virus
aattcgtgaaacggttgtgcaagta

SEQ ID NO: 226728 - DNA, 25 bp, SARS Virus
attcgtgaaacagttgtgcaagtag

SEQ ID NO: 226729 - DNA, 25 bp, SARS Virus
ttcgtgaaacaggtgtgcaagtagt

SEQ ID NO: 226730 - DNA, 25 bp, SARS Virus
tcgtgaaacagtggtgcaagtagtt

SEQ ID NO: 226731 - DNA, 25 bp, SARS Virus
cgtgaaacagttgtgcaagtagttc

SEQ ID NO: 226732 - DNA, 25 bp, SARS Virus
gtgaaacagttgggcaagtagttcg

SEQ ID NO: 226733 - DNA, 25 bp, SARS Virus
tgaaacagttgtgcaagtagttcga

SEQ ID NO: 226734 - DNA, 25 bp, SARS Virus
gaaacagttgtggaagtagttcgag

SEQ ID NO: 226735 - DNA, 25 bp, SARS Virus
aaacagttgtgcgagtagttcgagt

SEQ ID NO: 226736 - DNA, 25 bp, SARS Virus
aacagttgtgcaggtagttcgagtt

SEQ ID NO: 226737 - DNA, 25 bp, SARS Virus
acagttgtgcaagtagttcgagttt

SEQ ID NO: 226738 - DNA, 25 bp, SARS Virus
cagttgtgcaaggagttcgagttta

SEQ ID NO: 226739 - DNA, 25 bp, SARS Virus
agttgtgcaagtggttcgagtttac

SEQ ID NO: 226740 - DNA, 25 bp, SARS Virus
gttgtgcaagtagttcgagtttaca

SEQ ID NO: 226741 - DNA, 25 bp, SARS Virus
ttgtgcaagtaggtcgagtttacac

SEQ ID NO: 226742 - DNA, 25 bp, SARS Virus
tgtgcaagtagtgcgagtttacact

SEQ ID NO: 226743 - DNA, 25 bp, SARS Virus
gtgcaagtagttggagtttacacta

SEQ ID NO: 226744 - DNA, 25 bp, SARS Virus
tgcaagtagttcgagtttacactaa

SEQ ID NO: 226745 - DNA, 25 bp, SARS Virus
gcaagtagttcgggtttacactaag

SEQ ID NO: 226746 - DNA, 25 bp, SARS Virus
caagtagttcgagtttacactaaga

SEQ ID NO: 226747 - DNA, 25 bp, SARS Virus
aagtagttcgaggttacactaagag

SEQ ID NO: 226748 - DNA, 25 bp, SARS Virus
agtagttcgagtgtacactaagagt

SEQ ID NO: 226749 - DNA, 25 bp, SARS Virus
gtagttcgagttgacactaagagtg

SEQ ID NO: 226750 - DNA, 25 bp, SARS Virus
tagttcgagtttgcactaagagtgt

SEQ ID NO: 226751 - DNA, 25 bp, SARS Virus
agttcgagtttagactaagagtgta

SEQ ID NO: 226752 - DNA, 25 bp, SARS Virus
gttcgagtttacgctaagagtgtaa

SEQ ID NO: 226753 - DNA, 25 bp, SARS Virus
ttcgagtttacagtaagagtgtaag

SEQ ID NO: 226754 - DNA, 25 bp, SARS Virus
tcgagtttacacgaagagtgtaaga

SEQ ID NO: 226755 - DNA, 25 bp, SARS Virus
cgagtttacactgagagtgtaagaa

SEQ ID NO: 226756 - DNA, 25 bp, SARS Virus
gagtttacactaggagtgtaagaac

SEQ ID NO: 226757 - DNA, 25 bp, SARS Virus
agtttacactaagagtgtaagaaca

SEQ ID NO: 226758 - DNA, 25 bp, SARS Virus
gtttacactaagggtgtaagaacat

SEQ ID NO: 226759 - DNA, 25 bp, SARS Virus
tttacactaagagtgtaagaacatt

SEQ ID NO: 226760 - DNA, 25 bp, SARS Virus
ttacactaagagggtaagaacattg

SEQ ID NO: 226761 - DNA, 25 bp, SARS Virus
tacactaagagtgtaagaacattgg

SEQ ID NO: 226762 - DNA, 25 bp, SARS Virus
acactaagagtggaagaacattgga

SEQ ID NO: 226763 - DNA, 25 bp, SARS Virus
cactaagagtgtgagaacattggaa

SEQ ID NO: 226764 - DNA, 25 bp, SARS Virus
actaagagtgtaggaacattggaac

SEQ ID NO: 226765 - DNA, 25 bp, SARS Virus
ctaagagtgtaagaacattggaact

SEQ ID NO: 226766 - DNA, 25 bp, SARS Virus
taagagtgtaaggacattggaactt

SEQ ID NO: 226767 - DNA, 25 bp, SARS Virus
aagagtgtaagagcattggaacttg

SEQ ID NO: 226768 - DNA, 25 bp, SARS Virus
agagtgtaagaagattggaacttga

SEQ ID NO: 226769 - DNA, 25 bp, SARS Virus
gagtgtaagaacgttggaacttgaa

SEQ ID NO: 226770 - DNA, 25 bp, SARS Virus
agtgtaagaacagtggaacttgaag

SEQ ID NO: 226771 - DNA, 25 bp, SARS Virus
gtgtaagaacatgggaacttgaagg

SEQ ID NO: 226772 - DNA, 25 bp, SARS Virus
tgtaagaacattggaacttgaaggg

SEQ ID NO: 226773 - DNA, 25 bp, SARS Virus
gtaagaacattggaacttgaagggt

SEQ ID NO: 226774 - DNA, 25 bp, SARS Virus
taagaacattgggacttgaagggtt

SEQ ID NO: 226775 - DNA, 25 bp, SARS Virus
aagaacattggagcttgaagggttt

SEQ ID NO: 226776 - DNA, 25 bp, SARS Virus
agaacattggaagttgaagggtttg

SEQ ID NO: 226777 - DNA, 25 bp, SARS Virus
gaacattggaacgtgaagggtttgt

SEQ ID NO: 226778 - DNA, 25 bp, SARS Virus
aacattggaactggaagggtttgtc

SEQ ID NO: 226779 - DNA, 25 bp, SARS Virus
acattggaacttgaagggtttgtca

SEQ ID NO: 226780 - DNA, 25 bp, SARS Virus
cattggaacttggagggtttgtcat

SEQ ID NO: 226781 - DNA, 25 bp, SARS Virus
attggaacttgaggggtttgtcata

SEQ ID NO: 226782 - DNA, 25 bp, SARS Virus
ttggaacttgaagggtttgtcatag

SEQ ID NO: 226783 - DNA, 25 bp, SARS Virus
tggaacttgaagggtttgtcataga

SEQ ID NO: 226784 - DNA, 25 bp, SARS Virus
ggaacttgaagggtttgtcatagaa

SEQ ID NO: 226785 - DNA, 25 bp, SARS Virus
gaacttgaaggggttgtcatagaag

SEQ ID NO: 226786 - DNA, 25 bp, SARS Virus
aacttgaagggtgtgtcatagaaga

SEQ ID NO: 226787 - DNA, 25 bp, SARS Virus
acttgaagggttggtcatagaagag

SEQ ID NO: 226788 - DNA, 25 bp, SARS Virus
cttgaagggtttgtcatagaagagg

SEQ ID NO: 226789 - DNA, 25 bp, SARS Virus
ttgaagggtttggcatagaagaggt

SEQ ID NO: 226790 - DNA, 25 bp, SARS Virus
tgaagggtttgtgatagaagaggtt

SEQ ID NO: 226791 - DNA, 25 bp, SARS Virus
gaagggtttgtcgtagaagaggttt

SEQ ID NO: 226792 - DNA, 25 bp, SARS Virus
aagggtttgtcagagaagaggtttc

SEQ ID NO: 226793 - DNA, 25 bp, SARS Virus
agggtttgtcatggaagaggtttcc

SEQ ID NO: 226794 - DNA, 25 bp, SARS Virus
gggtttgtcatagaagaggtttcca

SEQ ID NO: 226795 - DNA, 25 bp, SARS Virus
ggtttgtcataggagaggtttccaa

SEQ ID NO: 226796 - DNA, 25 bp, SARS Virus
gtttgtcatagaggaggtttccaat

SEQ ID NO: 226797 - DNA, 25 bp, SARS Virus
tttgtcatagaagaggtttccaatg

SEQ ID NO: 226798 - DNA, 25 bp, SARS Virus
ttgtcatagaaggggtttccaatgt

SEQ ID NO: 226799 - DNA, 25 bp, SARS Virus
tgtcatagaagaggtttccaatgtg

SEQ ID NO: 226800 - DNA, 25 bp, SARS Virus
gtcatagaagaggtttccaatgtgg

SEQ ID NO: 226801 - DNA, 25 bp, SARS Virus
tcatagaagagggttccaatgtgga

SEQ ID NO: 226802 - DNA, 25 bp, SARS Virus
catagaagaggtgtccaatgtggaa

SEQ ID NO: 226803 - DNA, 25 bp, SARS Virus
atagaagaggttgccaatgtggaaa

SEQ ID NO: 226804 - DNA, 25 bp, SARS Virus
tagaagaggtttgcaatgtggaaat

SEQ ID NO: 226805 - DNA, 25 bp, SARS Virus
agaagaggtttcgaatgtggaaatt

SEQ ID NO: 226806 - DNA, 25 bp, SARS Virus
gaagaggtttccgatgtggaaatta

SEQ ID NO: 226807 - DNA, 25 bp, SARS Virus
aagaggtttccagtgtggaaattaa

SEQ ID NO: 226808 - DNA, 25 bp, SARS Virus
agaggtttccaaggtggaaattaac

SEQ ID NO: 226809 - DNA, 25 bp, SARS Virus
gaggtttccaatgtggaaattaacc

SEQ ID NO: 226810 - DNA, 25 bp, SARS Virus
aggtttccaatggggaaattaacca

SEQ ID NO: 226811 - DNA, 25 bp, SARS Virus
ggtttccaatgtggaaattaaccac

SEQ ID NO: 226812 - DNA, 25 bp, SARS Virus
gtttccaatgtggaaattaaccacg

SEQ ID NO: 226813 - DNA, 25 bp, SARS Virus
tttccaatgtgggaattaaccacgt

SEQ ID NO: 226814 - DNA, 25 bp, SARS Virus
ttccaatgtggagattaaccacgtg

SEQ ID NO: 226815 - DNA, 25 bp, SARS Virus
tccaatgtggaagttaaccacgtgg

SEQ ID NO: 226816 - DNA, 25 bp, SARS Virus
ccaatgtggaaagtaaccacgtggg

SEQ ID NO: 226817 - DNA, 25 bp, SARS Virus
caatgtggaaatgaaccacgtgggg

SEQ ID NO: 226818 - DNA, 25 bp, SARS Virus
aatgtggaaattgaccacgtggggg

SEQ ID NO: 226819 - DNA, 25 bp, SARS Virus
atgtggaaattagccacgtggggga

SEQ ID NO: 226820 - DNA, 25 bp, SARS Virus
tgtggaaattaagcacgtgggggaa

SEQ ID NO: 226821 - DNA, 25 bp, SARS Virus
gtggaaattaacgacgtgggggaaa

SEQ ID NO: 226822 - DNA, 25 bp, SARS Virus
tggaaattaaccgcgtgggggaaaa

SEQ ID NO: 226823 - DNA, 25 bp, SARS Virus
ggaaattaaccaggtgggggaaaat

SEQ ID NO: 226824 - DNA, 25 bp, SARS Virus
gaaattaaccacgtgggggaaaatt

SEQ ID NO: 226825 - DNA, 25 bp, SARS Virus
aaattaaccacgggggggaaaattc

SEQ ID NO: 226826 - DNA, 25 bp, SARS Virus
aattaaccacgtgggggaaaattcg

SEQ ID NO: 226827 - DNA, 25 bp, SARS Virus
attaaccacgtgggggaaaattcgc

SEQ ID NO: 226828 - DNA, 25 bp, SARS Virus
ttaaccacgtgggggaaaattcgct

SEQ ID NO: 226829 - DNA, 25 bp, SARS Virus
taaccacgtgggggaaaattcgctt

SEQ ID NO: 226830 - DNA, 25 bp, SARS Virus
aaccacgtgggggaaaattcgcttt

SEQ ID NO: 226831 - DNA, 25 bp, SARS Virus
accacgtggggggaaattcgctttc

SEQ ID NO: 226832 - DNA, 25 bp, SARS Virus
ccacgtgggggagaattcgctttct

SEQ ID NO: 226833 - DNA, 25 bp, SARS Virus
cacgtgggggaagattcgctttctg

SEQ ID NO: 226834 - DNA, 25 bp, SARS Virus
acgtgggggaaagttcgctttctgt

SEQ ID NO: 226835 - DNA, 25 bp, SARS Virus
cgtgggggaaaagtcgctttctgta

SEQ ID NO: 226836 - DNA, 25 bp, SARS Virus
gtgggggaaaatgcgctttctgtaa

SEQ ID NO: 226837 - DNA, 25 bp, SARS Virus
tgggggaaaattggctttctgtaac

SEQ ID NO: 226838 - DNA, 25 bp, SARS Virus
gggggaaaattcgctttctgtaaca

SEQ ID NO: 226839 - DNA, 25 bp, SARS Virus
ggggaaaattcggtttctgtaacaa

SEQ ID NO: 226840 - DNA, 25 bp, SARS Virus
gggaaaattcgcgttctgtaacaaa

SEQ ID NO: 226841 - DNA, 25 bp, SARS Virus
ggaaaattcgctgtctgtaacaaac

SEQ ID NO: 226842 - DNA, 25 bp, SARS Virus
gaaaattcgcttgctgtaacaaaca

SEQ ID NO: 226843 - DNA, 25 bp, SARS Virus
aaaattcgctttgtgtaacaaacat

SEQ ID NO: 226844 - DNA, 25 bp, SARS Virus
aaattcgctttcggtaacaaacatc

SEQ ID NO: 226845 - DNA, 25 bp, SARS Virus
aattcgctttctgtaacaaacatcg

SEQ ID NO: 226846 - DNA, 25 bp, SARS Virus
attcgctttctggaacaaacatcgg

SEQ ID NO: 226847 - DNA, 25 bp, SARS Virus
ttcgctttctgtgacaaacatcggt

SEQ ID NO: 226848 - DNA, 25 bp, SARS Virus
tcgctttctgtagcaaacatcggtc

SEQ ID NO: 226849 - DNA, 25 bp, SARS Virus
cgctttctgtaagaaacatcggtca

SEQ ID NO: 226850 - DNA, 25 bp, SARS Virus
gctttctgtaacgaacatcggtcat

SEQ ID NO: 226851 - DNA, 25 bp, SARS Virus
ctttctgtaacagacatcggtcatt

SEQ ID NO: 226852 - DNA, 25 bp, SARS Virus
tttctgtaacaagcatcggtcattt

SEQ ID NO: 226853 - DNA, 25 bp, SARS Virus
ttctgtaacaaagatcggtcatttg

SEQ ID NO: 226854 - DNA, 25 bp, SARS Virus
tctgtaacaaacgtcggtcatttgg

SEQ ID NO: 226855 - DNA, 25 bp, SARS Virus
ctgtaacaaacagcggtcatttggt

SEQ ID NO: 226856 - DNA, 25 bp, SARS Virus
tgtaacaaacatgggtcatttggtc

SEQ ID NO: 226857 - DNA, 25 bp, SARS Virus
gtaacaaacatcggtcatttggtcc

SEQ ID NO: 226858 - DNA, 25 bp, SARS Virus
taacaaacatcggtcatttggtcct

SEQ ID NO: 226859 - DNA, 25 bp, SARS Virus
aacaaacatcgggcatttggtcctc

SEQ ID NO: 226860 - DNA, 25 bp, SARS Virus
acaaacatcggtgatttggtcctct

SEQ ID NO: 226861 - DNA, 25 bp, SARS Virus
caaacatcggtcgtttggtcctctg

SEQ ID NO: 226862 - DNA, 25 bp, SARS Virus
aaacatcggtcagttggtcctctgt

SEQ ID NO: 226863 - DNA, 25 bp, SARS Virus
aacatcggtcatgtggtcctctgtt

SEQ ID NO: 226864 - DNA, 25 bp, SARS Virus
acatcggtcattgggtcctctgtta

SEQ ID NO: 226865 - DNA, 25 bp, SARS Virus
catcggtcatttggtcctctgttac

SEQ ID NO: 226866 - DNA, 25 bp, SARS Virus
atcggtcatttggtcctctgttacg

SEQ ID NO: 226867 - DNA, 25 bp, SARS Virus
tcggtcatttgggcctctgttacgc

SEQ ID NO: 226868 - DNA, 25 bp, SARS Virus
cggtcatttggtgctctgttacgcg

SEQ ID NO: 226869 - DNA, 25 bp, SARS Virus
ggtcatttggtcgtctgttacgcgt

SEQ ID NO: 226870 - DNA, 25 bp, SARS Virus
gtcatttggtccgctgttacgcgtc

SEQ ID NO: 226871 - DNA, 25 bp, SARS Virus
tcatttggtcctgtgttacgcgtca

SEQ ID NO: 226872 - DNA, 25 bp, SARS Virus
catttggtcctcggttacgcgtcat

SEQ ID NO: 226873 - DNA, 25 bp, SARS Virus
atttggtcctctgttacgcgtcata

SEQ ID NO: 226874 - DNA, 25 bp, SARS Virus
tttggtcctctggtacgcgtcataa

SEQ ID NO: 226875 - DNA, 25 bp, SARS Virus
ttggtcctctgtgacgcgtcataac

SEQ ID NO: 226876 - DNA, 25 bp, SARS Virus
tggtcctctgttgcgcgtcataaca

SEQ ID NO: 226877 - DNA, 25 bp, SARS Virus
ggtcctctgttaggcgtcataacaa

SEQ ID NO: 226878 - DNA, 25 bp, SARS Virus
gtcctctgttacgcgtcataacaag

SEQ ID NO: 226879 - DNA, 25 bp, SARS Virus
tcctctgttacgggtcataacaaga

SEQ ID NO: 226880 - DNA, 25 bp, SARS Virus
cctctgttacgcgtcataacaagaa

SEQ ID NO: 226881 - DNA, 25 bp, SARS Virus
ctctgttacgcggcataacaagaaa

SEQ ID NO: 226882 - DNA, 25 bp, SARS Virus
tctgttacgcgtgataacaagaaac

SEQ ID NO: 226883 - DNA, 25 bp, SARS Virus
ctgttacgcgtcgtaacaagaaaca

SEQ ID NO: 226884 - DNA, 25 bp, SARS Virus
tgttacgcgtcagaacaagaaacag

SEQ ID NO: 226885 - DNA, 25 bp, SARS Virus
gttacgcgtcatgacaagaaacagg

SEQ ID NO: 226886 - DNA, 25 bp, SARS Virus
ttacgcgtcatagcaagaaacagga

SEQ ID NO: 226887 - DNA, 25 bp, SARS Virus
tacgcgtcataagaagaaacaggaa

SEQ ID NO: 226888 - DNA, 25 bp, SARS Virus
acgcgtcataacgagaaacaggaat

SEQ ID NO: 226889 - DNA, 25 bp, SARS Virus
cgcgtcataacaggaaacaggaatt

SEQ ID NO: 226890 - DNA, 25 bp, SARS Virus
gcgtcataacaagaaacaggaatta

SEQ ID NO: 226891 - DNA, 25 bp, SARS Virus
cgtcataacaaggaacaggaattag

SEQ ID NO: 226892 - DNA, 25 bp, SARS Virus
gtcataacaagagacaggaattaga

SEQ ID NO: 226893 - DNA, 25 bp, SARS Virus
tcataacaagaagcaggaattagag

SEQ ID NO: 226894 - DNA, 25 bp, SARS Virus
cataacaagaaagaggaattagaga

SEQ ID NO: 226895 - DNA, 25 bp, SARS Virus
ataacaagaaacgggaattagagat

SEQ ID NO: 226896 - DNA, 25 bp, SARS Virus
taacaagaaacaggaattagagatt

SEQ ID NO: 226897 - DNA, 25 bp, SARS Virus
aacaagaaacaggaattagagattc

SEQ ID NO: 226898 - DNA, 25 bp, SARS Virus
acaagaaacagggattagagattct

SEQ ID NO: 226899 - DNA, 25 bp, SARS Virus
caagaaacaggagttagagattctc

SEQ ID NO: 226900 - DNA, 25 bp, SARS Virus
aagaaacaggaagtagagattctcg

SEQ ID NO: 226901 - DNA, 25 bp, SARS Virus
agaaacaggaatgagagattctcgt

SEQ ID NO: 226902 - DNA, 25 bp, SARS Virus
gaaacaggaattggagattctcgta

SEQ ID NO: 226903 - DNA, 25 bp, SARS Virus
aaacaggaattagagattctcgtac

SEQ ID NO: 226904 - DNA, 25 bp, SARS Virus
aacaggaattagggattctcgtact

SEQ ID NO: 226905 - DNA, 25 bp, SARS Virus
acaggaattagagattctcgtactc

SEQ ID NO: 226906 - DNA, 25 bp, SARS Virus
caggaattagaggttctcgtactcc

SEQ ID NO: 226907 - DNA, 25 bp, SARS Virus
aggaattagagagtctcgtactccg

SEQ ID NO: 226908 - DNA, 25 bp, SARS Virus
ggaattagagatgctcgtactccgg

SEQ ID NO: 226909 - DNA, 25 bp, SARS Virus
gaattagagattgtcgtactccggt

SEQ ID NO: 226910 - DNA, 25 bp, SARS Virus
aattagagattcgcgtactccggta

SEQ ID NO: 226911 - DNA, 25 bp, SARS Virus
attagagattctggtactccggtaa

SEQ ID NO: 226912 - DNA, 25 bp, SARS Virus
ttagagattctcgtactccggtaaa

SEQ ID NO: 226913 - DNA, 25 bp, SARS Virus
tagagattctcggactccggtaaat

SEQ ID NO: 226914 - DNA, 25 bp, SARS Virus
agagattctcgtgctccggtaaatg

SEQ ID NO: 226915 - DNA, 25 bp, SARS Virus
gagattctcgtagtccggtaaatgt

SEQ ID NO: 226916 - DNA, 25 bp, SARS Virus
agattctcgtacgccggtaaatgtg

SEQ ID NO: 226917 - DNA, 25 bp, SARS Virus
gattctcgtactgcggtaaatgtgt

SEQ ID NO: 226918 - DNA, 25 bp, SARS Virus
attctcgtactcgggtaaatgtgtc

SEQ ID NO: 226919 - DNA, 25 bp, SARS Virus
ttctcgtactccggtaaatgtgtct

SEQ ID NO: 226920 - DNA, 25 bp, SARS Virus
tctcgtactccggtaaatgtgtctg

SEQ ID NO: 226921 - DNA, 25 bp, SARS Virus
ctcgtactccgggaaatgtgtctga

SEQ ID NO: 226922 - DNA, 25 bp, SARS Virus
tcgtactccggtgaatgtgtctgac

SEQ ID NO: 226923 - DNA, 25 bp, SARS Virus
cgtactccggtagatgtgtctgacc

SEQ ID NO: 226924 - DNA, 25 bp, SARS Virus
gtactccggtaagtgtgtctgacca

SEQ ID NO: 226925 - DNA, 25 bp, SARS Virus
tactccggtaaaggtgtctgaccac

SEQ ID NO: 226926 - DNA, 25 bp, SARS Virus
actccggtaaatgtgtctgaccaca

SEQ ID NO: 226927 - DNA, 25 bp, SARS Virus
ctccggtaaatgggtctgaccacac

SEQ ID NO: 226928 - DNA, 25 bp, SARS Virus
tccggtaaatgtgtctgaccacacg

SEQ ID NO: 226929 - DNA, 25 bp, SARS Virus
ccggtaaatgtggctgaccacacgg

SEQ ID NO: 226930 - DNA, 25 bp, SARS Virus
cggtaaatgtgtgtgaccacacggt

SEQ ID NO: 226931 - DNA, 25 bp, SARS Virus
ggtaaatgtgtcggaccacacggtt

SEQ ID NO: 226932 - DNA, 25 bp, SARS Virus
gtaaatgtgtctgaccacacggttg

SEQ ID NO: 226933 - DNA, 25 bp, SARS Virus
taaatgtgtctggccacacggttgc

SEQ ID NO: 226934 - DNA, 25 bp, SARS Virus
aaatgtgtctgagcacacggttgct

SEQ ID NO: 226935 - DNA, 25 bp, SARS Virus
aatgtgtctgacgacacggttgcta

SEQ ID NO: 226936 - DNA, 25 bp, SARS Virus
atgtgtctgaccgcacggttgctat

SEQ ID NO: 226937 - DNA, 25 bp, SARS Virus
tgtgtctgaccagacggttgctatc

SEQ ID NO: 226938 - DNA, 25 bp, SARS Virus
gtgtctgaccacgcggttgctatcg

SEQ ID NO: 226939 - DNA, 25 bp, SARS Virus
tgtctgaccacagggttgctatcga

SEQ ID NO: 226940 - DNA, 25 bp, SARS Virus
gtctgaccacacggttgctatcgag

SEQ ID NO: 226941 - DNA, 25 bp, SARS Virus
tctgaccacacggttgctatcgagg

SEQ ID NO: 226942 - DNA, 25 bp, SARS Virus
ctgaccacacgggtgctatcgaggt

SEQ ID NO: 226943 - DNA, 25 bp, SARS Virus
tgaccacacggtggctatcgaggta

SEQ ID NO: 226944 - DNA, 25 bp, SARS Virus
gaccacacggttgctatcgaggtaa

SEQ ID NO: 226945 - DNA, 25 bp, SARS Virus
accacacggttggtatcgaggtaaa

SEQ ID NO: 226946 - DNA, 25 bp, SARS Virus
ccacacggttgcgatcgaggtaaac

SEQ ID NO: 226947 - DNA, 25 bp, SARS Virus
cacacggttgctgtcgaggtaaaca

SEQ ID NO: 226948 - DNA, 25 bp, SARS Virus
acacggttgctagcgaggtaaacac

SEQ ID NO: 226949 - DNA, 25 bp, SARS Virus
cacggttgctatggaggtaaacact

SEQ ID NO: 226950 - DNA, 25 bp, SARS Virus
acggttgctatcgaggtaaacactt

SEQ ID NO: 226951 - DNA, 25 bp, SARS Virus
cggttgctatcggggtaaacacttc

SEQ ID NO: 226952 - DNA, 25 bp, SARS Virus
ggttgctatcgaggtaaacacttcg

SEQ ID NO: 226953 - DNA, 25 bp, SARS Virus
aagaagaaggagtgtgagacgtagc

SEQ ID NO: 226954 - DNA, 25 bp, SARS Virus
agaagaaggagtttgagacgtagca

SEQ ID NO: 226955 - DNA, 25 bp, SARS Virus
gaagaaggagtgtgagacgtagcag

SEQ ID NO: 226956 - DNA, 25 bp, SARS Virus
aagaaggagtgttagacgtagcagg

SEQ ID NO: 226957 - DNA, 25 bp, SARS Virus
agaaggagtgtgtgacgtagcagga

SEQ ID NO: 226958 - DNA, 25 bp, SARS Virus
gaaggagtgtgatacgtagcaggag

SEQ ID NO: 226959 - DNA, 25 bp, SARS Virus
aaggagtgtgagtcgtagcaggaga

SEQ ID NO: 226960 - DNA, 25 bp, SARS Virus
aggagtgtgagatgtagcaggagaa

SEQ ID NO: 226961 - DNA, 25 bp, SARS Virus
ggagtgtgagacttagcaggagaag

SEQ ID NO: 226962 - DNA, 25 bp, SARS Virus
gagtgtgagacgtagcaggagaaga

SEQ ID NO: 226963 - DNA, 25 bp, SARS Virus
agtgtgagacgttgcaggagaagaa

SEQ ID NO: 226964 - DNA, 25 bp, SARS Virus
gtgtgagacgtatcaggagaagaag

SEQ ID NO: 226965 - DNA, 25 bp, SARS Virus
tgtgagacgtagtaggagaagaagg

SEQ ID NO: 226966 - DNA, 25 bp, SARS Virus
gtgagacgtagctggagaagaagga

SEQ ID NO: 226967 - DNA, 25 bp, SARS Virus
tgagacgtagcatgagaagaaggag

SEQ ID NO: 226968 - DNA, 25 bp, SARS Virus
gagacgtagcagtagaagaaggagt

SEQ ID NO: 226969 - DNA, 25 bp, SARS Virus
agacgtagcaggtgaagaaggagta

SEQ ID NO: 226970 - DNA, 25 bp, SARS Virus
gacgtagcaggataagaaggagtag

SEQ ID NO: 226971 - DNA, 25 bp, SARS Virus
acgtagcaggagtagaaggagtaga

SEQ ID NO: 226972 - DNA, 25 bp, SARS Virus
cgtagcaggagatgaaggagtagac

SEQ ID NO: 226973 - DNA, 25 bp, SARS Virus
gtagcaggagaataaggagtagacc

SEQ ID NO: 226974 - DNA, 25 bp, SARS Virus
tagcaggagaagtaggagtagacct

SEQ ID NO: 226975 - DNA, 25 bp, SARS Virus
agcaggagaagatggagtagacctc

SEQ ID NO: 226976 - DNA, 25 bp, SARS Virus
gcaggagaagaatgagtagacctcc

SEQ ID NO: 226977 - DNA, 25 bp, SARS Virus
caggagaagaagtagtagacctccc

SEQ ID NO: 226978 - DNA, 25 bp, SARS Virus
aggagaagaaggtgtagacctccca

SEQ ID NO: 226979 - DNA, 25 bp, SARS Virus
ggagaagaaggattagacctcccat

SEQ ID NO: 226980 - DNA, 25 bp, SARS Virus
gagaagaaggagtagacctcccatt

SEQ ID NO: 226981 - DNA, 25 bp, SARS Virus
agaagaaggagttgacctcccattt

SEQ ID NO: 226982 - DNA, 25 bp, SARS Virus
gaagaaggagtatacctcccatttt

SEQ ID NO: 226983 - DNA, 25 bp, SARS Virus
aagaaggagtagtcctcccattttc

SEQ ID NO: 226984 - DNA, 25 bp, SARS Virus
agaaggagtagatctcccattttcc

SEQ ID NO: 226985 - DNA, 25 bp, SARS Virus
gaaggagtagacttcccattttcct

SEQ ID NO: 226986 - DNA, 25 bp, SARS Virus
aaggagtagacctcccattttcctt

SEQ ID NO: 226987 - DNA, 25 bp, SARS Virus
aggagtagaccttccattttccttg

SEQ ID NO: 226988 - DNA, 25 bp, SARS Virus
ggagtagacctctcattttccttgt

SEQ ID NO: 226989 - DNA, 25 bp, SARS Virus
gagtagacctcctattttccttgtt

SEQ ID NO: 226990 - DNA, 25 bp, SARS Virus
agtagacctccctttttccttgtta

SEQ ID NO: 226991 - DNA, 25 bp, SARS Virus
gtagacctcccattttccttgttat

SEQ ID NO: 226992 - DNA, 25 bp, SARS Virus
tagacctcccattttccttgttatg

SEQ ID NO: 226993 - DNA, 25 bp, SARS Virus
agacctcccattttccttgttatgt

SEQ ID NO: 226994 - DNA, 25 bp, SARS Virus
gacctcccattttccttgttatgta

SEQ ID NO: 226995 - DNA, 25 bp, SARS Virus
acctcccatttttcttgttatgtat

SEQ ID NO: 226996 - DNA, 25 bp, SARS Virus
cctcccattttctttgttatgtatg

SEQ ID NO: 226997 - DNA, 25 bp, SARS Virus
ctcccattttccttgttatgtatgc

SEQ ID NO: 226998 - DNA, 25 bp, SARS Virus
tcccattttccttgttatgtatgca

SEQ ID NO: 226999 - DNA, 25 bp, SARS Virus
cccattttcctttttatgtatgcac

SEQ ID NO: 227000 - DNA, 25 bp, SARS Virus
ccattttccttgttatgtatgcact

SEQ ID NO: 227001 - DNA, 25 bp, SARS Virus
cattttccttgttatgtatgcacta

SEQ ID NO: 227002 - DNA, 25 bp, SARS Virus
attttccttgttttgtatgcactac

SEQ ID NO: 227003 - DNA, 25 bp, SARS Virus
ttttccttgttatgtatgcactact

SEQ ID NO: 227004 - DNA, 25 bp, SARS Virus
tttccttgttatttatgcactactt

SEQ ID NO: 227005 - DNA, 25 bp, SARS Virus
ttccttgttatgtatgcactacttt

SEQ ID NO: 227006 - DNA, 25 bp, SARS Virus
tccttgttatgtttgcactactttt

SEQ ID NO: 227007 - DNA, 25 bp, SARS Virus
ccttgttatgtatgcactacttttc

SEQ ID NO: 227008 - DNA, 25 bp, SARS Virus
cttgttatgtattcactacttttca

SEQ ID NO: 227009 - DNA, 25 bp, SARS Virus
ttgttatgtatgtactacttttcaa

SEQ ID NO: 227010 - DNA, 25 bp, SARS Virus
tgttatgtatgctctacttttcaaa

SEQ ID NO: 227011 - DNA, 25 bp, SARS Virus
gttatgtatgcattacttttcaaaa

SEQ ID NO: 227012 - DNA, 25 bp, SARS Virus
ttatgtatgcactacttttcaaaag

SEQ ID NO: 227013 - DNA, 25 bp, SARS Virus
tatgtatgcacttcttttcaaaaga

SEQ ID NO: 227014 - DNA, 25 bp, SARS Virus
atgtatgcactatttttcaaaagaa

SEQ ID NO: 227015 - DNA, 25 bp, SARS Virus
tgtatgcactacttttcaaaagaag

SEQ ID NO: 227016 - DNA, 25 bp, SARS Virus
gtatgcactacttttcaaaagaagt

SEQ ID NO: 227017 - DNA, 25 bp, SARS Virus
tatgcactacttttcaaaagaagtg

SEQ ID NO: 227018 - DNA, 25 bp, SARS Virus
atgcactacttttcaaaagaagtgg

SEQ ID NO: 227019 - DNA, 25 bp, SARS Virus
tgcactactttttaaaagaagtggt

SEQ ID NO: 227020 - DNA, 25 bp, SARS Virus
gcactacttttctaaagaagtggtc

SEQ ID NO: 227021 - DNA, 25 bp, SARS Virus
cactacttttcataagaagtggtcg

SEQ ID NO: 227022 - DNA, 25 bp, SARS Virus
actacttttcaatagaagtggtcgt

SEQ ID NO: 227023 - DNA, 25 bp, SARS Virus
ctacttttcaaatgaagtggtcgta

SEQ ID NO: 227024 - DNA, 25 bp, SARS Virus
tacttttcaaaataagtggtcgtag

SEQ ID NO: 227025 - DNA, 25 bp, SARS Virus
acttttcaaaagtagtggtcgtagt

SEQ ID NO: 227026 - DNA, 25 bp, SARS Virus
cttttcaaaagatgtggtcgtagta

SEQ ID NO: 227027 - DNA, 25 bp, SARS Virus
ttttcaaaagaattggtcgtagtag

SEQ ID NO: 227028 - DNA, 25 bp, SARS Virus
tttcaaaagaagtggtcgtagtagt

SEQ ID NO: 227029 - DNA, 25 bp, SARS Virus
ttcaaaagaagttgtcgtagtagtt

SEQ ID NO: 227030 - DNA, 25 bp, SARS Virus
tcaaaagaagtgttcgtagtagttt

SEQ ID NO: 227031 - DNA, 25 bp, SARS Virus
caaaagaagtggtcgtagtagttta

SEQ ID NO: 227032 - DNA, 25 bp, SARS Virus
aaaagaagtggttgtagtagtttat

SEQ ID NO: 227033 - DNA, 25 bp, SARS Virus
aaagaagtggtcttagtagtttatt

SEQ ID NO: 227034 - DNA, 25 bp, SARS Virus
aagaagtggtcgtagtagtttattc

SEQ ID NO: 227035 - DNA, 25 bp, SARS Virus
agaagtggtcgttgtagtttattca

SEQ ID NO: 227036 - DNA, 25 bp, SARS Virus
gaagtggtcgtattagtttattcat

SEQ ID NO: 227037 - DNA, 25 bp, SARS Virus
aagtggtcgtagtagtttattcatc

SEQ ID NO: 227038 - DNA, 25 bp, SARS Virus
agtggtcgtagttgtttattcatct

SEQ ID NO: 227039 - DNA, 25 bp, SARS Virus
gtggtcgtagtattttattcatctt

SEQ ID NO: 227040 - DNA, 25 bp, SARS Virus
tggtcgtagtagtttattcatctta

SEQ ID NO: 227041 - DNA, 25 bp, SARS Virus
ggtcgtagtagtttattcatcttac

SEQ ID NO: 227042 - DNA, 25 bp, SARS Virus
gtcgtagtagtttattcatcttaca

SEQ ID NO: 227043 - DNA, 25 bp, SARS Virus
tcgtagtagttttttcatcttacat

SEQ ID NO: 227044 - DNA, 25 bp, SARS Virus
cgtagtagtttattcatcttacatc

SEQ ID NO: 227045 - DNA, 25 bp, SARS Virus
gtagtagtttattcatcttacatcg

SEQ ID NO: 227046 - DNA, 25 bp, SARS Virus
tagtagtttatttatcttacatcga

SEQ ID NO: 227047 - DNA, 25 bp, SARS Virus
agtagtttattcttcttacatcgat

SEQ ID NO: 227048 - DNA, 25 bp, SARS Virus
gtagtttattcatcttacatcgatg

SEQ ID NO: 227049 - DNA, 25 bp, SARS Virus
tagtttattcattttacatcgatgt

SEQ ID NO: 227050 - DNA, 25 bp, SARS Virus
agtttattcatcttacatcgatgtg

SEQ ID NO: 227051 - DNA, 25 bp, SARS Virus
gtttattcatcttacatcgatgtga

SEQ ID NO: 227052 - DNA, 25 bp, SARS Virus
tttattcatctttcatcgatgtgag

SEQ ID NO: 227053 - DNA, 25 bp, SARS Virus
ttattcatcttatatcgatgtgagg

SEQ ID NO: 227054 - DNA, 25 bp, SARS Virus
tattcatcttacttcgatgtgaggt

SEQ ID NO: 227055 - DNA, 25 bp, SARS Virus
attcatcttacatcgatgtgaggtg

SEQ ID NO: 227056 - DNA, 25 bp, SARS Virus
ttcatcttacattgatgtgaggtga

SEQ ID NO: 227057 - DNA, 25 bp, SARS Virus
tcatcttacatctatgtgaggtgag

SEQ ID NO: 227058 - DNA, 25 bp, SARS Virus
catcttacatcgttgtgaggtgagt

SEQ ID NO: 227059 - DNA, 25 bp, SARS Virus
atcttacatcgatgtgaggtgagta

SEQ ID NO: 227060 - DNA, 25 bp, SARS Virus
tcttacatcgatttgaggtgagtag

SEQ ID NO: 227061 - DNA, 25 bp, SARS Virus
cttacatcgatgtgaggtgagtagt

SEQ ID NO: 227062 - DNA, 25 bp, SARS Virus
ttacatcgatgttaggtgagtagtt

SEQ ID NO: 227063 - DNA, 25 bp, SARS Virus
tacatcgatgtgtggtgagtagttc

SEQ ID NO: 227064 - DNA, 25 bp, SARS Virus
acatcgatgtgatgtgagtagttct

SEQ ID NO: 227065 - DNA, 25 bp, SARS Virus
catcgatgtgagttgagtagttcta

SEQ ID NO: 227066 - DNA, 25 bp, SARS Virus
atcgatgtgaggtgagtagttctag

SEQ ID NO: 227067 - DNA, 25 bp, SARS Virus
tcgatgtgaggttagtagttctagt

SEQ ID NO: 227068 - DNA, 25 bp, SARS Virus
cgatgtgaggtgtgtagttctagtt

SEQ ID NO: 227069 - DNA, 25 bp, SARS Virus
gatgtgaggtgattagttctagtta

SEQ ID NO: 227070 - DNA, 25 bp, SARS Virus
atgtgaggtgagtagttctagttat

SEQ ID NO: 227071 - DNA, 25 bp, SARS Virus
tgtgaggtgagttgttctagttatg

SEQ ID NO: 227072 - DNA, 25 bp, SARS Virus
gtgaggtgagtatttctagttatgg

SEQ ID NO: 227073 - DNA, 25 bp, SARS Virus
tgaggtgagtagttctagttatggg

SEQ ID NO: 227074 - DNA, 25 bp, SARS Virus
gaggtgagtagttctagttatgggt

SEQ ID NO: 227075 - DNA, 25 bp, SARS Virus
aggtgagtagttttagttatgggta

SEQ ID NO: 227076 - DNA, 25 bp, SARS Virus
ggtgagtagttctagttatgggtac

SEQ ID NO: 227077 - DNA, 25 bp, SARS Virus
gtgagtagttcttgttatgggtaca

SEQ ID NO: 227078 - DNA, 25 bp, SARS Virus
tgagtagttctatttatgggtacaa

SEQ ID NO: 227079 - DNA, 25 bp, SARS Virus
gagtagttctagttatgggtacaac

SEQ ID NO: 227080 - DNA, 25 bp, SARS Virus
agtagttctagttatgggtacaacc

SEQ ID NO: 227081 - DNA, 25 bp, SARS Virus
gtagttctagttttgggtacaacca

SEQ ID NO: 227082 - DNA, 25 bp, SARS Virus
tagttctagttatgggtacaaccat

SEQ ID NO: 227083 - DNA, 25 bp, SARS Virus
agttctagttattggtacaaccatt

SEQ ID NO: 227084 - DNA, 25 bp, SARS Virus
gttctagttatgtgtacaaccattc

SEQ ID NO: 227085 - DNA, 25 bp, SARS Virus
ttctagttatggttacaaccattcc

SEQ ID NO: 227086 - DNA, 25 bp, SARS Virus
tctagttatgggtacaaccattcct

SEQ ID NO: 227087 - DNA, 25 bp, SARS Virus
ctagttatgggttcaaccattcctc

SEQ ID NO: 227088 - DNA, 25 bp, SARS Virus
tagttatgggtataaccattcctct

SEQ ID NO: 227089 - DNA, 25 bp, SARS Virus
agttatgggtactaccattcctcta

SEQ ID NO: 227090 - DNA, 25 bp, SARS Virus
gttatgggtacatccattcctctag

SEQ ID NO: 227091 - DNA, 25 bp, SARS Virus
ttatgggtacaatcattcctctagt

SEQ ID NO: 227092 - DNA, 25 bp, SARS Virus
tatgggtacaactattcctctagtc

SEQ ID NO: 227093 - DNA, 25 bp, SARS Virus
atgggtacaacctttcctctagtct

SEQ ID NO: 227094 - DNA, 25 bp, SARS Virus
tgggtacaaccattcctctagtctt

SEQ ID NO: 227095 - DNA, 25 bp, SARS Virus
gggtacaaccattcctctagtcttt

SEQ ID NO: 227096 - DNA, 25 bp, SARS Virus
ggtacaaccatttctctagtctttg

SEQ ID NO: 227097 - DNA, 25 bp, SARS Virus
gtacaaccattcttctagtctttga

SEQ ID NO: 227098 - DNA, 25 bp, SARS Virus
tacaaccattcctctagtctttgac

SEQ ID NO: 227099 - DNA, 25 bp, SARS Virus
acaaccattcctttagtctttgacc

SEQ ID NO: 227100 - DNA, 25 bp, SARS Virus
caaccattcctctagtctttgacca

SEQ ID NO: 227101 - DNA, 25 bp, SARS Virus
aaccattcctcttgtctttgaccaa

SEQ ID NO: 227102 - DNA, 25 bp, SARS Virus
accattcctctattctttgaccaac

SEQ ID NO: 227103 - DNA, 25 bp, SARS Virus
ccattcctctagtctttgaccaaca

SEQ ID NO: 227104 - DNA, 25 bp, SARS Virus
cattcctctagtttttgaccaacat

SEQ ID NO: 227105 - DNA, 25 bp, SARS Virus
attcctctagtctttgaccaacatt

SEQ ID NO: 227106 - DNA, 25 bp, SARS Virus
ttcctctagtctttgaccaacattt

SEQ ID NO: 227107 - DNA, 25 bp, SARS Virus
tcctctagtctttgaccaacatttc

SEQ ID NO: 227108 - DNA, 25 bp, SARS Virus
cctctagtcttttaccaacatttca

SEQ ID NO: 227109 - DNA, 25 bp, SARS Virus
ctctagtctttgtccaacatttcag

SEQ ID NO: 227110 - DNA, 25 bp, SARS Virus
tctagtctttgatcaacatttcaga

SEQ ID NO: 227111 - DNA, 25 bp, SARS Virus
ctagtctttgactaacatttcagaa

SEQ ID NO: 227112 - DNA, 25 bp, SARS Virus
tagtctttgacctacatttcagaag

SEQ ID NO: 227113 - DNA, 25 bp, SARS Virus
agtctttgaccatcatttcagaagt

SEQ ID NO: 227114 - DNA, 25 bp, SARS Virus
gtctttgaccaatatttcagaagtg

SEQ ID NO: 227115 - DNA, 25 bp, SARS Virus
tctttgaccaacttttcagaagtgt

SEQ ID NO: 227116 - DNA, 25 bp, SARS Virus
ctttgaccaacatttcagaagtgtt

SEQ ID NO: 227117 - DNA, 25 bp, SARS Virus
tttgaccaacatttcagaagtgttg

SEQ ID NO: 227118 - DNA, 25 bp, SARS Virus
ttgaccaacatttcagaagtgttgt

SEQ ID NO: 227119 - DNA, 25 bp, SARS Virus
tgaccaacattttagaagtgttgtc

SEQ ID NO: 227120 - DNA, 25 bp, SARS Virus
gaccaacatttctgaagtgttgtcg

SEQ ID NO: 227121 - DNA, 25 bp, SARS Virus
accaacatttcataagtgttgtcgg

SEQ ID NO: 227122 - DNA, 25 bp, SARS Virus
ccaacatttcagtagtgttgtcgga

SEQ ID NO: 227123 - DNA, 25 bp, SARS Virus
caacatttcagatgtgttgtcggag

SEQ ID NO: 227124 - DNA, 25 bp, SARS Virus
aacatttcagaattgttgtcggaga

SEQ ID NO: 227125 - DNA, 25 bp, SARS Virus
acatttcagaagtgttgtcggagac

SEQ ID NO: 227126 - DNA, 25 bp, SARS Virus
catttcagaagttttgtcggagacg

SEQ ID NO: 227127 - DNA, 25 bp, SARS Virus
atttcagaagtgttgtcggagacga

SEQ ID NO: 227128 - DNA, 25 bp, SARS Virus
tttcagaagtgttgtcggagacgat

SEQ ID NO: 227129 - DNA, 25 bp, SARS Virus
ttcagaagtgttttcggagacgatg

SEQ ID NO: 227130 - DNA, 25 bp, SARS Virus
tcagaagtgttgtcggagacgatgt

SEQ ID NO: 227131 - DNA, 25 bp, SARS Virus
cagaagtgttgttggagacgatgtt

SEQ ID NO: 227132 - DNA, 25 bp, SARS Virus
agaagtgttgtctgagacgatgttg

SEQ ID NO: 227133 - DNA, 25 bp, SARS Virus
gaagtgttgtcgtagacgatgttgt

SEQ ID NO: 227134 - DNA, 25 bp, SARS Virus
aagtgttgtcggtgacgatgttgtg

SEQ ID NO: 227135 - DNA, 25 bp, SARS Virus
agtgttgtcggatacgatgttgtgt

SEQ ID NO: 227136 - DNA, 25 bp, SARS Virus
gtgttgtcggagtcgatgttgtgta

SEQ ID NO: 227137 - DNA, 25 bp, SARS Virus
tgttgtcggagatgatgttgtgtac

SEQ ID NO: 227138 - DNA, 25 bp, SARS Virus
gttgtcggagactatgttgtgtacg

SEQ ID NO: 227139 - DNA, 25 bp, SARS Virus
ttgtcggagacgttgttgtgtacgt

SEQ ID NO: 227140 - DNA, 25 bp, SARS Virus
tgtcggagacgatgttgtgtacgtt

SEQ ID NO: 227141 - DNA, 25 bp, SARS Virus
gtcggagacgattttgtgtacgttt

SEQ ID NO: 227142 - DNA, 25 bp, SARS Virus
tcggagacgatgttgtgtacgtttg

SEQ ID NO: 227143 - DNA, 25 bp, SARS Virus
cggagacgatgttgtgtacgtttga

SEQ ID NO: 227144 - DNA, 25 bp, SARS Virus
ggagacgatgttttgtacgtttgag

SEQ ID NO: 227145 - DNA, 25 bp, SARS Virus
gagacgatgttgtgtacgtttgagt

SEQ ID NO: 227146 - DNA, 25 bp, SARS Virus
agacgatgttgtttacgtttgagtc

SEQ ID NO: 227147 - DNA, 25 bp, SARS Virus
gacgatgttgtgtacgtttgagtca

SEQ ID NO: 227148 - DNA, 25 bp, SARS Virus
acgatgttgtgttcgtttgagtcat

SEQ ID NO: 227149 - DNA, 25 bp, SARS Virus
cgatgttgtgtatgtttgagtcatt

SEQ ID NO: 227150 - DNA, 25 bp, SARS Virus
gatgttgtgtacttttgagtcattg

SEQ ID NO: 227151 - DNA, 25 bp, SARS Virus
atgttgtgtacgtttgagtcattga

SEQ ID NO: 227152 - DNA, 25 bp, SARS Virus
tgttgtgtacgtttgagtcattgaa

SEQ ID NO: 227153 - DNA, 25 bp, SARS Virus
gttgtgtacgtttgagtcattgaag

SEQ ID NO: 227154 - DNA, 25 bp, SARS Virus
ttgtgtacgttttagtcattgaagc

SEQ ID NO: 227155 - DNA, 25 bp, SARS Virus
tgtgtacgtttgtgtcattgaagcc

SEQ ID NO: 227156 - DNA, 25 bp, SARS Virus
gtgtacgtttgattcattgaagcca

SEQ ID NO: 227157 - DNA, 25 bp, SARS Virus
tgtacgtttgagtcattgaagccat

SEQ ID NO: 227158 - DNA, 25 bp, SARS Virus
gtacgtttgagttattgaagccatg

SEQ ID NO: 227159 - DNA, 25 bp, SARS Virus
tacgtttgagtctttgaagccatgg

SEQ ID NO: 227160 - DNA, 25 bp, SARS Virus
acgtttgagtcattgaagccatggc

SEQ ID NO: 227161 - DNA, 25 bp, SARS Virus
cgtttgagtcattgaagccatggcc

SEQ ID NO: 227162 - DNA, 25 bp, SARS Virus
gtttgagtcatttaagccatggcct

SEQ ID NO: 227163 - DNA, 25 bp, SARS Virus
tttgagtcattgtagccatggccta

SEQ ID NO: 227164 - DNA, 25 bp, SARS Virus
ttgagtcattgatgccatggcctaa

SEQ ID NO: 227165 - DNA, 25 bp, SARS Virus
tgagtcattgaatccatggcctaag

SEQ ID NO: 227166 - DNA, 25 bp, SARS Virus
gagtcattgaagtcatggcctaagt

SEQ ID NO: 227167 - DNA, 25 bp, SARS Virus
agtcattgaagctatggcctaagtt

SEQ ID NO: 227168 - DNA, 25 bp, SARS Virus
gtcattgaagccttggcctaagttg

SEQ ID NO: 227169 - DNA, 25 bp, SARS Virus
tcattgaagccatggcctaagttgt

SEQ ID NO: 227170 - DNA, 25 bp, SARS Virus
cattgaagccattgcctaagttgtc

SEQ ID NO: 227171 - DNA, 25 bp, SARS Virus
attgaagccatgtcctaagttgtca

SEQ ID NO: 227172 - DNA, 25 bp, SARS Virus
ttgaagccatggtctaagttgtcac

SEQ ID NO: 227173 - DNA, 25 bp, SARS Virus
tgaagccatggcttaagttgtcaca

SEQ ID NO: 227174 - DNA, 25 bp, SARS Virus
gaagccatggcctaagttgtcacat

SEQ ID NO: 227175 - DNA, 25 bp, SARS Virus
aagccatggccttagttgtcacatc

SEQ ID NO: 227176 - DNA, 25 bp, SARS Virus
agccatggcctatgttgtcacatct

SEQ ID NO: 227177 - DNA, 25 bp, SARS Virus
gccatggcctaatttgtcacatctg

SEQ ID NO: 227178 - DNA, 25 bp, SARS Virus
ccatggcctaagttgtcacatctgt

SEQ ID NO: 227179 - DNA, 25 bp, SARS Virus
catggcctaagttgtcacatctgtc

SEQ ID NO: 227180 - DNA, 25 bp, SARS Virus
atggcctaagttttcacatctgtct

SEQ ID NO: 227181 - DNA, 25 bp, SARS Virus
tggcctaagttgtcacatctgtctc

SEQ ID NO: 227182 - DNA, 25 bp, SARS Virus
ggcctaagttgttacatctgtctcg

SEQ ID NO: 227183 - DNA, 25 bp, SARS Virus
gcctaagttgtctcatctgtctcgt

SEQ ID NO: 227184 - DNA, 25 bp, SARS Virus
cctaagttgtcatatctgtctcgtg

SEQ ID NO: 227185 - DNA, 25 bp, SARS Virus
ctaagttgtcacttctgtctcgtga

SEQ ID NO: 227186 - DNA, 25 bp, SARS Virus
taagttgtcacatctgtctcgtgaa

SEQ ID NO: 227187 - DNA, 25 bp, SARS Virus
aagttgtcacatttgtctcgtgaaa

SEQ ID NO: 227188 - DNA, 25 bp, SARS Virus
agttgtcacatctgtctcgtgaaaa

SEQ ID NO: 227189 - DNA, 25 bp, SARS Virus
gttgtcacatctttctcgtgaaaag

SEQ ID NO: 227190 - DNA, 25 bp, SARS Virus
ttgtcacatctgtctcgtgaaaagt

SEQ ID NO: 227191 - DNA, 25 bp, SARS Virus
tgtcacatctgtttcgtgaaaagta

SEQ ID NO: 227192 - DNA, 25 bp, SARS Virus
gtcacatctgtctcgtgaaaagtaa

SEQ ID NO: 227193 - DNA, 25 bp, SARS Virus
tcacatctgtcttgtgaaaagtaat

SEQ ID NO: 227194 - DNA, 25 bp, SARS Virus
cacatctgtctcttgaaaagtaatt

SEQ ID NO: 227195 - DNA, 25 bp, SARS Virus
acatctgtctcgtgaaaagtaattc

SEQ ID NO: 227196 - DNA, 25 bp, SARS Virus
catctgtctcgttaaaagtaattcg

SEQ ID NO: 227197 - DNA, 25 bp, SARS Virus
atctgtctcgtgtaaagtaattcgt

SEQ ID NO: 227198 - DNA, 25 bp, SARS Virus
tctgtctcgtgataagtaattcgtg

SEQ ID NO: 227199 - DNA, 25 bp, SARS Virus
ctgtctcgtgaatagtaattcgtga

SEQ ID NO: 227200 - DNA, 25 bp, SARS Virus
tgtctcgtgaaatgtaattcgtgaa

SEQ ID NO: 227201 - DNA, 25 bp, SARS Virus
gtctcgtgaaaattaattcgtgaaa

SEQ ID NO: 227202 - DNA, 25 bp, SARS Virus
tctcgtgaaaagtaattcgtgaaac

SEQ ID NO: 227203 - DNA, 25 bp, SARS Virus
ctcgtgaaaagttattcgtgaaaca

SEQ ID NO: 227204 - DNA, 25 bp, SARS Virus
tcgtgaaaagtatttcgtgaaacag

SEQ ID NO: 227205 - DNA, 25 bp, SARS Virus
cgtgaaaagtaattcgtgaaacagt

SEQ ID NO: 227206 - DNA, 25 bp, SARS Virus
gtgaaaagtaattcgtgaaacagtt

SEQ ID NO: 227207 - DNA, 25 bp, SARS Virus
tgaaaagtaatttgtgaaacagttg

SEQ ID NO: 227208 - DNA, 25 bp, SARS Virus
gaaaagtaattcttgaaacagttgt

SEQ ID NO: 227209 - DNA, 25 bp, SARS Virus
aaaagtaattcgtgaaacagttgtg

SEQ ID NO: 227210 - DNA, 25 bp, SARS Virus
aaagtaattcgttaaacagttgtgc

SEQ ID NO: 227211 - DNA, 25 bp, SARS Virus
aagtaattcgtgtaacagttgtgca

SEQ ID NO: 227212 - DNA, 25 bp, SARS Virus
agtaattcgtgatacagttgtgcaa

SEQ ID NO: 227213 - DNA, 25 bp, SARS Virus
gtaattcgtgaatcagttgtgcaag

SEQ ID NO: 227214 - DNA, 25 bp, SARS Virus
taattcgtgaaatagttgtgcaagt

SEQ ID NO: 227215 - DNA, 25 bp, SARS Virus
aattcgtgaaactgttgtgcaagta

SEQ ID NO: 227216 - DNA, 25 bp, SARS Virus
attcgtgaaacatttgtgcaagtag

SEQ ID NO: 227217 - DNA, 25 bp, SARS Virus
ttcgtgaaacagttgtgcaagtagt

SEQ ID NO: 227218 - DNA, 25 bp, SARS Virus
tcgtgaaacagttgtgcaagtagtt

SEQ ID NO: 227219 - DNA, 25 bp, SARS Virus
cgtgaaacagttttgcaagtagttc

SEQ ID NO: 227220 - DNA, 25 bp, SARS Virus
gtgaaacagttgtgcaagtagttcg

SEQ ID NO: 227221 - DNA, 25 bp, SARS Virus
tgaaacagttgttcaagtagttcga

SEQ ID NO: 227222 - DNA, 25 bp, SARS Virus
gaaacagttgtgtaagtagttcgag

SEQ ID NO: 227223 - DNA, 25 bp, SARS Virus
aaacagttgtgctagtagttcgagt

SEQ ID NO: 227224 - DNA, 25 bp, SARS Virus
aacagttgtgcatgtagttcgagtt

SEQ ID NO: 227225 - DNA, 25 bp, SARS Virus
acagttgtgcaattagttcgagttt

SEQ ID NO: 227226 - DNA, 25 bp, SARS Virus
cagttgtgcaagtagttcgagttta

SEQ ID NO: 227227 - DNA, 25 bp, SARS Virus
agttgtgcaagttgttcgagtttac

SEQ ID NO: 227228 - DNA, 25 bp, SARS Virus
gttgtgcaagtatttcgagtttaca

SEQ ID NO: 227229 - DNA, 25 bp, SARS Virus
ttgtgcaagtagttcgagtttacac

SEQ ID NO: 227230 - DNA, 25 bp, SARS Virus
tgtgcaagtagttcgagtttacact

SEQ ID NO: 227231 - DNA, 25 bp, SARS Virus
gtgcaagtagtttgagtttacacta

SEQ ID NO: 227232 - DNA, 25 bp, SARS Virus
tgcaagtagttctagtttacactaa

SEQ ID NO: 227233 - DNA, 25 bp, SARS Virus
gcaagtagttcgtgtttacactaag

SEQ ID NO: 227234 - DNA, 25 bp, SARS Virus
caagtagttcgattttacactaaga

SEQ ID NO: 227235 - DNA, 25 bp, SARS Virus
aagtagttcgagtttacactaagag

SEQ ID NO: 227236 - DNA, 25 bp, SARS Virus
agtagttcgagtttacactaagagt

SEQ ID NO: 227237 - DNA, 25 bp, SARS Virus
gtagttcgagtttacactaagagtg

SEQ ID NO: 227238 - DNA, 25 bp, SARS Virus
tagttcgagttttcactaagagtgt

SEQ ID NO: 227239 - DNA, 25 bp, SARS Virus
agttcgagtttatactaagagtgta

SEQ ID NO: 227240 - DNA, 25 bp, SARS Virus
gttcgagtttactctaagagtgtaa

SEQ ID NO: 227241 - DNA, 25 bp, SARS Virus
ttcgagtttacattaagagtgtaag

SEQ ID NO: 227242 - DNA, 25 bp, SARS Virus
tcgagtttacactaagagtgtaaga

SEQ ID NO: 227243 - DNA, 25 bp, SARS Virus
cgagtttacacttagagtgtaagaa

SEQ ID NO: 227244 - DNA, 25 bp, SARS Virus
gagtttacactatgagtgtaagaac

SEQ ID NO: 227245 - DNA, 25 bp, SARS Virus
agtttacactaatagtgtaagaaca

SEQ ID NO: 227246 - DNA, 25 bp, SARS Virus
gtttacactaagtgtgtaagaacat

SEQ ID NO: 227247 - DNA, 25 bp, SARS Virus
tttacactaagattgtaagaacatt

SEQ ID NO: 227248 - DNA, 25 bp, SARS Virus
ttacactaagagtgtaagaacattg

SEQ ID NO: 227249 - DNA, 25 bp, SARS Virus
tacactaagagtttaagaacattgg

SEQ ID NO: 227250 - DNA, 25 bp, SARS Virus
acactaagagtgtaagaacattgga

SEQ ID NO: 227251 - DNA, 25 bp, SARS Virus
cactaagagtgttagaacattggaa

SEQ ID NO: 227252 - DNA, 25 bp, SARS Virus
actaagagtgtatgaacattggaac

SEQ ID NO: 227253 - DNA, 25 bp, SARS Virus
ctaagagtgtaataacattggaact

SEQ ID NO: 227254 - DNA, 25 bp, SARS Virus
taagagtgtaagtacattggaactt

SEQ ID NO: 227255 - DNA, 25 bp, SARS Virus
aagagtgtaagatcattggaacttg

SEQ ID NO: 227256 - DNA, 25 bp, SARS Virus
agagtgtaagaatattggaacttga

SEQ ID NO: 227257 - DNA, 25 bp, SARS Virus
gagtgtaagaactttggaacttgaa

SEQ ID NO: 227258 - DNA, 25 bp, SARS Virus
agtgtaagaacattggaacttgaag

SEQ ID NO: 227259 - DNA, 25 bp, SARS Virus
gtgtaagaacattggaacttgaagg

SEQ ID NO: 227260 - DNA, 25 bp, SARS Virus
tgtaagaacatttgaacttgaaggg

SEQ ID NO: 227261 - DNA, 25 bp, SARS Virus
gtaagaacattgtaacttgaagggt

SEQ ID NO: 227262 - DNA, 25 bp, SARS Virus
taagaacattggtacttgaagggtt

SEQ ID NO: 227263 - DNA, 25 bp, SARS Virus
aagaacattggatcttgaagggttt

SEQ ID NO: 227264 - DNA, 25 bp, SARS Virus
agaacattggaatttgaagggtttg

SEQ ID NO: 227265 - DNA, 25 bp, SARS Virus
gaacattggaacttgaagggtttgt

SEQ ID NO: 227266 - DNA, 25 bp, SARS Virus
aacattggaacttgaagggtttgtc

SEQ ID NO: 227267 - DNA, 25 bp, SARS Virus
acattggaactttaagggtttgtca

SEQ ID NO: 227268 - DNA, 25 bp, SARS Virus
cattggaacttgtagggtttgtcat

SEQ ID NO: 227269 - DNA, 25 bp, SARS Virus
attggaacttgatgggtttgtcata

SEQ ID NO: 227270 - DNA, 25 bp, SARS Virus
ttggaacttgaatggtttgtcatag

SEQ ID NO: 227271 - DNA, 25 bp, SARS Virus
tggaacttgaagtgtttgtcataga

SEQ ID NO: 227272 - DNA, 25 bp, SARS Virus
ggaacttgaaggttttgtcatagaa

SEQ ID NO: 227273 - DNA, 25 bp, SARS Virus
gaacttgaagggtttgtcatagaag

SEQ ID NO: 227274 - DNA, 25 bp, SARS Virus
aacttgaagggtttgtcatagaaga

SEQ ID NO: 227275 - DNA, 25 bp, SARS Virus
acttgaagggtttgtcatagaagag

SEQ ID NO: 227276 - DNA, 25 bp, SARS Virus
cttgaagggtttttcatagaagagg

SEQ ID NO: 227277 - DNA, 25 bp, SARS Virus
ttgaagggtttgtcatagaagaggt

SEQ ID NO: 227278 - DNA, 25 bp, SARS Virus
tgaagggtttgttatagaagaggtt

SEQ ID NO: 227279 - DNA, 25 bp, SARS Virus
gaagggtttgtcttagaagaggttt

SEQ ID NO: 227280 - DNA, 25 bp, SARS Virus
aagggtttgtcatagaagaggtttc

SEQ ID NO: 227281 - DNA, 25 bp, SARS Virus
agggtttgtcattgaagaggtttcc

SEQ ID NO: 227282 - DNA, 25 bp, SARS Virus
gggtttgtcatataagaggtttcca

SEQ ID NO: 227283 - DNA, 25 bp, SARS Virus
ggtttgtcatagtagaggtttccaa

SEQ ID NO: 227284 - DNA, 25 bp, SARS Virus
gtttgtcatagatgaggtttccaat

SEQ ID NO: 227285 - DNA, 25 bp, SARS Virus
tttgtcatagaataggtttccaatg

SEQ ID NO: 227286 - DNA, 25 bp, SARS Virus
ttgtcatagaagtggtttccaatgt

SEQ ID NO: 227287 - DNA, 25 bp, SARS Virus
tgtcatagaagatgtttccaatgtg

SEQ ID NO: 227288 - DNA, 25 bp, SARS Virus
gtcatagaagagttttccaatgtgg

SEQ ID NO: 227289 - DNA, 25 bp, SARS Virus
tcatagaagaggtttccaatgtgga

SEQ ID NO: 227290 - DNA, 25 bp, SARS Virus
catagaagaggtttccaatgtggaa

SEQ ID NO: 227291 - DNA, 25 bp, SARS Virus
atagaagaggtttccaatgtggaaa

SEQ ID NO: 227292 - DNA, 25 bp, SARS Virus
tagaagaggttttcaatgtggaaat

SEQ ID NO: 227293 - DNA, 25 bp, SARS Virus
agaagaggtttctaatgtggaaatt

SEQ ID NO: 227294 - DNA, 25 bp, SARS Virus
gaagaggtttcctatgtggaaatta

SEQ ID NO: 227295 - DNA, 25 bp, SARS Virus
aagaggtttccattgtggaaattaa

SEQ ID NO: 227296 - DNA, 25 bp, SARS Virus
agaggtttccaatgtggaaattaac

SEQ ID NO: 227297 - DNA, 25 bp, SARS Virus
gaggtttccaatttggaaattaacc

SEQ ID NO: 227298 - DNA, 25 bp, SARS Virus
aggtttccaatgtggaaattaacca

SEQ ID NO: 227299 - DNA, 25 bp, SARS Virus
ggtttccaatgttgaaattaaccac

SEQ ID NO: 227300 - DNA, 25 bp, SARS Virus
gtttccaatgtgtaaattaaccacg

SEQ ID NO: 227301 - DNA, 25 bp, SARS Virus
tttccaatgtggtaattaaccacgt

SEQ ID NO: 227302 - DNA, 25 bp, SARS Virus
ttccaatgtggatattaaccacgtg

SEQ ID NO: 227303 - DNA, 25 bp, SARS Virus
tccaatgtggaatttaaccacgtgg

SEQ ID NO: 227304 - DNA, 25 bp, SARS Virus
ccaatgtggaaattaaccacgtggg

SEQ ID NO: 227305 - DNA, 25 bp, SARS Virus
caatgtggaaattaaccacgtgggg

SEQ ID NO: 227306 - DNA, 25 bp, SARS Virus
aatgtggaaatttaccacgtggggg

SEQ ID NO: 227307 - DNA, 25 bp, SARS Virus
atgtggaaattatccacgtggggga

SEQ ID NO: 227308 - DNA, 25 bp, SARS Virus
tgtggaaattaatcacgtgggggaa

SEQ ID NO: 227309 - DNA, 25 bp, SARS Virus
gtggaaattaactacgtgggggaaa

SEQ ID NO: 227310 - DNA, 25 bp, SARS Virus
tggaaattaacctcgtgggggaaaa

SEQ ID NO: 227311 - DNA, 25 bp, SARS Virus
ggaaattaaccatgtgggggaaaat

SEQ ID NO: 227312 - DNA, 25 bp, SARS Virus
gaaattaaccacttgggggaaaatt

SEQ ID NO: 227313 - DNA, 25 bp, SARS Virus
aaattaaccacgtgggggaaaattc

SEQ ID NO: 227314 - DNA, 25 bp, SARS Virus
aattaaccacgttggggaaaattcg

SEQ ID NO: 227315 - DNA, 25 bp, SARS Virus
attaaccacgtgtgggaaaattcgc

SEQ ID NO: 227316 - DNA, 25 bp, SARS Virus
ttaaccacgtggtggaaaattcgct

SEQ ID NO: 227317 - DNA, 25 bp, SARS Virus
taaccacgtgggtgaaaattcgctt

SEQ ID NO: 227318 - DNA, 25 bp, SARS Virus
aaccacgtggggtaaaattcgcttt

SEQ ID NO: 227319 - DNA, 25 bp, SARS Virus
accacgtgggggtaaattcgctttc

SEQ ID NO: 227320 - DNA, 25 bp, SARS Virus
ccacgtgggggataattcgctttct

SEQ ID NO: 227321 - DNA, 25 bp, SARS Virus
cacgtgggggaatattcgctttctg

SEQ ID NO: 227322 - DNA, 25 bp, SARS Virus
acgtgggggaaatttcgctttctgt

SEQ ID NO: 227323 - DNA, 25 bp, SARS Virus
cgtgggggaaaattcgctttctgta

SEQ ID NO: 227324 - DNA, 25 bp, SARS Virus
gtgggggaaaattcgctttctgtaa

SEQ ID NO: 227325 - DNA, 25 bp, SARS Virus
tgggggaaaatttgctttctgtaac

SEQ ID NO: 227326 - DNA, 25 bp, SARS Virus
gggggaaaattctctttctgtaaca

SEQ ID NO: 227327 - DNA, 25 bp, SARS Virus
ggggaaaattcgttttctgtaacaa

SEQ ID NO: 227328 - DNA, 25 bp, SARS Virus
gggaaaattcgctttctgtaacaaa

SEQ ID NO: 227329 - DNA, 25 bp, SARS Virus
ggaaaattcgctttctgtaacaaac

SEQ ID NO: 227330 - DNA, 25 bp, SARS Virus
gaaaattcgctttctgtaacaaaca

SEQ ID NO: 227331 - DNA, 25 bp, SARS Virus
aaaattcgctttttgtaacaaacat

SEQ ID NO: 227332 - DNA, 25 bp, SARS Virus
aaattcgctttctgtaacaaacatc

SEQ ID NO: 227333 - DNA, 25 bp, SARS Virus
aattcgctttctttaacaaacatcg

SEQ ID NO: 227334 - DNA, 25 bp, SARS Virus
attcgctttctgtaacaaacatcgg

SEQ ID NO: 227335 - DNA, 25 bp, SARS Virus
ttcgctttctgttacaaacatcggt

SEQ ID NO: 227336 - DNA, 25 bp, SARS Virus
tcgctttctgtatcaaacatcggtc

SEQ ID NO: 227337 - DNA, 25 bp, SARS Virus
cgctttctgtaataaacatcggtca

SEQ ID NO: 227338 - DNA, 25 bp, SARS Virus
gctttctgtaactaacatcggtcat

SEQ ID NO: 227339 - DNA, 25 bp, SARS Virus
ctttctgtaacatacatcggtcatt

SEQ ID NO: 227340 - DNA, 25 bp, SARS Virus
tttctgtaacaatcatcggtcattt

SEQ ID NO: 227341 - DNA, 25 bp, SARS Virus
ttctgtaacaaatatcggtcatttg

SEQ ID NO: 227342 - DNA, 25 bp, SARS Virus
tctgtaacaaacttcggtcatttgg

SEQ ID NO: 227343 - DNA, 25 bp, SARS Virus
ctgtaacaaacatcggtcatttggt

SEQ ID NO: 227344 - DNA, 25 bp, SARS Virus
tgtaacaaacattggtcatttggtc

SEQ ID NO: 227345 - DNA, 25 bp, SARS Virus
gtaacaaacatctgtcatttggtcc

SEQ ID NO: 227346 - DNA, 25 bp, SARS Virus
taacaaacatcgttcatttggtcct

SEQ ID NO: 227347 - DNA, 25 bp, SARS Virus
aacaaacatcggtcatttggtcctc

SEQ ID NO: 227348 - DNA, 25 bp, SARS Virus
acaaacatcggttatttggtcctct

SEQ ID NO: 227349 - DNA, 25 bp, SARS Virus
caaacatcggtcttttggtcctctg

SEQ ID NO: 227350 - DNA, 25 bp, SARS Virus
aaacatcggtcatttggtcctctgt

SEQ ID NO: 227351 - DNA, 25 bp, SARS Virus
aacatcggtcatttggtcctctgtt

SEQ ID NO: 227352 - DNA, 25 bp, SARS Virus
acatcggtcatttggtcctctgtta

SEQ ID NO: 227353 - DNA, 25 bp, SARS Virus
catcggtcattttgtcctctgttac

SEQ ID NO: 227354 - DNA, 25 bp, SARS Virus
atcggtcatttgttcctctgttacg

SEQ ID NO: 227355 - DNA, 25 bp, SARS Virus
tcggtcatttggtcctctgttacgc

SEQ ID NO: 227356 - DNA, 25 bp, SARS Virus
cggtcatttggttctctgttacgcg

SEQ ID NO: 227357 - DNA, 25 bp, SARS Virus
ggtcatttggtcttctgttacgcgt

SEQ ID NO: 227358 - DNA, 25 bp, SARS Virus
gtcatttggtcctctgttacgcgtc

SEQ ID NO: 227359 - DNA, 25 bp, SARS Virus
tcatttggtcctttgttacgcgtca

SEQ ID NO: 227360 - DNA, 25 bp, SARS Virus
catttggtcctctgttacgcgtcat

SEQ ID NO: 227361 - DNA, 25 bp, SARS Virus
atttggtcctcttttacgcgtcata

SEQ ID NO: 227362 - DNA, 25 bp, SARS Virus
tttggtcctctgttacgcgtcataa

SEQ ID NO: 227363 - DNA, 25 bp, SARS Virus
ttggtcctctgttacgcgtcataac

SEQ ID NO: 227364 - DNA, 25 bp, SARS Virus
tggtcctctgtttcgcgtcataaca

SEQ ID NO: 227365 - DNA, 25 bp, SARS Virus
ggtcctctgttatgcgtcataacaa

SEQ ID NO: 227366 - DNA, 25 bp, SARS Virus
gtcctctgttactcgtcataacaag

SEQ ID NO: 227367 - DNA, 25 bp, SARS Virus
tcctctgttacgtgtcataacaaga

SEQ ID NO: 227368 - DNA, 25 bp, SARS Virus
cctctgttacgcttcataacaagaa

SEQ ID NO: 227369 - DNA, 25 bp, SARS Virus
ctctgttacgcgtcataacaagaaa

SEQ ID NO: 227370 - DNA, 25 bp, SARS Virus
tctgttacgcgttataacaagaaac

SEQ ID NO: 227371 - DNA, 25 bp, SARS Virus
ctgttacgcgtcttaacaagaaaca

SEQ ID NO: 227372 - DNA, 25 bp, SARS Virus
tgttacgcgtcataacaagaaacag

SEQ ID NO: 227373 - DNA, 25 bp, SARS Virus
gttacgcgtcattacaagaaacagg

SEQ ID NO: 227374 - DNA, 25 bp, SARS Virus
ttacgcgtcatatcaagaaacagga

SEQ ID NO: 227375 - DNA, 25 bp, SARS Virus
tacgcgtcataataagaaacaggaa

SEQ ID NO: 227376 - DNA, 25 bp, SARS Virus
acgcgtcataactagaaacaggaat

SEQ ID NO: 227377 - DNA, 25 bp, SARS Virus
cgcgtcataacatgaaacaggaatt

SEQ ID NO: 227378 - DNA, 25 bp, SARS Virus
gcgtcataacaataaacaggaatta

SEQ ID NO: 227379 - DNA, 25 bp, SARS Virus
cgtcataacaagtaacaggaattag

SEQ ID NO: 227380 - DNA, 25 bp, SARS Virus
gtcataacaagatacaggaattaga

SEQ ID NO: 227381 - DNA, 25 bp, SARS Virus
tcataacaagaatcaggaattagag

SEQ ID NO: 227382 - DNA, 25 bp, SARS Virus
cataacaagaaataggaattagaga

SEQ ID NO: 227383 - DNA, 25 bp, SARS Virus
ataacaagaaactggaattagagat

SEQ ID NO: 227384 - DNA, 25 bp, SARS Virus
taacaagaaacatgaattagagatt

SEQ ID NO: 227385 - DNA, 25 bp, SARS Virus
aacaagaaacagtaattagagattc

SEQ ID NO: 227386 - DNA, 25 bp, SARS Virus
acaagaaacaggtattagagattct

SEQ ID NO: 227387 - DNA, 25 bp, SARS Virus
caagaaacaggatttagagattctc

SEQ ID NO: 227388 - DNA, 25 bp, SARS Virus
aagaaacaggaattagagattctcg

SEQ ID NO: 227389 - DNA, 25 bp, SARS Virus
agaaacaggaattagagattctcgt

SEQ ID NO: 227390 - DNA, 25 bp, SARS Virus
gaaacaggaatttgagattctcgta

SEQ ID NO: 227391 - DNA, 25 bp, SARS Virus
aaacaggaattatagattctcgtac

SEQ ID NO: 227392 - DNA, 25 bp, SARS Virus
aacaggaattagtgattctcgtact

SEQ ID NO: 227393 - DNA, 25 bp, SARS Virus
acaggaattagatattctcgtactc

SEQ ID NO: 227394 - DNA, 25 bp, SARS Virus
caggaattagagtttctcgtactcc

SEQ ID NO: 227395 - DNA, 25 bp, SARS Virus
aggaattagagattctcgtactccg

SEQ ID NO: 227396 - DNA, 25 bp, SARS Virus
ggaattagagattctcgtactccgg

SEQ ID NO: 227397 - DNA, 25 bp, SARS Virus
gaattagagattttcgtactccggt

SEQ ID NO: 227398 - DNA, 25 bp, SARS Virus
aattagagattctcgtactccggta

SEQ ID NO: 227399 - DNA, 25 bp, SARS Virus
attagagattcttgtactccggtaa

SEQ ID NO: 227400 - DNA, 25 bp, SARS Virus
ttagagattctcttactccggtaaa

SEQ ID NO: 227401 - DNA, 25 bp, SARS Virus
tagagattctcgtactccggtaaat

SEQ ID NO: 227402 - DNA, 25 bp, SARS Virus
agagattctcgttctccggtaaatg

SEQ ID NO: 227403 - DNA, 25 bp, SARS Virus
gagattctcgtattccggtaaatgt

SEQ ID NO: 227404 - DNA, 25 bp, SARS Virus
agattctcgtactccggtaaatgtg

SEQ ID NO: 227405 - DNA, 25 bp, SARS Virus
gattctcgtacttcggtaaatgtgt

SEQ ID NO: 227406 - DNA, 25 bp, SARS Virus
attctcgtactctggtaaatgtgtc

SEQ ID NO: 227407 - DNA, 25 bp, SARS Virus
ttctcgtactcctgtaaatgtgtct

SEQ ID NO: 227408 - DNA, 25 bp, SARS Virus
tctcgtactccgttaaatgtgtctg

SEQ ID NO: 227409 - DNA, 25 bp, SARS Virus
ctcgtactccggtaaatgtgtctga

SEQ ID NO: 227410 - DNA, 25 bp, SARS Virus
tcgtactccggttaatgtgtctgac

SEQ ID NO: 227411 - DNA, 25 bp, SARS Virus
cgtactccggtatatgtgtctgacc

SEQ ID NO: 227412 - DNA, 25 bp, SARS Virus
gtactccggtaattgtgtctgacca

SEQ ID NO: 227413 - DNA, 25 bp, SARS Virus
tactccggtaaatgtgtctgaccac

SEQ ID NO: 227414 - DNA, 25 bp, SARS Virus
actccggtaaatttgtctgaccaca

SEQ ID NO: 227415 - DNA, 25 bp, SARS Virus
ctccggtaaatgtgtctgaccacac

SEQ ID NO: 227416 - DNA, 25 bp, SARS Virus
tccggtaaatgtttctgaccacacg

SEQ ID NO: 227417 - DNA, 25 bp, SARS Virus
ccggtaaatgtgtctgaccacacgg

SEQ ID NO: 227418 - DNA, 25 bp, SARS Virus
cggtaaatgtgtttgaccacacggt

SEQ ID NO: 227419 - DNA, 25 bp, SARS Virus
ggtaaatgtgtctgaccacacggtt

SEQ ID NO: 227420 - DNA, 25 bp, SARS Virus
gtaaatgtgtcttaccacacggttg

SEQ ID NO: 227421 - DNA, 25 bp, SARS Virus
taaatgtgtctgtccacacggttgc

SEQ ID NO: 227422 - DNA, 25 bp, SARS Virus
aaatgtgtctgatcacacggttgct

SEQ ID NO: 227423 - DNA, 25 bp, SARS Virus
aatgtgtctgactacacggttgcta

SEQ ID NO: 227424 - DNA, 25 bp, SARS Virus
atgtgtctgacctcacggttgctat

SEQ ID NO: 227425 - DNA, 25 bp, SARS Virus
tgtgtctgaccatacggttgctatc

SEQ ID NO: 227426 - DNA, 25 bp, SARS Virus
gtgtctgaccactcggttgctatcg

SEQ ID NO: 227427 - DNA, 25 bp, SARS Virus
tgtctgaccacatggttgctatcga

SEQ ID NO: 227428 - DNA, 25 bp, SARS Virus
gtctgaccacactgttgctatcgag

SEQ ID NO: 227429 - DNA, 25 bp, SARS Virus
tctgaccacacgtttgctatcgagg

SEQ ID NO: 227430 - DNA, 25 bp, SARS Virus
ctgaccacacggttgctatcgaggt

SEQ ID NO: 227431 - DNA, 25 bp, SARS Virus
tgaccacacggttgctatcgaggta

SEQ ID NO: 227432 - DNA, 25 bp, SARS Virus
gaccacacggtttctatcgaggtaa

SEQ ID NO: 227433 - DNA, 25 bp, SARS Virus
accacacggttgttatcgaggtaaa

SEQ ID NO: 227434 - DNA, 25 bp, SARS Virus
ccacacggttgctatcgaggtaaac

SEQ ID NO: 227435 - DNA, 25 bp, SARS Virus
cacacggttgctttcgaggtaaaca

SEQ ID NO: 227436 - DNA, 25 bp, SARS Virus
acacggttgctatcgaggtaaacac

SEQ ID NO: 227437 - DNA, 25 bp, SARS Virus
cacggttgctattgaggtaaacact

SEQ ID NO: 227438 - DNA, 25 bp, SARS Virus
acggttgctatctaggtaaacactt

SEQ ID NO: 227439 - DNA, 25 bp, SARS Virus
cggttgctatcgtggtaaacacttc

SEQ ID NO: 227440 - DNA, 25 bp, SARS Virus
ggttgctatcgatgtaaacacttcg

SEQ ID NO: 227441 - DNA, 25 bp, SARS Virus
gttgctatcgagataaacacttcga

SEQ ID NO: 227442 - DNA, 25 bp, SARS Virus
ttgctatcgaggaaaacacttcgat

SEQ ID NO: 227443 - DNA, 25 bp, SARS Virus
tgctatcgaggtaaacacttcgata

SEQ ID NO: 227444 - DNA, 25 bp, SARS Virus
gctatcgaggtaaacacttcgatag

SEQ ID NO: 227445 - DNA, 25 bp, SARS Virus
ctatcgaggtaaacacttcgatagt

SEQ ID NO: 227446 - DNA, 25 bp, SARS Virus
tatcgaggtaaaaacttcgatagtt

SEQ ID NO: 227447 - DNA, 25 bp, SARS Virus
atcgaggtaaacacttcgatagttg

SEQ ID NO: 227448 - DNA, 25 bp, SARS Virus
tcgaggtaaacaattcgatagttgc

SEQ ID NO: 227449 - DNA, 25 bp, SARS Virus
cgaggtaaacacatcgatagttgcc

SEQ ID NO: 227450 - DNA, 25 bp, SARS Virus
gaggtaaacactacgatagttgccc

SEQ ID NO: 227451 - DNA, 25 bp, SARS Virus
aggtaaacacttagatagttgcccg

SEQ ID NO: 227452 - DNA, 25 bp, SARS Virus
ggtaaacacttcaatagttgcccgc

SEQ ID NO: 227453 - DNA, 25 bp, SARS Virus
gtaaacacttcgatagttgcccgca

SEQ ID NO: 227454 - DNA, 25 bp, SARS Virus
taaacacttcgaaagttgcccgcag

SEQ ID NO: 227455 - DNA, 25 bp, SARS Virus
aaacacttcgatagttgcccgcaga

SEQ ID NO: 227456 - DNA, 25 bp, SARS Virus
aacacttcgataattgcccgcagag

SEQ ID NO: 227457 - DNA, 25 bp, SARS Virus
acacttcgatagatgcccgcagagc

SEQ ID NO: 227458 - DNA, 25 bp, SARS Virus
cacttcgatagtagcccgcagagct

SEQ ID NO: 227459 - DNA, 25 bp, SARS Virus
acttcgatagttacccgcagagctc

SEQ ID NO: 227460 - DNA, 25 bp, SARS Virus
cttcgatagttgaccgcagagctca

SEQ ID NO: 227461 - DNA, 25 bp, SARS Virus
ttcgatagttgcacgcagagctcac

SEQ ID NO: 227462 - DNA, 25 bp, SARS Virus
tcgatagttgccagcagagctcacg

SEQ ID NO: 227463 - DNA, 25 bp, SARS Virus
cgatagttgcccacagagctcacga

SEQ ID NO: 227464 - DNA, 25 bp, SARS Virus
gatagttgcccgaagagctcacgaa

SEQ ID NO: 227465 - DNA, 25 bp, SARS Virus
atagttgcccgcagagctcacgaag

SEQ ID NO: 227466 - DNA, 25 bp, SARS Virus
tagttgcccgcaaagctcacgaagc

SEQ ID NO: 227467 - DNA, 25 bp, SARS Virus
agttgcccgcagagctcacgaagct

SEQ ID NO: 227468 - DNA, 25 bp, SARS Virus
gttgcccgcagaactcacgaagctc

SEQ ID NO: 227469 - DNA, 25 bp, SARS Virus
ttgcccgcagagatcacgaagctca

SEQ ID NO: 227470 - DNA, 25 bp, SARS Virus
tgcccgcagagcacacgaagctcaa

SEQ ID NO: 227471 - DNA, 25 bp, SARS Virus
gcccgcagagctaacgaagctcaag

SEQ ID NO: 227472 - DNA, 25 bp, SARS Virus
cccgcagagctcacgaagctcaagt

SEQ ID NO: 227473 - DNA, 25 bp, SARS Virus
ccgcagagctcaagaagctcaagtg

SEQ ID NO: 227474 - DNA, 25 bp, SARS Virus
cgcagagctcacaaagctcaagtgg

SEQ ID NO: 227475 - DNA, 25 bp, SARS Virus
gcagagctcacgaagctcaagtggc

SEQ ID NO: 227476 - DNA, 25 bp, SARS Virus
cagagctcacgaagctcaagtggca

SEQ ID NO: 227477 - DNA, 25 bp, SARS Virus
agagctcacgaaactcaagtggcaa

SEQ ID NO: 227478 - DNA, 25 bp, SARS Virus
gagctcacgaagatcaagtggcaag

SEQ ID NO: 227479 - DNA, 25 bp, SARS Virus
agctcacgaagcacaagtggcaaga

SEQ ID NO: 227480 - DNA, 25 bp, SARS Virus
gctcacgaagctaaagtggcaagaa

SEQ ID NO: 227481 - DNA, 25 bp, SARS Virus
ctcacgaagctcaagtggcaagaac

SEQ ID NO: 227482 - DNA, 25 bp, SARS Virus
tcacgaagctcaagtggcaagaact

SEQ ID NO: 227483 - DNA, 25 bp, SARS Virus
cacgaagctcaaatggcaagaactc

SEQ ID NO: 227484 - DNA, 25 bp, SARS Virus
acgaagctcaagaggcaagaactct

SEQ ID NO: 227485 - DNA, 25 bp, SARS Virus
cgaagctcaagtagcaagaactctt

SEQ ID NO: 227486 - DNA, 25 bp, SARS Virus
gaagctcaagtgacaagaactcttg

SEQ ID NO: 227487 - DNA, 25 bp, SARS Virus
aagctcaagtggaaagaactcttgt

SEQ ID NO: 227488 - DNA, 25 bp, SARS Virus
agctcaagtggcaagaactcttgtt

SEQ ID NO: 227489 - DNA, 25 bp, SARS Virus
gctcaagtggcaagaactcttgttg

SEQ ID NO: 227490 - DNA, 25 bp, SARS Virus
ctcaagtggcaaaaactcttgttgg

SEQ ID NO: 227491 - DNA, 25 bp, SARS Virus
tcaagtggcaagaactcttgttgga

SEQ ID NO: 227492 - DNA, 25 bp, SARS Virus
caagtggcaagaactcttgttggag

SEQ ID NO: 227493 - DNA, 25 bp, SARS Virus
aagtggcaagaaatcttgttggagg

SEQ ID NO: 227494 - DNA, 25 bp, SARS Virus
agtggcaagaacacttgttggagga

SEQ ID NO: 227495 - DNA, 25 bp, SARS Virus
gtggcaagaactattgttggaggag

SEQ ID NO: 227496 - DNA, 25 bp, SARS Virus
tggcaagaactcatgttggaggagt

SEQ ID NO: 227497 - DNA, 25 bp, SARS Virus
ggcaagaactctagttggaggagtc

SEQ ID NO: 227498 - DNA, 25 bp, SARS Virus
gcaagaactcttattggaggagtct

SEQ ID NO: 227499 - DNA, 25 bp, SARS Virus
caagaactcttgatggaggagtctc

SEQ ID NO: 227500 - DNA, 25 bp, SARS Virus
aagaactcttgtaggaggagtctcc

SEQ ID NO: 227501 - DNA, 25 bp, SARS Virus
agaactcttgttagaggagtctcca

SEQ ID NO: 227502 - DNA, 25 bp, SARS Virus
gaactcttgttgaaggagtctccat

SEQ ID NO: 227503 - DNA, 25 bp, SARS Virus
aactcttgttggaggagtctccatt

SEQ ID NO: 227504 - DNA, 25 bp, SARS Virus
actcttgttggaagagtctccattc

SEQ ID NO: 227505 - DNA, 25 bp, SARS Virus
ctcttgttggagaagtctccattca

SEQ ID NO: 227506 - DNA, 25 bp, SARS Virus
tcttgttggaggagtctccattcat

SEQ ID NO: 227507 - DNA, 25 bp, SARS Virus
cttgttggaggaatctccattcatg

SEQ ID NO: 227508 - DNA, 25 bp, SARS Virus
ttgttggaggagactccattcatga

SEQ ID NO: 227509 - DNA, 25 bp, SARS Virus
tgttggaggagtatccattcatgac

SEQ ID NO: 227510 - DNA, 25 bp, SARS Virus
gttggaggagtcaccattcatgaca

SEQ ID NO: 227511 - DNA, 25 bp, SARS Virus
ttggaggagtctacattcatgacac

SEQ ID NO: 227512 - DNA, 25 bp, SARS Virus
tggaggagtctcaattcatgacaca

SEQ ID NO: 227513 - DNA, 25 bp, SARS Virus
ggaggagtctccattcatgacacag

SEQ ID NO: 227514 - DNA, 25 bp, SARS Virus
gaggagtctccaatcatgacacagt

SEQ ID NO: 227515 - DNA, 25 bp, SARS Virus
aggagtctccatacatgacacagta

SEQ ID NO: 227516 - DNA, 25 bp, SARS Virus
ggagtctccattaatgacacagtac

SEQ ID NO: 227517 - DNA, 25 bp, SARS Virus
gagtctccattcatgacacagtaca

SEQ ID NO: 227518 - DNA, 25 bp, SARS Virus
agtctccattcaagacacagtacac

SEQ ID NO: 227519 - DNA, 25 bp, SARS Virus
gtctccattcataacacagtacact

SEQ ID NO: 227520 - DNA, 25 bp, SARS Virus
tctccattcatgacacagtacactt

SEQ ID NO: 227521 - DNA, 25 bp, SARS Virus
ctccattcatgaaacagtacactta

SEQ ID NO: 227522 - DNA, 25 bp, SARS Virus
tccattcatgacacagtacacttag

SEQ ID NO: 227523 - DNA, 25 bp, SARS Virus
ccattcatgacaaagtacacttagt

SEQ ID NO: 227524 - DNA, 25 bp, SARS Virus
cattcatgacacagtacacttagtg

SEQ ID NO: 227525 - DNA, 25 bp, SARS Virus
attcatgacacaatacacttagtgg

SEQ ID NO: 227526 - DNA, 25 bp, SARS Virus
ttcatgacacagaacacttagtgga

SEQ ID NO: 227527 - DNA, 25 bp, SARS Virus
tcatgacacagtacacttagtggaa

SEQ ID NO: 227528 - DNA, 25 bp, SARS Virus
catgacacagtaaacttagtggaag

SEQ ID NO: 227529 - DNA, 25 bp, SARS Virus
atgacacagtacacttagtggaagt

SEQ ID NO: 227530 - DNA, 25 bp, SARS Virus
tgacacagtacaattagtggaagtt

SEQ ID NO: 227531 - DNA, 25 bp, SARS Virus
gacacagtacacatagtggaagttc

SEQ ID NO: 227532 - DNA, 25 bp, SARS Virus
acacagtacactaagtggaagttct

SEQ ID NO: 227533 - DNA, 25 bp, SARS Virus
cacagtacacttagtggaagttctt

SEQ ID NO: 227534 - DNA, 25 bp, SARS Virus
acagtacacttaatggaagttcttt

SEQ ID NO: 227535 - DNA, 25 bp, SARS Virus
cagtacacttagaggaagttctttc

SEQ ID NO: 227536 - DNA, 25 bp, SARS Virus
agtacacttagtagaagttctttcc

SEQ ID NO: 227537 - DNA, 25 bp, SARS Virus
gtacacttagtgaaagttctttcca

SEQ ID NO: 227538 - DNA, 25 bp, SARS Virus
tacacttagtggaagttctttccaa

SEQ ID NO: 227539 - DNA, 25 bp, SARS Virus
acacttagtggaagttctttccaat

SEQ ID NO: 227540 - DNA, 25 bp, SARS Virus
cacttagtggaaattctttccaatg

SEQ ID NO: 227541 - DNA, 25 bp, SARS Virus
acttagtggaagatctttccaatga

SEQ ID NO: 227542 - DNA, 25 bp, SARS Virus
cttagtggaagtactttccaatgaa

SEQ ID NO: 227543 - DNA, 25 bp, SARS Virus
ttagtggaagttatttccaatgaag

SEQ ID NO: 227544 - DNA, 25 bp, SARS Virus
tagtggaagttcattccaatgaaga

SEQ ID NO: 227545 - DNA, 25 bp, SARS Virus
agtggaagttctatccaatgaagaa

SEQ ID NO: 227546 - DNA, 25 bp, SARS Virus
gtggaagttcttaccaatgaagaaa

SEQ ID NO: 227547 - DNA, 25 bp, SARS Virus
tggaagttctttacaatgaagaaaa

SEQ ID NO: 227548 - DNA, 25 bp, SARS Virus
ggaagttctttcaaatgaagaaaac

SEQ ID NO: 227549 - DNA, 25 bp, SARS Virus
gaagttctttccaatgaagaaaacc

SEQ ID NO: 227550 - DNA, 25 bp, SARS Virus
aagttctttccaatgaagaaaacca

SEQ ID NO: 227551 - DNA, 25 bp, SARS Virus
agttctttccaaagaagaaaaccac

SEQ ID NO: 227552 - DNA, 25 bp, SARS Virus
gttctttccaataaagaaaaccacg

SEQ ID NO: 227553 - DNA, 25 bp, SARS Virus
ttctttccaatgaagaaaaccacgg

SEQ ID NO: 227554 - DNA, 25 bp, SARS Virus
tctttccaatgaagaaaaccacgga

SEQ ID NO: 227555 - DNA, 25 bp, SARS Virus
ctttccaatgaaaaaaaccacggaa

SEQ ID NO: 227556 - DNA, 25 bp, SARS Virus
tttccaatgaagaaaaccacggaat

SEQ ID NO: 227557 - DNA, 25 bp, SARS Virus
ttccaatgaagaaaaccacggaatt

SEQ ID NO: 227558 - DNA, 25 bp, SARS Virus
tccaatgaagaaaaccacggaattc

SEQ ID NO: 227559 - DNA, 25 bp, SARS Virus
ccaatgaagaaaaccacggaattct

SEQ ID NO: 227560 - DNA, 25 bp, SARS Virus
caatgaagaaaaacacggaattctc

SEQ ID NO: 227561 - DNA, 25 bp, SARS Virus
aatgaagaaaacaacggaattctcc

SEQ ID NO: 227562 - DNA, 25 bp, SARS Virus
atgaagaaaaccacggaattctccg

SEQ ID NO: 227563 - DNA, 25 bp, SARS Virus
tgaagaaaaccaaggaattctccgt

SEQ ID NO: 227564 - DNA, 25 bp, SARS Virus
gaagaaaaccacagaattctccgta

SEQ ID NO: 227565 - DNA, 25 bp, SARS Virus
aagaaaaccacgaaattctccgtac

SEQ ID NO: 227566 - DNA, 25 bp, SARS Virus
agaaaaccacggaattctccgtact

SEQ ID NO: 227567 - DNA, 25 bp, SARS Virus
gaaaaccacggaattctccgtactc

SEQ ID NO: 227568 - DNA, 25 bp, SARS Virus
aaaaccacggaaatctccgtactca

SEQ ID NO: 227569 - DNA, 25 bp, SARS Virus
aaaccacggaatactccgtactcat

SEQ ID NO: 227570 - DNA, 25 bp, SARS Virus
aaccacggaattatccgtactcatc

SEQ ID NO: 227571 - DNA, 25 bp, SARS Virus
accacggaattcaccgtactcatca

SEQ ID NO: 227572 - DNA, 25 bp, SARS Virus
ccacggaattctacgtactcatcaa

SEQ ID NO: 227573 - DNA, 25 bp, SARS Virus
cacggaattctcagtactcatcaac

SEQ ID NO: 227574 - DNA, 25 bp, SARS Virus
acggaattctccatactcatcaacg

SEQ ID NO: 227575 - DNA, 25 bp, SARS Virus
cggaattctccgaactcatcaacgt

SEQ ID NO: 227576 - DNA, 25 bp, SARS Virus
ggaattctccgtactcatcaacgtc

SEQ ID NO: 227577 - DNA, 25 bp, SARS Virus
gaattctccgtaatcatcaacgtcg

SEQ ID NO: 227578 - DNA, 25 bp, SARS Virus
aattctccgtacacatcaacgtcga

SEQ ID NO: 227579 - DNA, 25 bp, SARS Virus
attctccgtactaatcaacgtcgac

SEQ ID NO: 227580 - DNA, 25 bp, SARS Virus
ttctccgtactcatcaacgtcgacg

SEQ ID NO: 227581 - DNA, 25 bp, SARS Virus
tctccgtactcaacaacgtcgacga

SEQ ID NO: 227582 - DNA, 25 bp, SARS Virus
ctccgtactcataaacgtcgacgag

SEQ ID NO: 227583 - DNA, 25 bp, SARS Virus
tccgtactcatcaacgtcgacgagg

SEQ ID NO: 227584 - DNA, 25 bp, SARS Virus
ccgtactcatcaacgtcgacgagga

SEQ ID NO: 227585 - DNA, 25 bp, SARS Virus
cgtactcatcaaagtcgacgaggaa

SEQ ID NO: 227586 - DNA, 25 bp, SARS Virus
gtactcatcaacatcgacgaggaac

SEQ ID NO: 227587 - DNA, 25 bp, SARS Virus
tactcatcaacgacgacgaggaacg

SEQ ID NO: 227588 - DNA, 25 bp, SARS Virus
actcatcaacgtagacgaggaacgg

SEQ ID NO: 227589 - DNA, 25 bp, SARS Virus
ctcatcaacgtcaacgaggaacggt

SEQ ID NO: 227590 - DNA, 25 bp, SARS Virus
tcatcaacgtcgacgaggaacggtg

SEQ ID NO: 227591 - DNA, 25 bp, SARS Virus
catcaacgtcgaagaggaacggtgc

SEQ ID NO: 227592 - DNA, 25 bp, SARS Virus
atcaacgtcgacaaggaacggtgca

SEQ ID NO: 227593 - DNA, 25 bp, SARS Virus
tcaacgtcgacgaggaacggtgcat

SEQ ID NO: 227594 - DNA, 25 bp, SARS Virus
caacgtcgacgaagaacggtgcata

SEQ ID NO: 227595 - DNA, 25 bp, SARS Virus
aacgtcgacgagaaacggtgcatat

SEQ ID NO: 227596 - DNA, 25 bp, SARS Virus
acgtcgacgaggaacggtgcatatg

SEQ ID NO: 227597 - DNA, 25 bp, SARS Virus
cgtcgacgaggaacggtgcatatgt

SEQ ID NO: 227598 - DNA, 25 bp, SARS Virus
gtcgacgaggaaaggtgcatatgtg

SEQ ID NO: 227599 - DNA, 25 bp, SARS Virus
tcgacgaggaacagtgcatatgtga

SEQ ID NO: 227600 - DNA, 25 bp, SARS Virus
cgacgaggaacgatgcatatgtgac

SEQ ID NO: 227601 - DNA, 25 bp, SARS Virus
gacgaggaacggagcatatgtgact

SEQ ID NO: 227602 - DNA, 25 bp, SARS Virus
acgaggaacggtacatatgtgactg

SEQ ID NO: 227603 - DNA, 25 bp, SARS Virus
cgaggaacggtgaatatgtgactgc

SEQ ID NO: 227604 - DNA, 25 bp, SARS Virus
gaggaacggtgcatatgtgactgcc

SEQ ID NO: 227605 - DNA, 25 bp, SARS Virus
aggaacggtgcaaatgtgactgcca

SEQ ID NO: 227606 - DNA, 25 bp, SARS Virus
ggaacggtgcatatgtgactgccat

SEQ ID NO: 227607 - DNA, 25 bp, SARS Virus
gaacggtgcataagtgactgccatt

SEQ ID NO: 227608 - DNA, 25 bp, SARS Virus
aacggtgcatatatgactgccattt

SEQ ID NO: 227609 - DNA, 25 bp, SARS Virus
acggtgcatatgagactgccatttc

SEQ ID NO: 227610 - DNA, 25 bp, SARS Virus
cggtgcatatgtaactgccatttca

SEQ ID NO: 227611 - DNA, 25 bp, SARS Virus
ggtgcatatgtgactgccatttcag

SEQ ID NO: 227612 - DNA, 25 bp, SARS Virus
gtgcatatgtgaatgccatttcagg

SEQ ID NO: 227613 - DNA, 25 bp, SARS Virus
tgcatatgtgacagccatttcaggg

SEQ ID NO: 227614 - DNA, 25 bp, SARS Virus
gcatatgtgactaccatttcaggga

SEQ ID NO: 227615 - DNA, 25 bp, SARS Virus
catatgtgactgacatttcagggaa

SEQ ID NO: 227616 - DNA, 25 bp, SARS Virus
atatgtgactgcaatttcagggaac

SEQ ID NO: 227617 - DNA, 25 bp, SARS Virus
tatgtgactgccatttcagggaacg

SEQ ID NO: 227618 - DNA, 25 bp, SARS Virus
atgtgactgccaattcagggaacga

SEQ ID NO: 227619 - DNA, 25 bp, SARS Virus
tgtgactgccatatcagggaacgaa

SEQ ID NO: 227620 - DNA, 25 bp, SARS Virus
gtgactgccattacagggaacgaaa

SEQ ID NO: 227621 - DNA, 25 bp, SARS Virus
tgactgccatttaagggaacgaaac

SEQ ID NO: 227622 - DNA, 25 bp, SARS Virus
gactgccatttcagggaacgaaact

SEQ ID NO: 227623 - DNA, 25 bp, SARS Virus
actgccatttcaaggaacgaaactc

SEQ ID NO: 227624 - DNA, 25 bp, SARS Virus
ctgccatttcagagaacgaaactcg

SEQ ID NO: 227625 - DNA, 25 bp, SARS Virus
tgccatttcaggaaacgaaactcgc

SEQ ID NO: 227626 - DNA, 25 bp, SARS Virus
gccatttcagggaacgaaactcgct

SEQ ID NO: 227627 - DNA, 25 bp, SARS Virus
ccatttcagggaacgaaactcgcta

SEQ ID NO: 227628 - DNA, 25 bp, SARS Virus
catttcagggaaagaaactcgctac

SEQ ID NO: 227629 - DNA, 25 bp, SARS Virus
atttcagggaacaaaactcgctact

SEQ ID NO: 227630 - DNA, 25 bp, SARS Virus
tttcagggaacgaaactcgctactt

SEQ ID NO: 227631 - DNA, 25 bp, SARS Virus
ttcagggaacgaaactcgctacttc

SEQ ID NO: 227632 - DNA, 25 bp, SARS Virus
tcagggaacgaaactcgctacttct

SEQ ID NO: 227633 - DNA, 25 bp, SARS Virus
cagggaacgaaaatcgctacttctg

SEQ ID NO: 227634 - DNA, 25 bp, SARS Virus
agggaacgaaacacgctacttctga

SEQ ID NO: 227635 - DNA, 25 bp, SARS Virus
gggaacgaaactagctacttctgaa

SEQ ID NO: 227636 - DNA, 25 bp, SARS Virus
ggaacgaaactcactacttctgaag

SEQ ID NO: 227637 - DNA, 25 bp, SARS Virus
gaacgaaactcgatacttctgaagt

SEQ ID NO: 227638 - DNA, 25 bp, SARS Virus
aacgaaactcgcaacttctgaagtg

SEQ ID NO: 227639 - DNA, 25 bp, SARS Virus
acgaaactcgctacttctgaagtgg

SEQ ID NO: 227640 - DNA, 25 bp, SARS Virus
cgaaactcgctaattctgaagtgga

SEQ ID NO: 227641 - DNA, 25 bp, SARS Virus
gaaactcgctacatctgaagtggat

SEQ ID NO: 227642 - DNA, 25 bp, SARS Virus
aaactcgctactactgaagtggatt

SEQ ID NO: 227643 - DNA, 25 bp, SARS Virus
aactcgctacttatgaagtggattc

SEQ ID NO: 227644 - DNA, 25 bp, SARS Virus
actcgctacttcagaagtggattca

SEQ ID NO: 227645 - DNA, 25 bp, SARS Virus
ctcgctacttctaaagtggattcaa

SEQ ID NO: 227646 - DNA, 25 bp, SARS Virus
tcgctacttctgaagtggattcaac

SEQ ID NO: 227647 - DNA, 25 bp, SARS Virus
cgctacttctgaagtggattcaact

SEQ ID NO: 227648 - DNA, 25 bp, SARS Virus
gctacttctgaaatggattcaactc

SEQ ID NO: 227649 - DNA, 25 bp, SARS Virus
ctacttctgaagaggattcaactca

SEQ ID NO: 227650 - DNA, 25 bp, SARS Virus
tacttctgaagtagattcaactcac

SEQ ID NO: 227651 - DNA, 25 bp, SARS Virus
acttctgaagtgaattcaactcact

SEQ ID NO: 227652 - DNA, 25 bp, SARS Virus
cttctgaagtggattcaactcacta

SEQ ID NO: 227653 - DNA, 25 bp, SARS Virus
ttctgaagtggaatcaactcactag

SEQ ID NO: 227654 - DNA, 25 bp, SARS Virus
tctgaagtggatacaactcactagc

SEQ ID NO: 227655 - DNA, 25 bp, SARS Virus
ctgaagtggattaaactcactagcg

SEQ ID NO: 227656 - DNA, 25 bp, SARS Virus
tgaagtggattcaactcactagcgt

SEQ ID NO: 227657 - DNA, 25 bp, SARS Virus
gaagtggattcaactcactagcgtt

SEQ ID NO: 227658 - DNA, 25 bp, SARS Virus
aagtggattcaaatcactagcgttg

SEQ ID NO: 227659 - DNA, 25 bp, SARS Virus
agtggattcaacacactagcgttga

SEQ ID NO: 227660 - DNA, 25 bp, SARS Virus
gtggattcaactaactagcgttgaa

SEQ ID NO: 227661 - DNA, 25 bp, SARS Virus
tggattcaactcactagcgttgaaa

SEQ ID NO: 227662 - DNA, 25 bp, SARS Virus
ggattcaactcaatagcgttgaaac

SEQ ID NO: 227663 - DNA, 25 bp, SARS Virus
gattcaactcacaagcgttgaaacg

SEQ ID NO: 227664 - DNA, 25 bp, SARS Virus
attcaactcactagcgttgaaacgc

SEQ ID NO: 227665 - DNA, 25 bp, SARS Virus
ttcaactcactaacgttgaaacgcg

SEQ ID NO: 227666 - DNA, 25 bp, SARS Virus
tcaactcactagagttgaaacgcgg

SEQ ID NO: 227667 - DNA, 25 bp, SARS Virus
caactcactagcattgaaacgcggt

SEQ ID NO: 227668 - DNA, 25 bp, SARS Virus
aactcactagcgatgaaacgcggtc

SEQ ID NO: 227669 - DNA, 25 bp, SARS Virus
actcactagcgtagaaacgcggtcg

SEQ ID NO: 227670 - DNA, 25 bp, SARS Virus
ctcactagcgttaaaacgcggtcgc

SEQ ID NO: 227671 - DNA, 25 bp, SARS Virus
tcactagcgttgaaacgcggtcgct

SEQ ID NO: 227672 - DNA, 25 bp, SARS Virus
cactagcgttgaaacgcggtcgcta

SEQ ID NO: 227673 - DNA, 25 bp, SARS Virus
actagcgttgaaacgcggtcgctat

SEQ ID NO: 227674 - DNA, 25 bp, SARS Virus
ctagcgttgaaaagcggtcgctatc

SEQ ID NO: 227675 - DNA, 25 bp, SARS Virus
tagcgttgaaacacggtcgctatca

SEQ ID NO: 227676 - DNA, 25 bp, SARS Virus
agcgttgaaacgaggtcgctatcac

SEQ ID NO: 227677 - DNA, 25 bp, SARS Virus
gcgttgaaacgcagtcgctatcact

SEQ ID NO: 227678 - DNA, 25 bp, SARS Virus
cgttgaaacgcgatcgctatcactg

SEQ ID NO: 227679 - DNA, 25 bp, SARS Virus
gttgaaacgcggacgctatcactga

SEQ ID NO: 227680 - DNA, 25 bp, SARS Virus
ttgaaacgcggtagctatcactgaa

SEQ ID NO: 227681 - DNA, 25 bp, SARS Virus
tgaaacgcggtcactatcactgaac

SEQ ID NO: 227682 - DNA, 25 bp, SARS Virus
gaaacgcggtcgatatcactgaact

SEQ ID NO: 227683 - DNA, 25 bp, SARS Virus
aaacgcggtcgcaatcactgaacta

SEQ ID NO: 227684 - DNA, 25 bp, SARS Virus
aacgcggtcgctatcactgaactag

SEQ ID NO: 227685 - DNA, 25 bp, SARS Virus
acgcggtcgctaacactgaactagt

SEQ ID NO: 227686 - DNA, 25 bp, SARS Virus
cgcggtcgctataactgaactagtt

SEQ ID NO: 227687 - DNA, 25 bp, SARS Virus
gcggtcgctatcactgaactagtta

SEQ ID NO: 227688 - DNA, 25 bp, SARS Virus
cggtcgctatcaatgaactagttac

SEQ ID NO: 227689 - DNA, 25 bp, SARS Virus
ggtcgctatcacagaactagttacg

SEQ ID NO: 227690 - DNA, 25 bp, SARS Virus
gtcgctatcactaaactagttacgt

SEQ ID NO: 227691 - DNA, 25 bp, SARS Virus
tcgctatcactgaactagttacgtg

SEQ ID NO: 227692 - DNA, 25 bp, SARS Virus
cgctatcactgaactagttacgtgt

SEQ ID NO: 227693 - DNA, 25 bp, SARS Virus
gctatcactgaaatagttacgtgta

SEQ ID NO: 227694 - DNA, 25 bp, SARS Virus
ctatcactgaacaagttacgtgtaa

SEQ ID NO: 227695 - DNA, 25 bp, SARS Virus
tatcactgaactagttacgtgtaaa

SEQ ID NO: 227696 - DNA, 25 bp, SARS Virus
atcactgaactaattacgtgtaaag

SEQ ID NO: 227697 - DNA, 25 bp, SARS Virus
tcactgaactagatacgtgtaaagc

SEQ ID NO: 227698 - DNA, 25 bp, SARS Virus
cactgaactagtaacgtgtaaagct

SEQ ID NO: 227699 - DNA, 25 bp, SARS Virus
actgaactagttacgtgtaaagctc

SEQ ID NO: 227700 - DNA, 25 bp, SARS Virus
ctgaactagttaagtgtaaagctca

SEQ ID NO: 227701 - DNA, 25 bp, SARS Virus
tgaactagttacatgtaaagctcac

SEQ ID NO: 227702 - DNA, 25 bp, SARS Virus
gaactagttacgagtaaagctcacg

SEQ ID NO: 227703 - DNA, 25 bp, SARS Virus
aactagttacgtataaagctcacgg

SEQ ID NO: 227704 - DNA, 25 bp, SARS Virus
actagttacgtgaaaagctcacgga

SEQ ID NO: 227705 - DNA, 25 bp, SARS Virus
ctagttacgtgtaaagctcacggaa

SEQ ID NO: 227706 - DNA, 25 bp, SARS Virus
tagttacgtgtaaagctcacggaac

SEQ ID NO: 227707 - DNA, 25 bp, SARS Virus
agttacgtgtaaagctcacggaaca

SEQ ID NO: 227708 - DNA, 25 bp, SARS Virus
gttacgtgtaaaactcacggaacaa

SEQ ID NO: 227709 - DNA, 25 bp, SARS Virus
ttacgtgtaaagatcacggaacaat

SEQ ID NO: 227710 - DNA, 25 bp, SARS Virus
tacgtgtaaagcacacggaacaatt

SEQ ID NO: 227711 - DNA, 25 bp, SARS Virus
acgtgtaaagctaacggaacaattg

SEQ ID NO: 227712 - DNA, 25 bp, SARS Virus
cgtgtaaagctcacggaacaattgt

SEQ ID NO: 227713 - DNA, 25 bp, SARS Virus
gtgtaaagctcaaggaacaattgtt

SEQ ID NO: 227714 - DNA, 25 bp, SARS Virus
tgtaaagctcacagaacaattgttg

SEQ ID NO: 227715 - DNA, 25 bp, SARS Virus
gtaaagctcacgaaacaattgttgt

SEQ ID NO: 227716 - DNA, 25 bp, SARS Virus
taaagctcacggaacaattgttgta

SEQ ID NO: 227717 - DNA, 25 bp, SARS Virus
aaagctcacggaacaattgttgtag

SEQ ID NO: 227718 - DNA, 25 bp, SARS Virus
aagctcacggaaaaattgttgtagt

SEQ ID NO: 227719 - DNA, 25 bp, SARS Virus
agctcacggaacaattgttgtagtt

SEQ ID NO: 227720 - DNA, 25 bp, SARS Virus
gctcacggaacaattgttgtagtta

SEQ ID NO: 227721 - DNA, 25 bp, SARS Virus
ctcacggaacaaatgttgtagttac

SEQ ID NO: 227722 - DNA, 25 bp, SARS Virus
tcacggaacaatagttgtagttact

SEQ ID NO: 227723 - DNA, 25 bp, SARS Virus
cacggaacaattattgtagttactt

SEQ ID NO: 227724 - DNA, 25 bp, SARS Virus
acggaacaattgatgtagttacttc

SEQ ID NO: 227725 - DNA, 25 bp, SARS Virus
cggaacaattgtagtagttacttcg

SEQ ID NO: 227726 - DNA, 25 bp, SARS Virus
ggaacaattgttatagttacttcgt

SEQ ID NO: 227727 - DNA, 25 bp, SARS Virus
gaacaattgttgaagttacttcgta

SEQ ID NO: 227728 - DNA, 25 bp, SARS Virus
aacaattgttgtagttacttcgtaa

SEQ ID NO: 227729 - DNA, 25 bp, SARS Virus
acaattgttgtaattacttcgtaaa

SEQ ID NO: 227730 - DNA, 25 bp, SARS Virus
caattgttgtagatacttcgtaaaa

SEQ ID NO: 227731 - DNA, 25 bp, SARS Virus
aattgttgtagtaacttcgtaaaat

SEQ ID NO: 227732 - DNA, 25 bp, SARS Virus
attgttgtagttacttcgtaaaatg

SEQ ID NO: 227733 - DNA, 25 bp, SARS Virus
ttgttgtagttaattcgtaaaatgt

SEQ ID NO: 227734 - DNA, 25 bp, SARS Virus
tgttgtagttacatcgtaaaatgtg

SEQ ID NO: 227735 - DNA, 25 bp, SARS Virus
gttgtagttactacgtaaaatgtgt

SEQ ID NO: 227736 - DNA, 25 bp, SARS Virus
ttgtagttacttagtaaaatgtgtt

SEQ ID NO: 227737 - DNA, 25 bp, SARS Virus
tgtagttacttcataaaatgtgtta

SEQ ID NO: 227738 - DNA, 25 bp, SARS Virus
gtagttacttcgaaaaatgtgttag

SEQ ID NO: 227739 - DNA, 25 bp, SARS Virus
tagttacttcgtaaaatgtgttagg

SEQ ID NO: 227740 - DNA, 25 bp, SARS Virus
agttacttcgtaaaatgtgttagga

SEQ ID NO: 227741 - DNA, 25 bp, SARS Virus
gttacttcgtaaaatgtgttaggaa

SEQ ID NO: 227742 - DNA, 25 bp, SARS Virus
ttacttcgtaaaatgtgttaggaac

SEQ ID NO: 227743 - DNA, 25 bp, SARS Virus
tacttcgtaaaaagtgttaggaact

SEQ ID NO: 227744 - DNA, 25 bp, SARS Virus
acttcgtaaaatatgttaggaacta

SEQ ID NO: 227745 - DNA, 25 bp, SARS Virus
cttcgtaaaatgagttaggaactac

SEQ ID NO: 227746 - DNA, 25 bp, SARS Virus
ttcgtaaaatgtattaggaactaca

SEQ ID NO: 227747 - DNA, 25 bp, SARS Virus
tcgtaaaatgtgataggaactacaa

SEQ ID NO: 227748 - DNA, 25 bp, SARS Virus
cgtaaaatgtgtaaggaactacaat

SEQ ID NO: 227749 - DNA, 25 bp, SARS Virus
gtaaaatgtgttaggaactacaata

SEQ ID NO: 227750 - DNA, 25 bp, SARS Virus
taaaatgtgttaagaactacaatag

SEQ ID NO: 227751 - DNA, 25 bp, SARS Virus
aaaatgtgttagaaactacaataga

SEQ ID NO: 227752 - DNA, 25 bp, SARS Virus
aaatgtgttaggaactacaatagac

SEQ ID NO: 227753 - DNA, 25 bp, SARS Virus
aatgtgttaggaactacaatagact

SEQ ID NO: 227754 - DNA, 25 bp, SARS Virus
atgtgttaggaaatacaatagactt

SEQ ID NO: 227755 - DNA, 25 bp, SARS Virus
tgtgttaggaacaacaatagacttc

SEQ ID NO: 227756 - DNA, 25 bp, SARS Virus
gtgttaggaactacaatagacttcg

SEQ ID NO: 227757 - DNA, 25 bp, SARS Virus
tgttaggaactaaaatagacttcgt

SEQ ID NO: 227758 - DNA, 25 bp, SARS Virus
gttaggaactacaatagacttcgtt

SEQ ID NO: 227759 - DNA, 25 bp, SARS Virus
ttaggaactacaatagacttcgttg

SEQ ID NO: 227760 - DNA, 25 bp, SARS Virus
taggaactacaaaagacttcgttgg

SEQ ID NO: 227761 - DNA, 25 bp, SARS Virus
aggaactacaatagacttcgttgga

SEQ ID NO: 227762 - DNA, 25 bp, SARS Virus
ggaactacaataaacttcgttggac

SEQ ID NO: 227763 - DNA, 25 bp, SARS Virus
gaactacaatagacttcgttggaca

SEQ ID NO: 227764 - DNA, 25 bp, SARS Virus
aactacaatagaattcgttggacat

SEQ ID NO: 227765 - DNA, 25 bp, SARS Virus
actacaatagacatcgttggacata

SEQ ID NO: 227766 - DNA, 25 bp, SARS Virus
ctacaatagactacgttggacataa

SEQ ID NO: 227767 - DNA, 25 bp, SARS Virus
tacaatagacttagttggacataaa

SEQ ID NO: 227768 - DNA, 25 bp, SARS Virus
acaatagacttcattggacataaac

SEQ ID NO: 227769 - DNA, 25 bp, SARS Virus
caatagacttcgatggacataaact

SEQ ID NO: 227770 - DNA, 25 bp, SARS Virus
aatagacttcgtaggacataaactg

SEQ ID NO: 227771 - DNA, 25 bp, SARS Virus
atagacttcgttagacataaactgg

SEQ ID NO: 227772 - DNA, 25 bp, SARS Virus
tagacttcgttgaacataaactggg

SEQ ID NO: 227773 - DNA, 25 bp, SARS Virus
agacttcgttggacataaactggga

SEQ ID NO: 227774 - DNA, 25 bp, SARS Virus
gacttcgttggaaataaactgggaa

SEQ ID NO: 227775 - DNA, 25 bp, SARS Virus
acttcgttggacataaactgggaac

SEQ ID NO: 227776 - DNA, 25 bp, SARS Virus
cttcgttggacaaaaactgggaact

SEQ ID NO: 227777 - DNA, 25 bp, SARS Virus
ttcgttggacataaactgggaactg

SEQ ID NO: 227778 - DNA, 25 bp, SARS Virus
tcgttggacataaactgggaactgc

SEQ ID NO: 227779 - DNA, 25 bp, SARS Virus
cgttggacataaactgggaactgct

SEQ ID NO: 227780 - DNA, 25 bp, SARS Virus
gttggacataaaatgggaactgcta

SEQ ID NO: 227781 - DNA, 25 bp, SARS Virus
ttggacataaacagggaactgctac

SEQ ID NO: 227782 - DNA, 25 bp, SARS Virus
tggacataaactaggaactgctaca

SEQ ID NO: 227783 - DNA, 25 bp, SARS Virus
ggacataaactgagaactgctacag

SEQ ID NO: 227784 - DNA, 25 bp, SARS Virus
gacataaactggaaactgctacagt

SEQ ID NO: 227785 - DNA, 25 bp, SARS Virus
acataaactgggaactgctacagtt

SEQ ID NO: 227786 - DNA, 25 bp, SARS Virus
cataaactgggaactgctacagttt

SEQ ID NO: 227787 - DNA, 25 bp, SARS Virus
ataaactgggaaatgctacagtttt

SEQ ID NO: 227788 - DNA, 25 bp, SARS Virus
taaactgggaacagctacagttttt

SEQ ID NO: 227789 - DNA, 25 bp, SARS Virus
aaactgggaactactacagtttttg

SEQ ID NO: 227790 - DNA, 25 bp, SARS Virus
aactgggaactgatacagtttttgt

SEQ ID NO: 227791 - DNA, 25 bp, SARS Virus
actgggaactgcaacagtttttgtg

SEQ ID NO: 227792 - DNA, 25 bp, SARS Virus
ctgggaactgctacagtttttgtgg

SEQ ID NO: 227793 - DNA, 25 bp, SARS Virus
tgggaactgctaaagtttttgtgga

SEQ ID NO: 227794 - DNA, 25 bp, SARS Virus
gggaactgctacagtttttgtggac

SEQ ID NO: 227795 - DNA, 25 bp, SARS Virus
ggaactgctacaatttttgtggaca

SEQ ID NO: 227796 - DNA, 25 bp, SARS Virus
gaactgctacagattttgtggacat

SEQ ID NO: 227797 - DNA, 25 bp, SARS Virus
aactgctacagtatttgtggacatt

SEQ ID NO: 227798 - DNA, 25 bp, SARS Virus
actgctacagttattgtggacatta

SEQ ID NO: 227799 - DNA, 25 bp, SARS Virus
ctgctacagtttatgtggacattac

SEQ ID NO: 227800 - DNA, 25 bp, SARS Virus
tgctacagttttagtggacattact

SEQ ID NO: 227801 - DNA, 25 bp, SARS Virus
gctacagtttttatggacattactc

SEQ ID NO: 227802 - DNA, 25 bp, SARS Virus
ctacagtttttgaggacattactct

SEQ ID NO: 227803 - DNA, 25 bp, SARS Virus
tacagtttttgtagacattactctt

SEQ ID NO: 227804 - DNA, 25 bp, SARS Virus
acagtttttgtgaacattactcttt

SEQ ID NO: 227805 - DNA, 25 bp, SARS Virus
cagtttttgtggacattactcttta

SEQ ID NO: 227806 - DNA, 25 bp, SARS Virus
agtttttgtggaaattactctttaa

SEQ ID NO: 227807 - DNA, 25 bp, SARS Virus
gtttttgtggacattactctttaaa

SEQ ID NO: 227808 - DNA, 25 bp, SARS Virus
tttttgtggacaatactctttaaac

SEQ ID NO: 227809 - DNA, 25 bp, SARS Virus
ttttgtggacataactctttaaact

SEQ ID NO: 227810 - DNA, 25 bp, SARS Virus
tttgtggacattactctttaaactc

SEQ ID NO: 227811 - DNA, 25 bp, SARS Virus
ttgtggacattaatctttaaactct

SEQ ID NO: 227812 - DNA, 25 bp, SARS Virus
tgtggacattacactttaaactctt

SEQ ID NO: 227813 - DNA, 25 bp, SARS Virus
gtggacattactatttaaactctta

SEQ ID NO: 227814 - DNA, 25 bp, SARS Virus
tggacattactcattaaactcttag

SEQ ID NO: 227815 - DNA, 25 bp, SARS Virus
ggacattactctataaactcttaga

SEQ ID NO: 227816 - DNA, 25 bp, SARS Virus
gacattactcttaaaactcttagag

SEQ ID NO: 227817 - DNA, 25 bp, SARS Virus
acattactctttaaactcttagagg

SEQ ID NO: 227818 - DNA, 25 bp, SARS Virus
cattactctttaaactcttagaggg

SEQ ID NO: 227819 - DNA, 25 bp, SARS Virus
attactctttaaactcttagagggt

SEQ ID NO: 227820 - DNA, 25 bp, SARS Virus
ttactctttaaaatcttagagggtt

SEQ ID NO: 227821 - DNA, 25 bp, SARS Virus
tactctttaaacacttagagggttc

SEQ ID NO: 227822 - DNA, 25 bp, SARS Virus
actctttaaactattagagggttcg

SEQ ID NO: 227823 - DNA, 25 bp, SARS Virus
ctctttaaactcatagagggttcgt

SEQ ID NO: 227824 - DNA, 25 bp, SARS Virus
tctttaaactctaagagggttcgta

SEQ ID NO: 227825 - DNA, 25 bp, SARS Virus
ctttaaactcttagagggttcgtag

SEQ ID NO: 227826 - DNA, 25 bp, SARS Virus
tttaaactcttaaagggttcgtagg

SEQ ID NO: 227827 - DNA, 25 bp, SARS Virus
ttaaactcttagagggttcgtagga

SEQ ID NO: 227828 - DNA, 25 bp, SARS Virus
taaactcttagaaggttcgtaggaa

SEQ ID NO: 227829 - DNA, 25 bp, SARS Virus
aaactcttagagagttcgtaggaac

SEQ ID NO: 227830 - DNA, 25 bp, SARS Virus
aactcttagaggattcgtaggaact

SEQ ID NO: 227831 - DNA, 25 bp, SARS Virus
actcttagagggatcgtaggaactc

SEQ ID NO: 227832 - DNA, 25 bp, SARS Virus
ctcttagagggtacgtaggaactct

SEQ ID NO: 227833 - DNA, 25 bp, SARS Virus
tcttagagggttagtaggaactctt

SEQ ID NO: 227834 - DNA, 25 bp, SARS Virus
cttagagggttcataggaactcttt

SEQ ID NO: 227835 - DNA, 25 bp, SARS Virus
ttagagggttcgaaggaactcttta

SEQ ID NO: 227836 - DNA, 25 bp, SARS Virus
tagagggttcgtaggaactctttaa

SEQ ID NO: 227837 - DNA, 25 bp, SARS Virus
agagggttcgtaagaactctttaag

SEQ ID NO: 227838 - DNA, 25 bp, SARS Virus
gagggttcgtagaaactctttaagt

SEQ ID NO: 227839 - DNA, 25 bp, SARS Virus
agggttcgtaggaactctttaagtt

SEQ ID NO: 227840 - DNA, 25 bp, SARS Virus
gggttcgtaggaactctttaagttg

SEQ ID NO: 227841 - DNA, 25 bp, SARS Virus
ggttcgtaggaaatctttaagttga

SEQ ID NO: 227842 - DNA, 25 bp, SARS Virus
gttcgtaggaacactttaagttgag

SEQ ID NO: 227843 - DNA, 25 bp, SARS Virus
ttcgtaggaactatttaagttgagg

SEQ ID NO: 227844 - DNA, 25 bp, SARS Virus
tcgtaggaactcattaagttgagga

SEQ ID NO: 227845 - DNA, 25 bp, SARS Virus
cgtaggaactctataagttgaggac

SEQ ID NO: 227846 - DNA, 25 bp, SARS Virus
gtaggaactcttaaagttgaggacg

SEQ ID NO: 227847 - DNA, 25 bp, SARS Virus
taggaactctttaagttgaggacgt

SEQ ID NO: 227848 - DNA, 25 bp, SARS Virus
aggaactctttaagttgaggacgtg

SEQ ID NO: 227849 - DNA, 25 bp, SARS Virus
ggaactctttaaattgaggacgtga

SEQ ID NO: 227850 - DNA, 25 bp, SARS Virus
gaactctttaagatgaggacgtgat

SEQ ID NO: 227851 - DNA, 25 bp, SARS Virus
aactctttaagtagaggacgtgatt

SEQ ID NO: 227852 - DNA, 25 bp, SARS Virus
actctttaagttaaggacgtgattc

SEQ ID NO: 227853 - DNA, 25 bp, SARS Virus
ctctttaagttgaggacgtgattca

SEQ ID NO: 227854 - DNA, 25 bp, SARS Virus
tctttaagttgaagacgtgattcaa

SEQ ID NO: 227855 - DNA, 25 bp, SARS Virus
ctttaagttgagaacgtgattcaaa

SEQ ID NO: 227856 - DNA, 25 bp, SARS Virus
tttaagttgaggacgtgattcaaag

SEQ ID NO: 227857 - DNA, 25 bp, SARS Virus
ttaagttgaggaagtgattcaaagc

SEQ ID NO: 227858 - DNA, 25 bp, SARS Virus
taagttgaggacatgattcaaagcg

SEQ ID NO: 227859 - DNA, 25 bp, SARS Virus
aagttgaggacgagattcaaagcgg

SEQ ID NO: 227860 - DNA, 25 bp, SARS Virus
agttgaggacgtaattcaaagcgga

SEQ ID NO: 227861 - DNA, 25 bp, SARS Virus
gttgaggacgtgattcaaagcggag

SEQ ID NO: 227862 - DNA, 25 bp, SARS Virus
ttgaggacgtgaatcaaagcggagt

SEQ ID NO: 227863 - DNA, 25 bp, SARS Virus
tgaggacgtgatacaaagcggagtt

SEQ ID NO: 227864 - DNA, 25 bp, SARS Virus
gaggacgtgattaaaagcggagtta

SEQ ID NO: 227865 - DNA, 25 bp, SARS Virus
aggacgtgattcaaagcggagttag

SEQ ID NO: 227866 - DNA, 25 bp, SARS Virus
ggacgtgattcaaagcggagttagg

SEQ ID NO: 227867 - DNA, 25 bp, SARS Virus
gacgtgattcaaagcggagttaggt

SEQ ID NO: 227868 - DNA, 25 bp, SARS Virus
acgtgattcaaaacggagttaggta

SEQ ID NO: 227869 - DNA, 25 bp, SARS Virus
cgtgattcaaagaggagttaggtaa

SEQ ID NO: 227870 - DNA, 25 bp, SARS Virus
gtgattcaaagcagagttaggtaag

SEQ ID NO: 227871 - DNA, 25 bp, SARS Virus
tgattcaaagcgaagttaggtaagt

SEQ ID NO: 227872 - DNA, 25 bp, SARS Virus
gattcaaagcggagttaggtaagtt

SEQ ID NO: 227873 - DNA, 25 bp, SARS Virus
attcaaagcggaattaggtaagttt

SEQ ID NO: 227874 - DNA, 25 bp, SARS Virus
ttcaaagcggagataggtaagtttc

SEQ ID NO: 227875 - DNA, 25 bp, SARS Virus
tcaaagcggagtaaggtaagtttct

SEQ ID NO: 227876 - DNA, 25 bp, SARS Virus
caaagcggagttaggtaagtttcta

SEQ ID NO: 227877 - DNA, 25 bp, SARS Virus
aaagcggagttaagtaagtttctat

SEQ ID NO: 227878 - DNA, 25 bp, SARS Virus
aagcggagttagataagtttctatc

SEQ ID NO: 227879 - DNA, 25 bp, SARS Virus
agcggagttaggaaagtttctatcc

SEQ ID NO: 227880 - DNA, 25 bp, SARS Virus
gcggagttaggtaagtttctatccg

SEQ ID NO: 227881 - DNA, 25 bp, SARS Virus
cggagttaggtaagtttctatccgg

SEQ ID NO: 227882 - DNA, 25 bp, SARS Virus
ggagttaggtaaatttctatccgga

SEQ ID NO: 227883 - DNA, 25 bp, SARS Virus
gagttaggtaagattctatccggac

SEQ ID NO: 227884 - DNA, 25 bp, SARS Virus
agttaggtaagtatctatccggact

SEQ ID NO: 227885 - DNA, 25 bp, SARS Virus
gttaggtaagttactatccggactc

SEQ ID NO: 227886 - DNA, 25 bp, SARS Virus
ttaggtaagtttatatccggactca

SEQ ID NO: 227887 - DNA, 25 bp, SARS Virus
taggtaagtttcaatccggactcaa

SEQ ID NO: 227888 - DNA, 25 bp, SARS Virus
aggtaagtttctatccggactcaaa

SEQ ID NO: 227889 - DNA, 25 bp, SARS Virus
ggtaagtttctaaccggactcaaaa

SEQ ID NO: 227890 - DNA, 25 bp, SARS Virus
gtaagtttctatacggactcaaaaa

SEQ ID NO: 227891 - DNA, 25 bp, SARS Virus
taagtttctatcaggactcaaaaag

SEQ ID NO: 227892 - DNA, 25 bp, SARS Virus
aagtttctatccagactcaaaaagt

SEQ ID NO: 227893 - DNA, 25 bp, SARS Virus
agtttctatccgaactcaaaaagtt

SEQ ID NO: 227894 - DNA, 25 bp, SARS Virus
gtttctatccggactcaaaaagttg

SEQ ID NO: 227895 - DNA, 25 bp, SARS Virus
tttctatccggaatcaaaaagttgt

SEQ ID NO: 227896 - DNA, 25 bp, SARS Virus
ttctatccggacacaaaaagttgtc

SEQ ID NO: 227897 - DNA, 25 bp, SARS Virus
tctatccggactaaaaaagttgtca

SEQ ID NO: 227898 - DNA, 25 bp, SARS Virus
ctatccggactcaaaaagttgtcat

SEQ ID NO: 227899 - DNA, 25 bp, SARS Virus
tatccggactcaaaaagttgtcatc

SEQ ID NO: 227900 - DNA, 25 bp, SARS Virus
atccggactcaaaaagttgtcatca

SEQ ID NO: 227901 - DNA, 25 bp, SARS Virus
tccggactcaaaaagttgtcatcac

SEQ ID NO: 227902 - DNA, 25 bp, SARS Virus
ccggactcaaaaagttgtcatcacg

SEQ ID NO: 227903 - DNA, 25 bp, SARS Virus
cggactcaaaaaattgtcatcacgg

SEQ ID NO: 227904 - DNA, 25 bp, SARS Virus
ggactcaaaaagatgtcatcacggg

SEQ ID NO: 227905 - DNA, 25 bp, SARS Virus
gactcaaaaagtagtcatcacgggt

SEQ ID NO: 227906 - DNA, 25 bp, SARS Virus
actcaaaaagttatcatcacgggtt

SEQ ID NO: 227907 - DNA, 25 bp, SARS Virus
ctcaaaaagttgacatcacgggttt

SEQ ID NO: 227908 - DNA, 25 bp, SARS Virus
tcaaaaagttgtaatcacgggtttt

SEQ ID NO: 227909 - DNA, 25 bp, SARS Virus
caaaaagttgtcatcacgggttttc

SEQ ID NO: 227910 - DNA, 25 bp, SARS Virus
aaaaagttgtcaacacgggttttct

SEQ ID NO: 227911 - DNA, 25 bp, SARS Virus
aaaagttgtcataacgggttttcta

SEQ ID NO: 227912 - DNA, 25 bp, SARS Virus
aaagttgtcatcacgggttttctaa

SEQ ID NO: 227913 - DNA, 25 bp, SARS Virus
aagttgtcatcaagggttttctaat

SEQ ID NO: 227914 - DNA, 25 bp, SARS Virus
agttgtcatcacaggttttctaatc

SEQ ID NO: 227915 - DNA, 25 bp, SARS Virus
gttgtcatcacgagttttctaatct

SEQ ID NO: 227916 - DNA, 25 bp, SARS Virus
ttgtcatcacggattttctaatctg

SEQ ID NO: 227917 - DNA, 25 bp, SARS Virus
tgtcatcacgggatttctaatctgt

SEQ ID NO: 227918 - DNA, 25 bp, SARS Virus
gtcatcacgggtattctaatctgtt

SEQ ID NO: 227919 - DNA, 25 bp, SARS Virus
tcatcacgggttatctaatctgttg

SEQ ID NO: 227920 - DNA, 25 bp, SARS Virus
catcacgggtttactaatctgttgg

SEQ ID NO: 227921 - DNA, 25 bp, SARS Virus
atcacgggttttataatctgttggt

SEQ ID NO: 227922 - DNA, 25 bp, SARS Virus
tcacgggttttcaaatctgttggtg

SEQ ID NO: 227923 - DNA, 25 bp, SARS Virus
cacgggttttctaatctgttggtga

SEQ ID NO: 227924 - DNA, 25 bp, SARS Virus
acgggttttctaatctgttggtgac

SEQ ID NO: 227925 - DNA, 25 bp, SARS Virus
cgggttttctaaactgttggtgact

SEQ ID NO: 227926 - DNA, 25 bp, SARS Virus
gggttttctaatatgttggtgactc

SEQ ID NO: 227927 - DNA, 25 bp, SARS Virus
ggttttctaatcagttggtgactct

SEQ ID NO: 227928 - DNA, 25 bp, SARS Virus
gttttctaatctattggtgactctt

SEQ ID NO: 227929 - DNA, 25 bp, SARS Virus
gttgctatcgagctaaacacttcga

SEQ ID NO: 227930 - DNA, 25 bp, SARS Virus
ttgctatcgaggcaaacacttcgat

SEQ ID NO: 227931 - DNA, 25 bp, SARS Virus
tgctatcgaggtcaacacttcgata

SEQ ID NO: 227932 - DNA, 25 bp, SARS Virus
gctatcgaggtacacacttcgatag

SEQ ID NO: 227933 - DNA, 25 bp, SARS Virus
ctatcgaggtaaccacttcgatagt

SEQ ID NO: 227934 - DNA, 25 bp, SARS Virus
tatcgaggtaaacacttcgatagtt

SEQ ID NO: 227935 - DNA, 25 bp, SARS Virus
atcgaggtaaacccttcgatagttg

SEQ ID NO: 227936 - DNA, 25 bp, SARS Virus
tcgaggtaaacacttcgatagttgc

SEQ ID NO: 227937 - DNA, 25 bp, SARS Virus
cgaggtaaacacctcgatagttgcc

SEQ ID NO: 227938 - DNA, 25 bp, SARS Virus
gaggtaaacactccgatagttgccc

SEQ ID NO: 227939 - DNA, 25 bp, SARS Virus
aggtaaacacttcgatagttgcccg

SEQ ID NO: 227940 - DNA, 25 bp, SARS Virus
ggtaaacacttccatagttgcccgc

SEQ ID NO: 227941 - DNA, 25 bp, SARS Virus
gtaaacacttcgctagttgcccgca

SEQ ID NO: 227942 - DNA, 25 bp, SARS Virus
taaacacttcgacagttgcccgcag

SEQ ID NO: 227943 - DNA, 25 bp, SARS Virus
aaacacttcgatcgttgcccgcaga

SEQ ID NO: 227944 - DNA, 25 bp, SARS Virus
aacacttcgatacttgcccgcagag

SEQ ID NO: 227945 - DNA, 25 bp, SARS Virus
acacttcgatagctgcccgcagagc

SEQ ID NO: 227946 - DNA, 25 bp, SARS Virus
cacttcgatagtcgcccgcagagct

SEQ ID NO: 227947 - DNA, 25 bp, SARS Virus
acttcgatagttccccgcagagctc

SEQ ID NO: 227948 - DNA, 25 bp, SARS Virus
cttcgatagttgcccgcagagctca

SEQ ID NO: 227949 - DNA, 25 bp, SARS Virus
ttcgatagttgcccgcagagctcac

SEQ ID NO: 227950 - DNA, 25 bp, SARS Virus
tcgatagttgcccgcagagctcacg

SEQ ID NO: 227951 - DNA, 25 bp, SARS Virus
cgatagttgcccccagagctcacga

SEQ ID NO: 227952 - DNA, 25 bp, SARS Virus
gatagttgcccgcagagctcacgaa

SEQ ID NO: 227953 - DNA, 25 bp, SARS Virus
atagttgcccgccgagctcacgaag

SEQ ID NO: 227954 - DNA, 25 bp, SARS Virus
tagttgcccgcacagctcacgaagc

SEQ ID NO: 227955 - DNA, 25 bp, SARS Virus
agttgcccgcagcgctcacgaagct

SEQ ID NO: 227956 - DNA, 25 bp, SARS Virus
gttgcccgcagacctcacgaagctc

SEQ ID NO: 227957 - DNA, 25 bp, SARS Virus
ttgcccgcagagctcacgaagctca

SEQ ID NO: 227958 - DNA, 25 bp, SARS Virus
tgcccgcagagcccacgaagctcaa

SEQ ID NO: 227959 - DNA, 25 bp, SARS Virus
gcccgcagagctcacgaagctcaag

SEQ ID NO: 227960 - DNA, 25 bp, SARS Virus
cccgcagagctcccgaagctcaagt

SEQ ID NO: 227961 - DNA, 25 bp, SARS Virus
ccgcagagctcacgaagctcaagtg

SEQ ID NO: 227962 - DNA, 25 bp, SARS Virus
cgcagagctcaccaagctcaagtgg

SEQ ID NO: 227963 - DNA, 25 bp, SARS Virus
gcagagctcacgcagctcaagtggc

SEQ ID NO: 227964 - DNA, 25 bp, SARS Virus
cagagctcacgacgctcaagtggca

SEQ ID NO: 227965 - DNA, 25 bp, SARS Virus
agagctcacgaacctcaagtggcaa

SEQ ID NO: 227966 - DNA, 25 bp, SARS Virus
gagctcacgaagctcaagtggcaag

SEQ ID NO: 227967 - DNA, 25 bp, SARS Virus
agctcacgaagcccaagtggcaaga

SEQ ID NO: 227968 - DNA, 25 bp, SARS Virus
gctcacgaagctcaagtggcaagaa

SEQ ID NO: 227969 - DNA, 25 bp, SARS Virus
ctcacgaagctccagtggcaagaac

SEQ ID NO: 227970 - DNA, 25 bp, SARS Virus
tcacgaagctcacgtggcaagaact

SEQ ID NO: 227971 - DNA, 25 bp, SARS Virus
cacgaagctcaactggcaagaactc

SEQ ID NO: 227972 - DNA, 25 bp, SARS Virus
acgaagctcaagcggcaagaactct

SEQ ID NO: 227973 - DNA, 25 bp, SARS Virus
cgaagctcaagtcgcaagaactctt

SEQ ID NO: 227974 - DNA, 25 bp, SARS Virus
gaagctcaagtgccaagaactcttg

SEQ ID NO: 227975 - DNA, 25 bp, SARS Virus
aagctcaagtggcaagaactcttgt

SEQ ID NO: 227976 - DNA, 25 bp, SARS Virus
agctcaagtggccagaactcttgtt

SEQ ID NO: 227977 - DNA, 25 bp, SARS Virus
gctcaagtggcacgaactcttgttg

SEQ ID NO: 227978 - DNA, 25 bp, SARS Virus
ctcaagtggcaacaactcttgttgg

SEQ ID NO: 227979 - DNA, 25 bp, SARS Virus
tcaagtggcaagcactcttgttgga

SEQ ID NO: 227980 - DNA, 25 bp, SARS Virus
caagtggcaagacctcttgttggag

SEQ ID NO: 227981 - DNA, 25 bp, SARS Virus
aagtggcaagaactcttgttggagg

SEQ ID NO: 227982 - DNA, 25 bp, SARS Virus
agtggcaagaacccttgttggagga

SEQ ID NO: 227983 - DNA, 25 bp, SARS Virus
gtggcaagaactcttgttggaggag

SEQ ID NO: 227984 - DNA, 25 bp, SARS Virus
tggcaagaactcctgttggaggagt

SEQ ID NO: 227985 - DNA, 25 bp, SARS Virus
ggcaagaactctcgttggaggagtc

SEQ ID NO: 227986 - DNA, 25 bp, SARS Virus
gcaagaactcttcttggaggagtct

SEQ ID NO: 227987 - DNA, 25 bp, SARS Virus
caagaactcttgctggaggagtctc

SEQ ID NO: 227988 - DNA, 25 bp, SARS Virus
aagaactcttgtcggaggagtctcc

SEQ ID NO: 227989 - DNA, 25 bp, SARS Virus
agaactcttgttcgaggagtctcca

SEQ ID NO: 227990 - DNA, 25 bp, SARS Virus
gaactcttgttgcaggagtctccat

SEQ ID NO: 227991 - DNA, 25 bp, SARS Virus
aactcttgttggcggagtctccatt

SEQ ID NO: 227992 - DNA, 25 bp, SARS Virus
actcttgttggacgagtctccattc

SEQ ID NO: 227993 - DNA, 25 bp, SARS Virus
ctcttgttggagcagtctccattca

SEQ ID NO: 227994 - DNA, 25 bp, SARS Virus
tcttgttggaggcgtctccattcat

SEQ ID NO: 227995 - DNA, 25 bp, SARS Virus
cttgttggaggactctccattcatg

SEQ ID NO: 227996 - DNA, 25 bp, SARS Virus
ttgttggaggagcctccattcatga

SEQ ID NO: 227997 - DNA, 25 bp, SARS Virus
tgttggaggagtctccattcatgac

SEQ ID NO: 227998 - DNA, 25 bp, SARS Virus
gttggaggagtccccattcatgaca

SEQ ID NO: 227999 - DNA, 25 bp, SARS Virus
ttggaggagtctccattcatgacac

SEQ ID NO: 228000 - DNA, 25 bp, SARS Virus
tggaggagtctccattcatgacaca

SEQ ID NO: 228001 - DNA, 25 bp, SARS Virus
ggaggagtctcccttcatgacacag

SEQ ID NO: 228002 - DNA, 25 bp, SARS Virus
gaggagtctccactcatgacacagt

SEQ ID NO: 228003 - DNA, 25 bp, SARS Virus
aggagtctccatccatgacacagta

SEQ ID NO: 228004 - DNA, 25 bp, SARS Virus
ggagtctccattcatgacacagtac

SEQ ID NO: 228005 - DNA, 25 bp, SARS Virus
gagtctccattcctgacacagtaca

SEQ ID NO: 228006 - DNA, 25 bp, SARS Virus
agtctccattcacgacacagtacac

SEQ ID NO: 228007 - DNA, 25 bp, SARS Virus
gtctccattcatcacacagtacact

SEQ ID NO: 228008 - DNA, 25 bp, SARS Virus
tctccattcatgccacagtacactt

SEQ ID NO: 228009 - DNA, 25 bp, SARS Virus
ctccattcatgacacagtacactta

SEQ ID NO: 228010 - DNA, 25 bp, SARS Virus
tccattcatgacccagtacacttag

SEQ ID NO: 228011 - DNA, 25 bp, SARS Virus
ccattcatgacacagtacacttagt

SEQ ID NO: 228012 - DNA, 25 bp, SARS Virus
cattcatgacaccgtacacttagtg

SEQ ID NO: 228013 - DNA, 25 bp, SARS Virus
attcatgacacactacacttagtgg

SEQ ID NO: 228014 - DNA, 25 bp, SARS Virus
ttcatgacacagcacacttagtgga

SEQ ID NO: 228015 - DNA, 25 bp, SARS Virus
tcatgacacagtccacttagtggaa

SEQ ID NO: 228016 - DNA, 25 bp, SARS Virus
catgacacagtacacttagtggaag

SEQ ID NO: 228017 - DNA, 25 bp, SARS Virus
atgacacagtacccttagtggaagt

SEQ ID NO: 228018 - DNA, 25 bp, SARS Virus
tgacacagtacacttagtggaagtt

SEQ ID NO: 228019 - DNA, 25 bp, SARS Virus
gacacagtacacctagtggaagttc

SEQ ID NO: 228020 - DNA, 25 bp, SARS Virus
acacagtacactcagtggaagttct

SEQ ID NO: 228021 - DNA, 25 bp, SARS Virus
cacagtacacttcgtggaagttctt

SEQ ID NO: 228022 - DNA, 25 bp, SARS Virus
acagtacacttactggaagttcttt

SEQ ID NO: 228023 - DNA, 25 bp, SARS Virus
cagtacacttagcggaagttctttc

SEQ ID NO: 228024 - DNA, 25 bp, SARS Virus
agtacacttagtcgaagttctttcc

SEQ ID NO: 228025 - DNA, 25 bp, SARS Virus
gtacacttagtgcaagttctttcca

SEQ ID NO: 228026 - DNA, 25 bp, SARS Virus
tacacttagtggcagttctttccaa

SEQ ID NO: 228027 - DNA, 25 bp, SARS Virus
acacttagtggacgttctttccaat

SEQ ID NO: 228028 - DNA, 25 bp, SARS Virus
cacttagtggaacttctttccaatg

SEQ ID NO: 228029 - DNA, 25 bp, SARS Virus
acttagtggaagctctttccaatga

SEQ ID NO: 228030 - DNA, 25 bp, SARS Virus
cttagtggaagtcctttccaatgaa

SEQ ID NO: 228031 - DNA, 25 bp, SARS Virus
ttagtggaagttctttccaatgaag

SEQ ID NO: 228032 - DNA, 25 bp, SARS Virus
tagtggaagttccttccaatgaaga

SEQ ID NO: 228033 - DNA, 25 bp, SARS Virus
agtggaagttctctccaatgaagaa

SEQ ID NO: 228034 - DNA, 25 bp, SARS Virus
gtggaagttcttcccaatgaagaaa

SEQ ID NO: 228035 - DNA, 25 bp, SARS Virus
tggaagttctttccaatgaagaaaa

SEQ ID NO: 228036 - DNA, 25 bp, SARS Virus
ggaagttctttccaatgaagaaaac

SEQ ID NO: 228037 - DNA, 25 bp, SARS Virus
gaagttctttcccatgaagaaaacc

SEQ ID NO: 228038 - DNA, 25 bp, SARS Virus
aagttctttccactgaagaaaacca

SEQ ID NO: 228039 - DNA, 25 bp, SARS Virus
agttctttccaacgaagaaaaccac

SEQ ID NO: 228040 - DNA, 25 bp, SARS Virus
gttctttccaatcaagaaaaccacg

SEQ ID NO: 228041 - DNA, 25 bp, SARS Virus
ttctttccaatgcagaaaaccacgg

SEQ ID NO: 228042 - DNA, 25 bp, SARS Virus
tctttccaatgacgaaaaccacgga

SEQ ID NO: 228043 - DNA, 25 bp, SARS Virus
ctttccaatgaacaaaaccacggaa

SEQ ID NO: 228044 - DNA, 25 bp, SARS Virus
tttccaatgaagcaaaccacggaat

SEQ ID NO: 228045 - DNA, 25 bp, SARS Virus
ttccaatgaagacaaccacggaatt

SEQ ID NO: 228046 - DNA, 25 bp, SARS Virus
tccaatgaagaacaccacggaattc

SEQ ID NO: 228047 - DNA, 25 bp, SARS Virus
ccaatgaagaaacccacggaattct

SEQ ID NO: 228048 - DNA, 25 bp, SARS Virus
caatgaagaaaaccacggaattctc

SEQ ID NO: 228049 - DNA, 25 bp, SARS Virus
aatgaagaaaaccacggaattctcc

SEQ ID NO: 228050 - DNA, 25 bp, SARS Virus
atgaagaaaaccccggaattctccg

SEQ ID NO: 228051 - DNA, 25 bp, SARS Virus
tgaagaaaaccacggaattctccgt

SEQ ID NO: 228052 - DNA, 25 bp, SARS Virus
gaagaaaaccaccgaattctccgta

SEQ ID NO: 228053 - DNA, 25 bp, SARS Virus
aagaaaaccacgcaattctccgtac

SEQ ID NO: 228054 - DNA, 25 bp, SARS Virus
agaaaaccacggcattctccgtact

SEQ ID NO: 228055 - DNA, 25 bp, SARS Virus
gaaaaccacggacttctccgtactc

SEQ ID NO: 228056 - DNA, 25 bp, SARS Virus
aaaaccacggaactctccgtactca

SEQ ID NO: 228057 - DNA, 25 bp, SARS Virus
aaaccacggaatcctccgtactcat

SEQ ID NO: 228058 - DNA, 25 bp, SARS Virus
aaccacggaattctccgtactcatc

SEQ ID NO: 228059 - DNA, 25 bp, SARS Virus
accacggaattccccgtactcatca

SEQ ID NO: 228060 - DNA, 25 bp, SARS Virus
ccacggaattctccgtactcatcaa

SEQ ID NO: 228061 - DNA, 25 bp, SARS Virus
cacggaattctccgtactcatcaac

SEQ ID NO: 228062 - DNA, 25 bp, SARS Virus
acggaattctccctactcatcaacg

SEQ ID NO: 228063 - DNA, 25 bp, SARS Virus
cggaattctccgcactcatcaacgt

SEQ ID NO: 228064 - DNA, 25 bp, SARS Virus
ggaattctccgtcctcatcaacgtc

SEQ ID NO: 228065 - DNA, 25 bp, SARS Virus
gaattctccgtactcatcaacgtcg

SEQ ID NO: 228066 - DNA, 25 bp, SARS Virus
aattctccgtacccatcaacgtcga

SEQ ID NO: 228067 - DNA, 25 bp, SARS Virus
attctccgtactcatcaacgtcgac

SEQ ID NO: 228068 - DNA, 25 bp, SARS Virus
ttctccgtactcctcaacgtcgacg

SEQ ID NO: 228069 - DNA, 25 bp, SARS Virus
tctccgtactcaccaacgtcgacga

SEQ ID NO: 228070 - DNA, 25 bp, SARS Virus
ctccgtactcatcaacgtcgacgag

SEQ ID NO: 228071 - DNA, 25 bp, SARS Virus
tccgtactcatccacgtcgacgagg

SEQ ID NO: 228072 - DNA, 25 bp, SARS Virus
ccgtactcatcaccgtcgacgagga

SEQ ID NO: 228073 - DNA, 25 bp, SARS Virus
cgtactcatcaacgtcgacgaggaa

SEQ ID NO: 228074 - DNA, 25 bp, SARS Virus
gtactcatcaacctcgacgaggaac

SEQ ID NO: 228075 - DNA, 25 bp, SARS Virus
tactcatcaacgccgacgaggaacg

SEQ ID NO: 228076 - DNA, 25 bp, SARS Virus
actcatcaacgtcgacgaggaacgg

SEQ ID NO: 228077 - DNA, 25 bp, SARS Virus
ctcatcaacgtccacgaggaacggt

SEQ ID NO: 228078 - DNA, 25 bp, SARS Virus
tcatcaacgtcgccgaggaacggtg

SEQ ID NO: 228079 - DNA, 25 bp, SARS Virus
catcaacgtcgacgaggaacggtgc

SEQ ID NO: 228080 - DNA, 25 bp, SARS Virus
atcaacgtcgaccaggaacggtgca

SEQ ID NO: 228081 - DNA, 25 bp, SARS Virus
tcaacgtcgacgcggaacggtgcat

SEQ ID NO: 228082 - DNA, 25 bp, SARS Virus
caacgtcgacgacgaacggtgcata

SEQ ID NO: 228083 - DNA, 25 bp, SARS Virus
aacgtcgacgagcaacggtgcatat

SEQ ID NO: 228084 - DNA, 25 bp, SARS Virus
acgtcgacgaggcacggtgcatatg

SEQ ID NO: 228085 - DNA, 25 bp, SARS Virus
cgtcgacgaggaccggtgcatatgt

SEQ ID NO: 228086 - DNA, 25 bp, SARS Virus
gtcgacgaggaacggtgcatatgtg

SEQ ID NO: 228087 - DNA, 25 bp, SARS Virus
tcgacgaggaaccgtgcatatgtga

SEQ ID NO: 228088 - DNA, 25 bp, SARS Virus
cgacgaggaacgctgcatatgtgac

SEQ ID NO: 228089 - DNA, 25 bp, SARS Virus
gacgaggaacggcgcatatgtgact

SEQ ID NO: 228090 - DNA, 25 bp, SARS Virus
acgaggaacggtccatatgtgactg

SEQ ID NO: 228091 - DNA, 25 bp, SARS Virus
cgaggaacggtgcatatgtgactgc

SEQ ID NO: 228092 - DNA, 25 bp, SARS Virus
gaggaacggtgcctatgtgactgcc

SEQ ID NO: 228093 - DNA, 25 bp, SARS Virus
aggaacggtgcacatgtgactgcca

SEQ ID NO: 228094 - DNA, 25 bp, SARS Virus
ggaacggtgcatctgtgactgccat

SEQ ID NO: 228095 - DNA, 25 bp, SARS Virus
gaacggtgcatacgtgactgccatt

SEQ ID NO: 228096 - DNA, 25 bp, SARS Virus
aacggtgcatatctgactgccattt

SEQ ID NO: 228097 - DNA, 25 bp, SARS Virus
acggtgcatatgcgactgccatttc

SEQ ID NO: 228098 - DNA, 25 bp, SARS Virus
cggtgcatatgtcactgccatttca

SEQ ID NO: 228099 - DNA, 25 bp, SARS Virus
ggtgcatatgtgcctgccatttcag

SEQ ID NO: 228100 - DNA, 25 bp, SARS Virus
gtgcatatgtgactgccatttcagg

SEQ ID NO: 228101 - DNA, 25 bp, SARS Virus
tgcatatgtgaccgccatttcaggg

SEQ ID NO: 228102 - DNA, 25 bp, SARS Virus
gcatatgtgactcccatttcaggga

SEQ ID NO: 228103 - DNA, 25 bp, SARS Virus
catatgtgactgccatttcagggaa

SEQ ID NO: 228104 - DNA, 25 bp, SARS Virus
atatgtgactgccatttcagggaac

SEQ ID NO: 228105 - DNA, 25 bp, SARS Virus
tatgtgactgccctttcagggaacg

SEQ ID NO: 228106 - DNA, 25 bp, SARS Virus
atgtgactgccacttcagggaacga

SEQ ID NO: 228107 - DNA, 25 bp, SARS Virus
tgtgactgccatctcagggaacgaa

SEQ ID NO: 228108 - DNA, 25 bp, SARS Virus
gtgactgccattccagggaacgaaa

SEQ ID NO: 228109 - DNA, 25 bp, SARS Virus
tgactgccatttcagggaacgaaac

SEQ ID NO: 228110 - DNA, 25 bp, SARS Virus
gactgccatttccgggaacgaaact

SEQ ID NO: 228111 - DNA, 25 bp, SARS Virus
actgccatttcacggaacgaaactc

SEQ ID NO: 228112 - DNA, 25 bp, SARS Virus
ctgccatttcagcgaacgaaactcg

SEQ ID NO: 228113 - DNA, 25 bp, SARS Virus
tgccatttcaggcaacgaaactcgc

SEQ ID NO: 228114 - DNA, 25 bp, SARS Virus
gccatttcagggcacgaaactcgct

SEQ ID NO: 228115 - DNA, 25 bp, SARS Virus
ccatttcagggaccgaaactcgcta

SEQ ID NO: 228116 - DNA, 25 bp, SARS Virus
catttcagggaacgaaactcgctac

SEQ ID NO: 228117 - DNA, 25 bp, SARS Virus
atttcagggaaccaaactcgctact

SEQ ID NO: 228118 - DNA, 25 bp, SARS Virus
tttcagggaacgcaactcgctactt

SEQ ID NO: 228119 - DNA, 25 bp, SARS Virus
ttcagggaacgacactcgctacttc

SEQ ID NO: 228120 - DNA, 25 bp, SARS Virus
tcagggaacgaacctcgctacttct

SEQ ID NO: 228121 - DNA, 25 bp, SARS Virus
cagggaacgaaactcgctacttctg

SEQ ID NO: 228122 - DNA, 25 bp, SARS Virus
agggaacgaaacccgctacttctga

SEQ ID NO: 228123 - DNA, 25 bp, SARS Virus
gggaacgaaactcgctacttctgaa

SEQ ID NO: 228124 - DNA, 25 bp, SARS Virus
ggaacgaaactccctacttctgaag

SEQ ID NO: 228125 - DNA, 25 bp, SARS Virus
gaacgaaactcgctacttctgaagt

SEQ ID NO: 228126 - DNA, 25 bp, SARS Virus
aacgaaactcgccacttctgaagtg

SEQ ID NO: 228127 - DNA, 25 bp, SARS Virus
acgaaactcgctccttctgaagtgg

SEQ ID NO: 228128 - DNA, 25 bp, SARS Virus
cgaaactcgctacttctgaagtgga

SEQ ID NO: 228129 - DNA, 25 bp, SARS Virus
gaaactcgctacctctgaagtggat

SEQ ID NO: 228130 - DNA, 25 bp, SARS Virus
aaactcgctactcctgaagtggatt

SEQ ID NO: 228131 - DNA, 25 bp, SARS Virus
aactcgctacttctgaagtggattc

SEQ ID NO: 228132 - DNA, 25 bp, SARS Virus
actcgctacttccgaagtggattca

SEQ ID NO: 228133 - DNA, 25 bp, SARS Virus
ctcgctacttctcaagtggattcaa

SEQ ID NO: 228134 - DNA, 25 bp, SARS Virus
tcgctacttctgcagtggattcaac

SEQ ID NO: 228135 - DNA, 25 bp, SARS Virus
cgctacttctgacgtggattcaact

SEQ ID NO: 228136 - DNA, 25 bp, SARS Virus
gctacttctgaactggattcaactc

SEQ ID NO: 228137 - DNA, 25 bp, SARS Virus
ctacttctgaagcggattcaactca

SEQ ID NO: 228138 - DNA, 25 bp, SARS Virus
tacttctgaagtcgattcaactcac

SEQ ID NO: 228139 - DNA, 25 bp, SARS Virus
acttctgaagtgcattcaactcact

SEQ ID NO: 228140 - DNA, 25 bp, SARS Virus
cttctgaagtggcttcaactcacta

SEQ ID NO: 228141 - DNA, 25 bp, SARS Virus
ttctgaagtggactcaactcactag

SEQ ID NO: 228142 - DNA, 25 bp, SARS Virus
tctgaagtggatccaactcactagc

SEQ ID NO: 228143 - DNA, 25 bp, SARS Virus
ctgaagtggattcaactcactagcg

SEQ ID NO: 228144 - DNA, 25 bp, SARS Virus
tgaagtggattccactcactagcgt

SEQ ID NO: 228145 - DNA, 25 bp, SARS Virus
gaagtggattcacctcactagcgtt

SEQ ID NO: 228146 - DNA, 25 bp, SARS Virus
aagtggattcaactcactagcgttg

SEQ ID NO: 228147 - DNA, 25 bp, SARS Virus
agtggattcaacccactagcgttga

SEQ ID NO: 228148 - DNA, 25 bp, SARS Virus
gtggattcaactcactagcgttgaa

SEQ ID NO: 228149 - DNA, 25 bp, SARS Virus
tggattcaactccctagcgttgaaa

SEQ ID NO: 228150 - DNA, 25 bp, SARS Virus
ggattcaactcactagcgttgaaac

SEQ ID NO: 228151 - DNA, 25 bp, SARS Virus
gattcaactcaccagcgttgaaacg

SEQ ID NO: 228152 - DNA, 25 bp, SARS Virus
attcaactcactcgcgttgaaacgc

SEQ ID NO: 228153 - DNA, 25 bp, SARS Virus
ttcaactcactaccgttgaaacgcg

SEQ ID NO: 228154 - DNA, 25 bp, SARS Virus
tcaactcactagcgttgaaacgcgg

SEQ ID NO: 228155 - DNA, 25 bp, SARS Virus
caactcactagccttgaaacgcggt

SEQ ID NO: 228156 - DNA, 25 bp, SARS Virus
aactcactagcgctgaaacgcggtc

SEQ ID NO: 228157 - DNA, 25 bp, SARS Virus
actcactagcgtcgaaacgcggtcg

SEQ ID NO: 228158 - DNA, 25 bp, SARS Virus
ctcactagcgttcaaacgcggtcgc

SEQ ID NO: 228159 - DNA, 25 bp, SARS Virus
tcactagcgttgcaacgcggtcgct

SEQ ID NO: 228160 - DNA, 25 bp, SARS Virus
cactagcgttgacacgcggtcgcta

SEQ ID NO: 228161 - DNA, 25 bp, SARS Virus
actagcgttgaaccgcggtcgctat

SEQ ID NO: 228162 - DNA, 25 bp, SARS Virus
ctagcgttgaaacgcggtcgctatc

SEQ ID NO: 228163 - DNA, 25 bp, SARS Virus
tagcgttgaaacccggtcgctatca

SEQ ID NO: 228164 - DNA, 25 bp, SARS Virus
agcgttgaaacgcggtcgctatcac

SEQ ID NO: 228165 - DNA, 25 bp, SARS Virus
gcgttgaaacgccgtcgctatcact

SEQ ID NO: 228166 - DNA, 25 bp, SARS Virus
cgttgaaacgcgctcgctatcactg

SEQ ID NO: 228167 - DNA, 25 bp, SARS Virus
gttgaaacgcggccgctatcactga

SEQ ID NO: 228168 - DNA, 25 bp, SARS Virus
ttgaaacgcggtcgctatcactgaa

SEQ ID NO: 228169 - DNA, 25 bp, SARS Virus
tgaaacgcggtccctatcactgaac

SEQ ID NO: 228170 - DNA, 25 bp, SARS Virus
gaaacgcggtcgctatcactgaact

SEQ ID NO: 228171 - DNA, 25 bp, SARS Virus
aaacgcggtcgccatcactgaacta

SEQ ID NO: 228172 - DNA, 25 bp, SARS Virus
aacgcggtcgctctcactgaactag

SEQ ID NO: 228173 - DNA, 25 bp, SARS Virus
acgcggtcgctaccactgaactagt

SEQ ID NO: 228174 - DNA, 25 bp, SARS Virus
cgcggtcgctatcactgaactagtt

SEQ ID NO: 228175 - DNA, 25 bp, SARS Virus
gcggtcgctatccctgaactagtta

SEQ ID NO: 228176 - DNA, 25 bp, SARS Virus
cggtcgctatcactgaactagttac

SEQ ID NO: 228177 - DNA, 25 bp, SARS Virus
ggtcgctatcaccgaactagttacg

SEQ ID NO: 228178 - DNA, 25 bp, SARS Virus
gtcgctatcactcaactagttacgt

SEQ ID NO: 228179 - DNA, 25 bp, SARS Virus
tcgctatcactgcactagttacgtg

SEQ ID NO: 228180 - DNA, 25 bp, SARS Virus
cgctatcactgacctagttacgtgt

SEQ ID NO: 228181 - DNA, 25 bp, SARS Virus
gctatcactgaactagttacgtgta

SEQ ID NO: 228182 - DNA, 25 bp, SARS Virus
ctatcactgaaccagttacgtgtaa

SEQ ID NO: 228183 - DNA, 25 bp, SARS Virus
tatcactgaactcgttacgtgtaaa

SEQ ID NO: 228184 - DNA, 25 bp, SARS Virus
atcactgaactacttacgtgtaaag

SEQ ID NO: 228185 - DNA, 25 bp, SARS Virus
tcactgaactagctacgtgtaaagc

SEQ ID NO: 228186 - DNA, 25 bp, SARS Virus
cactgaactagtcacgtgtaaagct

SEQ ID NO: 228187 - DNA, 25 bp, SARS Virus
actgaactagttccgtgtaaagctc

SEQ ID NO: 228188 - DNA, 25 bp, SARS Virus
ctgaactagttacgtgtaaagctca

SEQ ID NO: 228189 - DNA, 25 bp, SARS Virus
tgaactagttacctgtaaagctcac

SEQ ID NO: 228190 - DNA, 25 bp, SARS Virus
gaactagttacgcgtaaagctcacg

SEQ ID NO: 228191 - DNA, 25 bp, SARS Virus
aactagttacgtctaaagctcacgg

SEQ ID NO: 228192 - DNA, 25 bp, SARS Virus
actagttacgtgcaaagctcacgga

SEQ ID NO: 228193 - DNA, 25 bp, SARS Virus
ctagttacgtgtcaagctcacggaa

SEQ ID NO: 228194 - DNA, 25 bp, SARS Virus
tagttacgtgtacagctcacggaac

SEQ ID NO: 228195 - DNA, 25 bp, SARS Virus
agttacgtgtaacgctcacggaaca

SEQ ID NO: 228196 - DNA, 25 bp, SARS Virus
gttacgtgtaaacctcacggaacaa

SEQ ID NO: 228197 - DNA, 25 bp, SARS Virus
ttacgtgtaaagctcacggaacaat

SEQ ID NO: 228198 - DNA, 25 bp, SARS Virus
tacgtgtaaagcccacggaacaatt

SEQ ID NO: 228199 - DNA, 25 bp, SARS Virus
acgtgtaaagctcacggaacaattg

SEQ ID NO: 228200 - DNA, 25 bp, SARS Virus
cgtgtaaagctcccggaacaattgt

SEQ ID NO: 228201 - DNA, 25 bp, SARS Virus
gtgtaaagctcacggaacaattgtt

SEQ ID NO: 228202 - DNA, 25 bp, SARS Virus
tgtaaagctcaccgaacaattgttg

SEQ ID NO: 228203 - DNA, 25 bp, SARS Virus
gtaaagctcacgcaacaattgttgt

SEQ ID NO: 228204 - DNA, 25 bp, SARS Virus
taaagctcacggcacaattgttgta

SEQ ID NO: 228205 - DNA, 25 bp, SARS Virus
aaagctcacggaccaattgttgtag

SEQ ID NO: 228206 - DNA, 25 bp, SARS Virus
aagctcacggaacaattgttgtagt

SEQ ID NO: 228207 - DNA, 25 bp, SARS Virus
agctcacggaaccattgttgtagtt

SEQ ID NO: 228208 - DNA, 25 bp, SARS Virus
gctcacggaacacttgttgtagtta

SEQ ID NO: 228209 - DNA, 25 bp, SARS Virus
ctcacggaacaactgttgtagttac

SEQ ID NO: 228210 - DNA, 25 bp, SARS Virus
tcacggaacaatcgttgtagttact

SEQ ID NO: 228211 - DNA, 25 bp, SARS Virus
cacggaacaattcttgtagttactt

SEQ ID NO: 228212 - DNA, 25 bp, SARS Virus
acggaacaattgctgtagttacttc

SEQ ID NO: 228213 - DNA, 25 bp, SARS Virus
cggaacaattgtcgtagttacttcg

SEQ ID NO: 228214 - DNA, 25 bp, SARS Virus
ggaacaattgttctagttacttcgt

SEQ ID NO: 228215 - DNA, 25 bp, SARS Virus
gaacaattgttgcagttacttcgta

SEQ ID NO: 228216 - DNA, 25 bp, SARS Virus
aacaattgttgtcgttacttcgtaa

SEQ ID NO: 228217 - DNA, 25 bp, SARS Virus
acaattgttgtacttacttcgtaaa

SEQ ID NO: 228218 - DNA, 25 bp, SARS Virus
caattgttgtagctacttcgtaaaa

SEQ ID NO: 228219 - DNA, 25 bp, SARS Virus
aattgttgtagtcacttcgtaaaat

SEQ ID NO: 228220 - DNA, 25 bp, SARS Virus
attgttgtagttccttcgtaaaatg

SEQ ID NO: 228221 - DNA, 25 bp, SARS Virus
ttgttgtagttacttcgtaaaatgt

SEQ ID NO: 228222 - DNA, 25 bp, SARS Virus
tgttgtagttacctcgtaaaatgtg

SEQ ID NO: 228223 - DNA, 25 bp, SARS Virus
gttgtagttactccgtaaaatgtgt

SEQ ID NO: 228224 - DNA, 25 bp, SARS Virus
ttgtagttacttcgtaaaatgtgtt

SEQ ID NO: 228225 - DNA, 25 bp, SARS Virus
tgtagttacttcctaaaatgtgtta

SEQ ID NO: 228226 - DNA, 25 bp, SARS Virus
gtagttacttcgcaaaatgtgttag

SEQ ID NO: 228227 - DNA, 25 bp, SARS Virus
tagttacttcgtcaaatgtgttagg

SEQ ID NO: 228228 - DNA, 25 bp, SARS Virus
agttacttcgtacaatgtgttagga

SEQ ID NO: 228229 - DNA, 25 bp, SARS Virus
gttacttcgtaacatgtgttaggaa

SEQ ID NO: 228230 - DNA, 25 bp, SARS Virus
ttacttcgtaaactgtgttaggaac

SEQ ID NO: 228231 - DNA, 25 bp, SARS Virus
tacttcgtaaaacgtgttaggaact

SEQ ID NO: 228232 - DNA, 25 bp, SARS Virus
acttcgtaaaatctgttaggaacta

SEQ ID NO: 228233 - DNA, 25 bp, SARS Virus
cttcgtaaaatgcgttaggaactac

SEQ ID NO: 228234 - DNA, 25 bp, SARS Virus
ttcgtaaaatgtcttaggaactaca

SEQ ID NO: 228235 - DNA, 25 bp, SARS Virus
tcgtaaaatgtgctaggaactacaa

SEQ ID NO: 228236 - DNA, 25 bp, SARS Virus
cgtaaaatgtgtcaggaactacaat

SEQ ID NO: 228237 - DNA, 25 bp, SARS Virus
gtaaaatgtgttcggaactacaata

SEQ ID NO: 228238 - DNA, 25 bp, SARS Virus
taaaatgtgttacgaactacaatag

SEQ ID NO: 228239 - DNA, 25 bp, SARS Virus
aaaatgtgttagcaactacaataga

SEQ ID NO: 228240 - DNA, 25 bp, SARS Virus
aaatgtgttaggcactacaatagac

SEQ ID NO: 228241 - DNA, 25 bp, SARS Virus
aatgtgttaggacctacaatagact

SEQ ID NO: 228242 - DNA, 25 bp, SARS Virus
atgtgttaggaactacaatagactt

SEQ ID NO: 228243 - DNA, 25 bp, SARS Virus
tgtgttaggaaccacaatagacttc

SEQ ID NO: 228244 - DNA, 25 bp, SARS Virus
gtgttaggaactccaatagacttcg

SEQ ID NO: 228245 - DNA, 25 bp, SARS Virus
tgttaggaactacaatagacttcgt

SEQ ID NO: 228246 - DNA, 25 bp, SARS Virus
gttaggaactaccatagacttcgtt

SEQ ID NO: 228247 - DNA, 25 bp, SARS Virus
ttaggaactacactagacttcgttg

SEQ ID NO: 228248 - DNA, 25 bp, SARS Virus
taggaactacaacagacttcgttgg

SEQ ID NO: 228249 - DNA, 25 bp, SARS Virus
aggaactacaatcgacttcgttgga

SEQ ID NO: 228250 - DNA, 25 bp, SARS Virus
ggaactacaatacacttcgttggac

SEQ ID NO: 228251 - DNA, 25 bp, SARS Virus
gaactacaatagccttcgttggaca

SEQ ID NO: 228252 - DNA, 25 bp, SARS Virus
aactacaatagacttcgttggacat

SEQ ID NO: 228253 - DNA, 25 bp, SARS Virus
actacaatagacctcgttggacata

SEQ ID NO: 228254 - DNA, 25 bp, SARS Virus
ctacaatagactccgttggacataa

SEQ ID NO: 228255 - DNA, 25 bp, SARS Virus
tacaatagacttcgttggacataaa

SEQ ID NO: 228256 - DNA, 25 bp, SARS Virus
acaatagacttccttggacataaac

SEQ ID NO: 228257 - DNA, 25 bp, SARS Virus
caatagacttcgctggacataaact

SEQ ID NO: 228258 - DNA, 25 bp, SARS Virus
aatagacttcgtcggacataaactg

SEQ ID NO: 228259 - DNA, 25 bp, SARS Virus
atagacttcgttcgacataaactgg

SEQ ID NO: 228260 - DNA, 25 bp, SARS Virus
tagacttcgttgcacataaactggg

SEQ ID NO: 228261 - DNA, 25 bp, SARS Virus
agacttcgttggccataaactggga

SEQ ID NO: 228262 - DNA, 25 bp, SARS Virus
gacttcgttggacataaactgggaa

SEQ ID NO: 228263 - DNA, 25 bp, SARS Virus
acttcgttggacctaaactgggaac

SEQ ID NO: 228264 - DNA, 25 bp, SARS Virus
cttcgttggacacaaactgggaact

SEQ ID NO: 228265 - DNA, 25 bp, SARS Virus
ttcgttggacatcaactgggaactg

SEQ ID NO: 228266 - DNA, 25 bp, SARS Virus
tcgttggacatacactgggaactgc

SEQ ID NO: 228267 - DNA, 25 bp, SARS Virus
cgttggacataacctgggaactgct

SEQ ID NO: 228268 - DNA, 25 bp, SARS Virus
gttggacataaactgggaactgcta

SEQ ID NO: 228269 - DNA, 25 bp, SARS Virus
ttggacataaaccgggaactgctac

SEQ ID NO: 228270 - DNA, 25 bp, SARS Virus
tggacataaactcggaactgctaca

SEQ ID NO: 228271 - DNA, 25 bp, SARS Virus
ggacataaactgcgaactgctacag

SEQ ID NO: 228272 - DNA, 25 bp, SARS Virus
gacataaactggcaactgctacagt

SEQ ID NO: 228273 - DNA, 25 bp, SARS Virus
acataaactgggcactgctacagtt

SEQ ID NO: 228274 - DNA, 25 bp, SARS Virus
cataaactgggacctgctacagttt

SEQ ID NO: 228275 - DNA, 25 bp, SARS Virus
ataaactgggaactgctacagtttt

SEQ ID NO: 228276 - DNA, 25 bp, SARS Virus
taaactgggaaccgctacagttttt

SEQ ID NO: 228277 - DNA, 25 bp, SARS Virus
aaactgggaactcctacagtttttg

SEQ ID NO: 228278 - DNA, 25 bp, SARS Virus
aactgggaactgctacagtttttgt

SEQ ID NO: 228279 - DNA, 25 bp, SARS Virus
actgggaactgccacagtttttgtg

SEQ ID NO: 228280 - DNA, 25 bp, SARS Virus
ctgggaactgctccagtttttgtgg

SEQ ID NO: 228281 - DNA, 25 bp, SARS Virus
tgggaactgctacagtttttgtgga

SEQ ID NO: 228282 - DNA, 25 bp, SARS Virus
gggaactgctaccgtttttgtggac

SEQ ID NO: 228283 - DNA, 25 bp, SARS Virus
ggaactgctacactttttgtggaca

SEQ ID NO: 228284 - DNA, 25 bp, SARS Virus
gaactgctacagcttttgtggacat

SEQ ID NO: 228285 - DNA, 25 bp, SARS Virus
aactgctacagtctttgtggacatt

SEQ ID NO: 228286 - DNA, 25 bp, SARS Virus
actgctacagttcttgtggacatta

SEQ ID NO: 228287 - DNA, 25 bp, SARS Virus
ctgctacagtttctgtggacattac

SEQ ID NO: 228288 - DNA, 25 bp, SARS Virus
tgctacagttttcgtggacattact

SEQ ID NO: 228289 - DNA, 25 bp, SARS Virus
gctacagtttttctggacattactc

SEQ ID NO: 228290 - DNA, 25 bp, SARS Virus
ctacagtttttgcggacattactct

SEQ ID NO: 228291 - DNA, 25 bp, SARS Virus
tacagtttttgtcgacattactctt

SEQ ID NO: 228292 - DNA, 25 bp, SARS Virus
acagtttttgtgcacattactcttt

SEQ ID NO: 228293 - DNA, 25 bp, SARS Virus
cagtttttgtggccattactcttta

SEQ ID NO: 228294 - DNA, 25 bp, SARS Virus
agtttttgtggacattactctttaa

SEQ ID NO: 228295 - DNA, 25 bp, SARS Virus
gtttttgtggaccttactctttaaa

SEQ ID NO: 228296 - DNA, 25 bp, SARS Virus
tttttgtggacactactctttaaac

SEQ ID NO: 228297 - DNA, 25 bp, SARS Virus
ttttgtggacatcactctttaaact

SEQ ID NO: 228298 - DNA, 25 bp, SARS Virus
tttgtggacattcctctttaaactc

SEQ ID NO: 228299 - DNA, 25 bp, SARS Virus
ttgtggacattactctttaaactct

SEQ ID NO: 228300 - DNA, 25 bp, SARS Virus
tgtggacattaccctttaaactctt

SEQ ID NO: 228301 - DNA, 25 bp, SARS Virus
gtggacattactctttaaactctta

SEQ ID NO: 228302 - DNA, 25 bp, SARS Virus
tggacattactccttaaactcttag

SEQ ID NO: 228303 - DNA, 25 bp, SARS Virus
ggacattactctctaaactcttaga

SEQ ID NO: 228304 - DNA, 25 bp, SARS Virus
gacattactcttcaaactcttagag

SEQ ID NO: 228305 - DNA, 25 bp, SARS Virus
acattactctttcaactcttagagg

SEQ ID NO: 228306 - DNA, 25 bp, SARS Virus
cattactctttacactcttagaggg

SEQ ID NO: 228307 - DNA, 25 bp, SARS Virus
attactctttaacctcttagagggt

SEQ ID NO: 228308 - DNA, 25 bp, SARS Virus
ttactctttaaactcttagagggtt

SEQ ID NO: 228309 - DNA, 25 bp, SARS Virus
tactctttaaacccttagagggttc

SEQ ID NO: 228310 - DNA, 25 bp, SARS Virus
actctttaaactcttagagggttcg

SEQ ID NO: 228311 - DNA, 25 bp, SARS Virus
ctctttaaactcctagagggttcgt

SEQ ID NO: 228312 - DNA, 25 bp, SARS Virus
tctttaaactctcagagggttcgta

SEQ ID NO: 228313 - DNA, 25 bp, SARS Virus
ctttaaactcttcgagggttcgtag

SEQ ID NO: 228314 - DNA, 25 bp, SARS Virus
tttaaactcttacagggttcgtagg

SEQ ID NO: 228315 - DNA, 25 bp, SARS Virus
ttaaactcttagcgggttcgtagga

SEQ ID NO: 228316 - DNA, 25 bp, SARS Virus
taaactcttagacggttcgtaggaa

SEQ ID NO: 228317 - DNA, 25 bp, SARS Virus
aaactcttagagcgttcgtaggaac

SEQ ID NO: 228318 - DNA, 25 bp, SARS Virus
aactcttagaggcttcgtaggaact

SEQ ID NO: 228319 - DNA, 25 bp, SARS Virus
actcttagagggctcgtaggaactc

SEQ ID NO: 228320 - DNA, 25 bp, SARS Virus
ctcttagagggtccgtaggaactct

SEQ ID NO: 228321 - DNA, 25 bp, SARS Virus
tcttagagggttcgtaggaactctt

SEQ ID NO: 228322 - DNA, 25 bp, SARS Virus
cttagagggttcctaggaactcttt

SEQ ID NO: 228323 - DNA, 25 bp, SARS Virus
ttagagggttcgcaggaactcttta

SEQ ID NO: 228324 - DNA, 25 bp, SARS Virus
tagagggttcgtcggaactctttaa

SEQ ID NO: 228325 - DNA, 25 bp, SARS Virus
agagggttcgtacgaactctttaag

SEQ ID NO: 228326 - DNA, 25 bp, SARS Virus
gagggttcgtagcaactctttaagt

SEQ ID NO: 228327 - DNA, 25 bp, SARS Virus
agggttcgtaggcactctttaagtt

SEQ ID NO: 228328 - DNA, 25 bp, SARS Virus
gggttcgtaggacctctttaagttg

SEQ ID NO: 228329 - DNA, 25 bp, SARS Virus
ggttcgtaggaactctttaagttga

SEQ ID NO: 228330 - DNA, 25 bp, SARS Virus
gttcgtaggaaccctttaagttgag

SEQ ID NO: 228331 - DNA, 25 bp, SARS Virus
ttcgtaggaactctttaagttgagg

SEQ ID NO: 228332 - DNA, 25 bp, SARS Virus
tcgtaggaactccttaagttgagga

SEQ ID NO: 228333 - DNA, 25 bp, SARS Virus
cgtaggaactctctaagttgaggac

SEQ ID NO: 228334 - DNA, 25 bp, SARS Virus
gtaggaactcttcaagttgaggacg

SEQ ID NO: 228335 - DNA, 25 bp, SARS Virus
taggaactctttcagttgaggacgt

SEQ ID NO: 228336 - DNA, 25 bp, SARS Virus
aggaactctttacgttgaggacgtg

SEQ ID NO: 228337 - DNA, 25 bp, SARS Virus
ggaactctttaacttgaggacgtga

SEQ ID NO: 228338 - DNA, 25 bp, SARS Virus
gaactctttaagctgaggacgtgat

SEQ ID NO: 228339 - DNA, 25 bp, SARS Virus
aactctttaagtcgaggacgtgatt

SEQ ID NO: 228340 - DNA, 25 bp, SARS Virus
actctttaagttcaggacgtgattc

SEQ ID NO: 228341 - DNA, 25 bp, SARS Virus
ctctttaagttgcggacgtgattca

SEQ ID NO: 228342 - DNA, 25 bp, SARS Virus
tctttaagttgacgacgtgattcaa

SEQ ID NO: 228343 - DNA, 25 bp, SARS Virus
ctttaagttgagcacgtgattcaaa

SEQ ID NO: 228344 - DNA, 25 bp, SARS Virus
tttaagttgaggccgtgattcaaag

SEQ ID NO: 228345 - DNA, 25 bp, SARS Virus
ttaagttgaggacgtgattcaaagc

SEQ ID NO: 228346 - DNA, 25 bp, SARS Virus
taagttgaggacctgattcaaagcg

SEQ ID NO: 228347 - DNA, 25 bp, SARS Virus
aagttgaggacgcgattcaaagcgg

SEQ ID NO: 228348 - DNA, 25 bp, SARS Virus
agttgaggacgtcattcaaagcgga

SEQ ID NO: 228349 - DNA, 25 bp, SARS Virus
gttgaggacgtgcttcaaagcggag

SEQ ID NO: 228350 - DNA, 25 bp, SARS Virus
ttgaggacgtgactcaaagcggagt

SEQ ID NO: 228351 - DNA, 25 bp, SARS Virus
tgaggacgtgatccaaagcggagtt

SEQ ID NO: 228352 - DNA, 25 bp, SARS Virus
gaggacgtgattcaaagcggagtta

SEQ ID NO: 228353 - DNA, 25 bp, SARS Virus
aggacgtgattccaagcggagttag

SEQ ID NO: 228354 - DNA, 25 bp, SARS Virus
ggacgtgattcacagcggagttagg

SEQ ID NO: 228355 - DNA, 25 bp, SARS Virus
gacgtgattcaacgcggagttaggt

SEQ ID NO: 228356 - DNA, 25 bp, SARS Virus
acgtgattcaaaccggagttaggta

SEQ ID NO: 228357 - DNA, 25 bp, SARS Virus
cgtgattcaaagcggagttaggtaa

SEQ ID NO: 228358 - DNA, 25 bp, SARS Virus
gtgattcaaagccgagttaggtaag

SEQ ID NO: 228359 - DNA, 25 bp, SARS Virus
tgattcaaagcgcagttaggtaagt

SEQ ID NO: 228360 - DNA, 25 bp, SARS Virus
gattcaaagcggcgttaggtaagtt

SEQ ID NO: 228361 - DNA, 25 bp, SARS Virus
attcaaagcggacttaggtaagttt

SEQ ID NO: 228362 - DNA, 25 bp, SARS Virus
ttcaaagcggagctaggtaagtttc

SEQ ID NO: 228363 - DNA, 25 bp, SARS Virus
tcaaagcggagtcaggtaagtttct

SEQ ID NO: 228364 - DNA, 25 bp, SARS Virus
caaagcggagttcggtaagtttcta

SEQ ID NO: 228365 - DNA, 25 bp, SARS Virus
aaagcggagttacgtaagtttctat

SEQ ID NO: 228366 - DNA, 25 bp, SARS Virus
aagcggagttagctaagtttctatc

SEQ ID NO: 228367 - DNA, 25 bp, SARS Virus
agcggagttaggcaagtttctatcc

SEQ ID NO: 228368 - DNA, 25 bp, SARS Virus
gcggagttaggtcagtttctatccg

SEQ ID NO: 228369 - DNA, 25 bp, SARS Virus
cggagttaggtacgtttctatccgg

SEQ ID NO: 228370 - DNA, 25 bp, SARS Virus
ggagttaggtaactttctatccgga

SEQ ID NO: 228371 - DNA, 25 bp, SARS Virus
gagttaggtaagcttctatccggac

SEQ ID NO: 228372 - DNA, 25 bp, SARS Virus
agttaggtaagtctctatccggact

SEQ ID NO: 228373 - DNA, 25 bp, SARS Virus
gttaggtaagttcctatccggactc

SEQ ID NO: 228374 - DNA, 25 bp, SARS Virus
ttaggtaagtttctatccggactca

SEQ ID NO: 228375 - DNA, 25 bp, SARS Virus
taggtaagtttccatccggactcaa

SEQ ID NO: 228376 - DNA, 25 bp, SARS Virus
aggtaagtttctctccggactcaaa

SEQ ID NO: 228377 - DNA, 25 bp, SARS Virus
ggtaagtttctacccggactcaaaa

SEQ ID NO: 228378 - DNA, 25 bp, SARS Virus
gtaagtttctatccggactcaaaaa

SEQ ID NO: 228379 - DNA, 25 bp, SARS Virus
taagtttctatccggactcaaaaag

SEQ ID NO: 228380 - DNA, 25 bp, SARS Virus
aagtttctatcccgactcaaaaagt

SEQ ID NO: 228381 - DNA, 25 bp, SARS Virus
agtttctatccgcactcaaaaagtt

SEQ ID NO: 228382 - DNA, 25 bp, SARS Virus
gtttctatccggcctcaaaaagttg

SEQ ID NO: 228383 - DNA, 25 bp, SARS Virus
tttctatccggactcaaaaagttgt

SEQ ID NO: 228384 - DNA, 25 bp, SARS Virus
ttctatccggacccaaaaagttgtc

SEQ ID NO: 228385 - DNA, 25 bp, SARS Virus
tctatccggactcaaaaagttgtca

SEQ ID NO: 228386 - DNA, 25 bp, SARS Virus
ctatccggactccaaaagttgtcat

SEQ ID NO: 228387 - DNA, 25 bp, SARS Virus
tatccggactcacaaagttgtcatc

SEQ ID NO: 228388 - DNA, 25 bp, SARS Virus
atccggactcaacaagttgtcatca

SEQ ID NO: 228389 - DNA, 25 bp, SARS Virus
tccggactcaaacagttgtcatcac

SEQ ID NO: 228390 - DNA, 25 bp, SARS Virus
ccggactcaaaacgttgtcatcacg

SEQ ID NO: 228391 - DNA, 25 bp, SARS Virus
cggactcaaaaacttgtcatcacgg

SEQ ID NO: 228392 - DNA, 25 bp, SARS Virus
ggactcaaaaagctgtcatcacggg

SEQ ID NO: 228393 - DNA, 25 bp, SARS Virus
gactcaaaaagtcgtcatcacgggt

SEQ ID NO: 228394 - DNA, 25 bp, SARS Virus
actcaaaaagttctcatcacgggtt

SEQ ID NO: 228395 - DNA, 25 bp, SARS Virus
ctcaaaaagttgccatcacgggttt

SEQ ID NO: 228396 - DNA, 25 bp, SARS Virus
tcaaaaagttgtcatcacgggtttt

SEQ ID NO: 228397 - DNA, 25 bp, SARS Virus
caaaaagttgtcctcacgggttttc

SEQ ID NO: 228398 - DNA, 25 bp, SARS Virus
aaaaagttgtcaccacgggttttct

SEQ ID NO: 228399 - DNA, 25 bp, SARS Virus
aaaagttgtcatcacgggttttcta

SEQ ID NO: 228400 - DNA, 25 bp, SARS Virus
aaagttgtcatcccgggttttctaa

SEQ ID NO: 228401 - DNA, 25 bp, SARS Virus
aagttgtcatcacgggttttctaat

SEQ ID NO: 228402 - DNA, 25 bp, SARS Virus
agttgtcatcaccggttttctaatc

SEQ ID NO: 228403 - DNA, 25 bp, SARS Virus
gttgtcatcacgcgttttctaatct

SEQ ID NO: 228404 - DNA, 25 bp, SARS Virus
ttgtcatcacggcttttctaatctg

SEQ ID NO: 228405 - DNA, 25 bp, SARS Virus
tgtcatcacgggctttctaatctgt

SEQ ID NO: 228406 - DNA, 25 bp, SARS Virus
gtcatcacgggtcttctaatctgtt

SEQ ID NO: 228407 - DNA, 25 bp, SARS Virus
tcatcacgggttctctaatctgttg

SEQ ID NO: 228408 - DNA, 25 bp, SARS Virus
catcacgggtttcctaatctgttgg

SEQ ID NO: 228409 - DNA, 25 bp, SARS Virus
atcacgggttttctaatctgttggt

SEQ ID NO: 228410 - DNA, 25 bp, SARS Virus
tcacgggttttccaatctgttggtg

SEQ ID NO: 228411 - DNA, 25 bp, SARS Virus
cacgggttttctcatctgttggtga

SEQ ID NO: 228412 - DNA, 25 bp, SARS Virus
acgggttttctactctgttggtgac

SEQ ID NO: 228413 - DNA, 25 bp, SARS Virus
cgggttttctaacctgttggtgact

SEQ ID NO: 228414 - DNA, 25 bp, SARS Virus
gggttttctaatctgttggtgactc

SEQ ID NO: 228415 - DNA, 25 bp, SARS Virus
ggttttctaatccgttggtgactct

SEQ ID NO: 228416 - DNA, 25 bp, SARS Virus
gttttctaatctcttggtgactctt

SEQ ID NO: 228417 - DNA, 25 bp, SARS Virus
gttgctatcgaggtaaacacttcga

SEQ ID NO: 228418 - DNA, 25 bp, SARS Virus
ttgctatcgagggaaacacttcgat

SEQ ID NO: 228419 - DNA, 25 bp, SARS Virus
tgctatcgaggtgaacacttcgata

SEQ ID NO: 228420 - DNA, 25 bp, SARS Virus
gctatcgaggtagacacttcgatag

SEQ ID NO: 228421 - DNA, 25 bp, SARS Virus
ctatcgaggtaagcacttcgatagt

SEQ ID NO: 228422 - DNA, 25 bp, SARS Virus
tatcgaggtaaagacttcgatagtt

SEQ ID NO: 228423 - DNA, 25 bp, SARS Virus
atcgaggtaaacgcttcgatagttg

SEQ ID NO: 228424 - DNA, 25 bp, SARS Virus
tcgaggtaaacagttcgatagttgc

SEQ ID NO: 228425 - DNA, 25 bp, SARS Virus
cgaggtaaacacgtcgatagttgcc

SEQ ID NO: 228426 - DNA, 25 bp, SARS Virus
gaggtaaacactgcgatagttgccc

SEQ ID NO: 228427 - DNA, 25 bp, SARS Virus
aggtaaacacttggatagttgcccg

SEQ ID NO: 228428 - DNA, 25 bp, SARS Virus
ggtaaacacttcgatagttgcccgc

SEQ ID NO: 228429 - DNA, 25 bp, SARS Virus
gtaaacacttcggtagttgcccgca

SEQ ID NO: 228430 - DNA, 25 bp, SARS Virus
taaacacttcgagagttgcccgcag

SEQ ID NO: 228431 - DNA, 25 bp, SARS Virus
aaacacttcgatggttgcccgcaga

SEQ ID NO: 228432 - DNA, 25 bp, SARS Virus
aacacttcgatagttgcccgcagag

SEQ ID NO: 228433 - DNA, 25 bp, SARS Virus
acacttcgataggtgcccgcagagc

SEQ ID NO: 228434 - DNA, 25 bp, SARS Virus
cacttcgatagtggcccgcagagct

SEQ ID NO: 228435 - DNA, 25 bp, SARS Virus
acttcgatagttgcccgcagagctc

SEQ ID NO: 228436 - DNA, 25 bp, SARS Virus
cttcgatagttggccgcagagctca

SEQ ID NO: 228437 - DNA, 25 bp, SARS Virus
ttcgatagttgcgcgcagagctcac

SEQ ID NO: 228438 - DNA, 25 bp, SARS Virus
tcgatagttgccggcagagctcacg

SEQ ID NO: 228439 - DNA, 25 bp, SARS Virus
cgatagttgcccgcagagctcacga

SEQ ID NO: 228440 - DNA, 25 bp, SARS Virus
gatagttgcccggagagctcacgaa

SEQ ID NO: 228441 - DNA, 25 bp, SARS Virus
atagttgcccgcggagctcacgaag

SEQ ID NO: 228442 - DNA, 25 bp, SARS Virus
tagttgcccgcagagctcacgaagc

SEQ ID NO: 228443 - DNA, 25 bp, SARS Virus
agttgcccgcagggctcacgaagct

SEQ ID NO: 228444 - DNA, 25 bp, SARS Virus
gttgcccgcagagctcacgaagctc

SEQ ID NO: 228445 - DNA, 25 bp, SARS Virus
ttgcccgcagaggtcacgaagctca

SEQ ID NO: 228446 - DNA, 25 bp, SARS Virus
tgcccgcagagcgcacgaagctcaa

SEQ ID NO: 228447 - DNA, 25 bp, SARS Virus
gcccgcagagctgacgaagctcaag

SEQ ID NO: 228448 - DNA, 25 bp, SARS Virus
cccgcagagctcgcgaagctcaagt

SEQ ID NO: 228449 - DNA, 25 bp, SARS Virus
ccgcagagctcaggaagctcaagtg

SEQ ID NO: 228450 - DNA, 25 bp, SARS Virus
cgcagagctcacgaagctcaagtgg

SEQ ID NO: 228451 - DNA, 25 bp, SARS Virus
gcagagctcacggagctcaagtggc

SEQ ID NO: 228452 - DNA, 25 bp, SARS Virus
cagagctcacgaggctcaagtggca

SEQ ID NO: 228453 - DNA, 25 bp, SARS Virus
agagctcacgaagctcaagtggcaa

SEQ ID NO: 228454 - DNA, 25 bp, SARS Virus
gagctcacgaaggtcaagtggcaag

SEQ ID NO: 228455 - DNA, 25 bp, SARS Virus
agctcacgaagcgcaagtggcaaga

SEQ ID NO: 228456 - DNA, 25 bp, SARS Virus
gctcacgaagctgaagtggcaagaa

SEQ ID NO: 228457 - DNA, 25 bp, SARS Virus
ctcacgaagctcgagtggcaagaac

SEQ ID NO: 228458 - DNA, 25 bp, SARS Virus
tcacgaagctcaggtggcaagaact

SEQ ID NO: 228459 - DNA, 25 bp, SARS Virus
cacgaagctcaagtggcaagaactc

SEQ ID NO: 228460 - DNA, 25 bp, SARS Virus
acgaagctcaaggggcaagaactct

SEQ ID NO: 228461 - DNA, 25 bp, SARS Virus
cgaagctcaagtggcaagaactctt

SEQ ID NO: 228462 - DNA, 25 bp, SARS Virus
gaagctcaagtggcaagaactcttg

SEQ ID NO: 228463 - DNA, 25 bp, SARS Virus
aagctcaagtgggaagaactcttgt

SEQ ID NO: 228464 - DNA, 25 bp, SARS Virus
agctcaagtggcgagaactcttgtt

SEQ ID NO: 228465 - DNA, 25 bp, SARS Virus
gctcaagtggcaggaactcttgttg

SEQ ID NO: 228466 - DNA, 25 bp, SARS Virus
ctcaagtggcaagaactcttgttgg

SEQ ID NO: 228467 - DNA, 25 bp, SARS Virus
tcaagtggcaaggactcttgttgga

SEQ ID NO: 228468 - DNA, 25 bp, SARS Virus
caagtggcaagagctcttgttggag

SEQ ID NO: 228469 - DNA, 25 bp, SARS Virus
aagtggcaagaagtcttgttggagg

SEQ ID NO: 228470 - DNA, 25 bp, SARS Virus
agtggcaagaacgcttgttggagga

SEQ ID NO: 228471 - DNA, 25 bp, SARS Virus
gtggcaagaactgttgttggaggag

SEQ ID NO: 228472 - DNA, 25 bp, SARS Virus
tggcaagaactcgtgttggaggagt

SEQ ID NO: 228473 - DNA, 25 bp, SARS Virus
ggcaagaactctggttggaggagtc

SEQ ID NO: 228474 - DNA, 25 bp, SARS Virus
gcaagaactcttgttggaggagtct

SEQ ID NO: 228475 - DNA, 25 bp, SARS Virus
caagaactcttggtggaggagtctc

SEQ ID NO: 228476 - DNA, 25 bp, SARS Virus
aagaactcttgtgggaggagtctcc

SEQ ID NO: 228477 - DNA, 25 bp, SARS Virus
agaactcttgttggaggagtctcca

SEQ ID NO: 228478 - DNA, 25 bp, SARS Virus
gaactcttgttggaggagtctccat

SEQ ID NO: 228479 - DNA, 25 bp, SARS Virus
aactcttgttgggggagtctccatt

SEQ ID NO: 228480 - DNA, 25 bp, SARS Virus
actcttgttggaggagtctccattc

SEQ ID NO: 228481 - DNA, 25 bp, SARS Virus
ctcttgttggaggagtctccattca

SEQ ID NO: 228482 - DNA, 25 bp, SARS Virus
tcttgttggaggggtctccattcat

SEQ ID NO: 228483 - DNA, 25 bp, SARS Virus
cttgttggaggagtctccattcatg

SEQ ID NO: 228484 - DNA, 25 bp, SARS Virus
ttgttggaggaggctccattcatga

SEQ ID NO: 228485 - DNA, 25 bp, SARS Virus
tgttggaggagtgtccattcatgac

SEQ ID NO: 228486 - DNA, 25 bp, SARS Virus
gttggaggagtcgccattcatgaca

SEQ ID NO: 228487 - DNA, 25 bp, SARS Virus
ttggaggagtctgcattcatgacac

SEQ ID NO: 228488 - DNA, 25 bp, SARS Virus
tggaggagtctcgattcatgacaca

SEQ ID NO: 228489 - DNA, 25 bp, SARS Virus
ggaggagtctccgttcatgacacag

SEQ ID NO: 228490 - DNA, 25 bp, SARS Virus
gaggagtctccagtcatgacacagt

SEQ ID NO: 228491 - DNA, 25 bp, SARS Virus
aggagtctccatgcatgacacagta

SEQ ID NO: 228492 - DNA, 25 bp, SARS Virus
ggagtctccattgatgacacagtac

SEQ ID NO: 228493 - DNA, 25 bp, SARS Virus
gagtctccattcgtgacacagtaca

SEQ ID NO: 228494 - DNA, 25 bp, SARS Virus
agtctccattcaggacacagtacac

SEQ ID NO: 228495 - DNA, 25 bp, SARS Virus
gtctccattcatgacacagtacact

SEQ ID NO: 228496 - DNA, 25 bp, SARS Virus
tctccattcatggcacagtacactt

SEQ ID NO: 228497 - DNA, 25 bp, SARS Virus
ctccattcatgagacagtacactta

SEQ ID NO: 228498 - DNA, 25 bp, SARS Virus
tccattcatgacgcagtacacttag

SEQ ID NO: 228499 - DNA, 25 bp, SARS Virus
ccattcatgacagagtacacttagt

SEQ ID NO: 228500 - DNA, 25 bp, SARS Virus
cattcatgacacggtacacttagtg

SEQ ID NO: 228501 - DNA, 25 bp, SARS Virus
attcatgacacagtacacttagtgg

SEQ ID NO: 228502 - DNA, 25 bp, SARS Virus
ttcatgacacaggacacttagtgga

SEQ ID NO: 228503 - DNA, 25 bp, SARS Virus
tcatgacacagtgcacttagtggaa

SEQ ID NO: 228504 - DNA, 25 bp, SARS Virus
catgacacagtagacttagtggaag

SEQ ID NO: 228505 - DNA, 25 bp, SARS Virus
atgacacagtacgcttagtggaagt

SEQ ID NO: 228506 - DNA, 25 bp, SARS Virus
tgacacagtacagttagtggaagtt

SEQ ID NO: 228507 - DNA, 25 bp, SARS Virus
gacacagtacacgtagtggaagttc

SEQ ID NO: 228508 - DNA, 25 bp, SARS Virus
acacagtacactgagtggaagttct

SEQ ID NO: 228509 - DNA, 25 bp, SARS Virus
cacagtacacttggtggaagttctt

SEQ ID NO: 228510 - DNA, 25 bp, SARS Virus
acagtacacttagtggaagttcttt

SEQ ID NO: 228511 - DNA, 25 bp, SARS Virus
cagtacacttaggggaagttctttc

SEQ ID NO: 228512 - DNA, 25 bp, SARS Virus
agtacacttagtggaagttctttcc

SEQ ID NO: 228513 - DNA, 25 bp, SARS Virus
gtacacttagtggaagttctttcca

SEQ ID NO: 228514 - DNA, 25 bp, SARS Virus
tacacttagtgggagttctttccaa

SEQ ID NO: 228515 - DNA, 25 bp, SARS Virus
acacttagtggaggttctttccaat

SEQ ID NO: 228516 - DNA, 25 bp, SARS Virus
cacttagtggaagttctttccaatg

SEQ ID NO: 228517 - DNA, 25 bp, SARS Virus
acttagtggaaggtctttccaatga

SEQ ID NO: 228518 - DNA, 25 bp, SARS Virus
cttagtggaagtgctttccaatgaa

SEQ ID NO: 228519 - DNA, 25 bp, SARS Virus
ttagtggaagttgtttccaatgaag

SEQ ID NO: 228520 - DNA, 25 bp, SARS Virus
tagtggaagttcgttccaatgaaga

SEQ ID NO: 228521 - DNA, 25 bp, SARS Virus
agtggaagttctgtccaatgaagaa

SEQ ID NO: 228522 - DNA, 25 bp, SARS Virus
gtggaagttcttgccaatgaagaaa

SEQ ID NO: 228523 - DNA, 25 bp, SARS Virus
tggaagttctttgcaatgaagaaaa

SEQ ID NO: 228524 - DNA, 25 bp, SARS Virus
ggaagttctttcgaatgaagaaaac

SEQ ID NO: 228525 - DNA, 25 bp, SARS Virus
gaagttctttccgatgaagaaaacc

SEQ ID NO: 228526 - DNA, 25 bp, SARS Virus
aagttctttccagtgaagaaaacca

SEQ ID NO: 228527 - DNA, 25 bp, SARS Virus
agttctttccaaggaagaaaaccac

SEQ ID NO: 228528 - DNA, 25 bp, SARS Virus
gttctttccaatgaagaaaaccacg

SEQ ID NO: 228529 - DNA, 25 bp, SARS Virus
ttctttccaatggagaaaaccacgg

SEQ ID NO: 228530 - DNA, 25 bp, SARS Virus
tctttccaatgaggaaaaccacgga

SEQ ID NO: 228531 - DNA, 25 bp, SARS Virus
ctttccaatgaagaaaaccacggaa

SEQ ID NO: 228532 - DNA, 25 bp, SARS Virus
tttccaatgaaggaaaccacggaat

SEQ ID NO: 228533 - DNA, 25 bp, SARS Virus
ttccaatgaagagaaccacggaatt

SEQ ID NO: 228534 - DNA, 25 bp, SARS Virus
tccaatgaagaagaccacggaattc

SEQ ID NO: 228535 - DNA, 25 bp, SARS Virus
ccaatgaagaaagccacggaattct

SEQ ID NO: 228536 - DNA, 25 bp, SARS Virus
caatgaagaaaagcacggaattctc

SEQ ID NO: 228537 - DNA, 25 bp, SARS Virus
aatgaagaaaacgacggaattctcc

SEQ ID NO: 228538 - DNA, 25 bp, SARS Virus
atgaagaaaaccgcggaattctccg

SEQ ID NO: 228539 - DNA, 25 bp, SARS Virus
tgaagaaaaccagggaattctccgt

SEQ ID NO: 228540 - DNA, 25 bp, SARS Virus
gaagaaaaccacggaattctccgta

SEQ ID NO: 228541 - DNA, 25 bp, SARS Virus
aagaaaaccacggaattctccgtac

SEQ ID NO: 228542 - DNA, 25 bp, SARS Virus
agaaaaccacgggattctccgtact

SEQ ID NO: 228543 - DNA, 25 bp, SARS Virus
gaaaaccacggagttctccgtactc

SEQ ID NO: 228544 - DNA, 25 bp, SARS Virus
aaaaccacggaagtctccgtactca

SEQ ID NO: 228545 - DNA, 25 bp, SARS Virus
aaaccacggaatgctccgtactcat

SEQ ID NO: 228546 - DNA, 25 bp, SARS Virus
aaccacggaattgtccgtactcatc

SEQ ID NO: 228547 - DNA, 25 bp, SARS Virus
accacggaattcgccgtactcatca

SEQ ID NO: 228548 - DNA, 25 bp, SARS Virus
ccacggaattctgcgtactcatcaa

SEQ ID NO: 228549 - DNA, 25 bp, SARS Virus
cacggaattctcggtactcatcaac

SEQ ID NO: 228550 - DNA, 25 bp, SARS Virus
acggaattctccgtactcatcaacg

SEQ ID NO: 228551 - DNA, 25 bp, SARS Virus
cggaattctccggactcatcaacgt

SEQ ID NO: 228552 - DNA, 25 bp, SARS Virus
ggaattctccgtgctcatcaacgtc

SEQ ID NO: 228553 - DNA, 25 bp, SARS Virus
gaattctccgtagtcatcaacgtcg

SEQ ID NO: 228554 - DNA, 25 bp, SARS Virus
aattctccgtacgcatcaacgtcga

SEQ ID NO: 228555 - DNA, 25 bp, SARS Virus
attctccgtactgatcaacgtcgac

SEQ ID NO: 228556 - DNA, 25 bp, SARS Virus
ttctccgtactcgtcaacgtcgacg

SEQ ID NO: 228557 - DNA, 25 bp, SARS Virus
tctccgtactcagcaacgtcgacga

SEQ ID NO: 228558 - DNA, 25 bp, SARS Virus
ctccgtactcatgaacgtcgacgag

SEQ ID NO: 228559 - DNA, 25 bp, SARS Virus
tccgtactcatcgacgtcgacgagg

SEQ ID NO: 228560 - DNA, 25 bp, SARS Virus
ccgtactcatcagcgtcgacgagga

SEQ ID NO: 228561 - DNA, 25 bp, SARS Virus
cgtactcatcaaggtcgacgaggaa

SEQ ID NO: 228562 - DNA, 25 bp, SARS Virus
gtactcatcaacgtcgacgaggaac

SEQ ID NO: 228563 - DNA, 25 bp, SARS Virus
tactcatcaacggcgacgaggaacg

SEQ ID NO: 228564 - DNA, 25 bp, SARS Virus
actcatcaacgtggacgaggaacgg

SEQ ID NO: 228565 - DNA, 25 bp, SARS Virus
ctcatcaacgtcgacgaggaacggt

SEQ ID NO: 228566 - DNA, 25 bp, SARS Virus
tcatcaacgtcggcgaggaacggtg

SEQ ID NO: 228567 - DNA, 25 bp, SARS Virus
catcaacgtcgaggaggaacggtgc

SEQ ID NO: 228568 - DNA, 25 bp, SARS Virus
atcaacgtcgacgaggaacggtgca

SEQ ID NO: 228569 - DNA, 25 bp, SARS Virus
tcaacgtcgacggggaacggtgcat

SEQ ID NO: 228570 - DNA, 25 bp, SARS Virus
caacgtcgacgaggaacggtgcata

SEQ ID NO: 228571 - DNA, 25 bp, SARS Virus
aacgtcgacgaggaacggtgcatat

SEQ ID NO: 228572 - DNA, 25 bp, SARS Virus
acgtcgacgagggacggtgcatatg

SEQ ID NO: 228573 - DNA, 25 bp, SARS Virus
cgtcgacgaggagcggtgcatatgt

SEQ ID NO: 228574 - DNA, 25 bp, SARS Virus
gtcgacgaggaagggtgcatatgtg

SEQ ID NO: 228575 - DNA, 25 bp, SARS Virus
tcgacgaggaacggtgcatatgtga

SEQ ID NO: 228576 - DNA, 25 bp, SARS Virus
cgacgaggaacggtgcatatgtgac

SEQ ID NO: 228577 - DNA, 25 bp, SARS Virus
gacgaggaacggggcatatgtgact

SEQ ID NO: 228578 - DNA, 25 bp, SARS Virus
acgaggaacggtgcatatgtgactg

SEQ ID NO: 228579 - DNA, 25 bp, SARS Virus
cgaggaacggtggatatgtgactgc

SEQ ID NO: 228580 - DNA, 25 bp, SARS Virus
gaggaacggtgcgtatgtgactgcc

SEQ ID NO: 228581 - DNA, 25 bp, SARS Virus
aggaacggtgcagatgtgactgcca

SEQ ID NO: 228582 - DNA, 25 bp, SARS Virus
ggaacggtgcatgtgtgactgccat

SEQ ID NO: 228583 - DNA, 25 bp, SARS Virus
gaacggtgcataggtgactgccatt

SEQ ID NO: 228584 - DNA, 25 bp, SARS Virus
aacggtgcatatgtgactgccattt

SEQ ID NO: 228585 - DNA, 25 bp, SARS Virus
acggtgcatatgggactgccatttc

SEQ ID NO: 228586 - DNA, 25 bp, SARS Virus
cggtgcatatgtgactgccatttca

SEQ ID NO: 228587 - DNA, 25 bp, SARS Virus
ggtgcatatgtggctgccatttcag

SEQ ID NO: 228588 - DNA, 25 bp, SARS Virus
gtgcatatgtgagtgccatttcagg

SEQ ID NO: 228589 - DNA, 25 bp, SARS Virus
tgcatatgtgacggccatttcaggg

SEQ ID NO: 228590 - DNA, 25 bp, SARS Virus
gcatatgtgactgccatttcaggga

SEQ ID NO: 228591 - DNA, 25 bp, SARS Virus
catatgtgactggcatttcagggaa

SEQ ID NO: 228592 - DNA, 25 bp, SARS Virus
atatgtgactgcgatttcagggaac

SEQ ID NO: 228593 - DNA, 25 bp, SARS Virus
tatgtgactgccgtttcagggaacg

SEQ ID NO: 228594 - DNA, 25 bp, SARS Virus
atgtgactgccagttcagggaacga

SEQ ID NO: 228595 - DNA, 25 bp, SARS Virus
tgtgactgccatgtcagggaacgaa

SEQ ID NO: 228596 - DNA, 25 bp, SARS Virus
gtgactgccattgcagggaacgaaa

SEQ ID NO: 228597 - DNA, 25 bp, SARS Virus
tgactgccatttgagggaacgaaac

SEQ ID NO: 228598 - DNA, 25 bp, SARS Virus
gactgccatttcggggaacgaaact

SEQ ID NO: 228599 - DNA, 25 bp, SARS Virus
actgccatttcagggaacgaaactc

SEQ ID NO: 228600 - DNA, 25 bp, SARS Virus
ctgccatttcagggaacgaaactcg

SEQ ID NO: 228601 - DNA, 25 bp, SARS Virus
tgccatttcagggaacgaaactcgc

SEQ ID NO: 228602 - DNA, 25 bp, SARS Virus
gccatttcaggggacgaaactcgct

SEQ ID NO: 228603 - DNA, 25 bp, SARS Virus
ccatttcagggagcgaaactcgcta

SEQ ID NO: 228604 - DNA, 25 bp, SARS Virus
catttcagggaaggaaactcgctac

SEQ ID NO: 228605 - DNA, 25 bp, SARS Virus
atttcagggaacgaaactcgctact

SEQ ID NO: 228606 - DNA, 25 bp, SARS Virus
tttcagggaacggaactcgctactt

SEQ ID NO: 228607 - DNA, 25 bp, SARS Virus
ttcagggaacgagactcgctacttc

SEQ ID NO: 228608 - DNA, 25 bp, SARS Virus
tcagggaacgaagctcgctacttct

SEQ ID NO: 228609 - DNA, 25 bp, SARS Virus
cagggaacgaaagtcgctacttctg

SEQ ID NO: 228610 - DNA, 25 bp, SARS Virus
agggaacgaaacgcgctacttctga

SEQ ID NO: 228611 - DNA, 25 bp, SARS Virus
gggaacgaaactggctacttctgaa

SEQ ID NO: 228612 - DNA, 25 bp, SARS Virus
ggaacgaaactcgctacttctgaag

SEQ ID NO: 228613 - DNA, 25 bp, SARS Virus
gaacgaaactcggtacttctgaagt

SEQ ID NO: 228614 - DNA, 25 bp, SARS Virus
aacgaaactcgcgacttctgaagtg

SEQ ID NO: 228615 - DNA, 25 bp, SARS Virus
acgaaactcgctgcttctgaagtgg

SEQ ID NO: 228616 - DNA, 25 bp, SARS Virus
cgaaactcgctagttctgaagtgga

SEQ ID NO: 228617 - DNA, 25 bp, SARS Virus
gaaactcgctacgtctgaagtggat

SEQ ID NO: 228618 - DNA, 25 bp, SARS Virus
aaactcgctactgctgaagtggatt

SEQ ID NO: 228619 - DNA, 25 bp, SARS Virus
aactcgctacttgtgaagtggattc

SEQ ID NO: 228620 - DNA, 25 bp, SARS Virus
actcgctacttcggaagtggattca

SEQ ID NO: 228621 - DNA, 25 bp, SARS Virus
ctcgctacttctgaagtggattcaa

SEQ ID NO: 228622 - DNA, 25 bp, SARS Virus
tcgctacttctggagtggattcaac

SEQ ID NO: 228623 - DNA, 25 bp, SARS Virus
cgctacttctgaggtggattcaact

SEQ ID NO: 228624 - DNA, 25 bp, SARS Virus
gctacttctgaagtggattcaactc

SEQ ID NO: 228625 - DNA, 25 bp, SARS Virus
ctacttctgaaggggattcaactca

SEQ ID NO: 228626 - DNA, 25 bp, SARS Virus
tacttctgaagtggattcaactcac

SEQ ID NO: 228627 - DNA, 25 bp, SARS Virus
acttctgaagtggattcaactcact

SEQ ID NO: 228628 - DNA, 25 bp, SARS Virus
cttctgaagtgggttcaactcacta

SEQ ID NO: 228629 - DNA, 25 bp, SARS Virus
ttctgaagtggagtcaactcactag

SEQ ID NO: 228630 - DNA, 25 bp, SARS Virus
tctgaagtggatgcaactcactagc

SEQ ID NO: 228631 - DNA, 25 bp, SARS Virus
ctgaagtggattgaactcactagcg

SEQ ID NO: 228632 - DNA, 25 bp, SARS Virus
tgaagtggattcgactcactagcgt

SEQ ID NO: 228633 - DNA, 25 bp, SARS Virus
gaagtggattcagctcactagcgtt

SEQ ID NO: 228634 - DNA, 25 bp, SARS Virus
aagtggattcaagtcactagcgttg

SEQ ID NO: 228635 - DNA, 25 bp, SARS Virus
agtggattcaacgcactagcgttga

SEQ ID NO: 228636 - DNA, 25 bp, SARS Virus
gtggattcaactgactagcgttgaa

SEQ ID NO: 228637 - DNA, 25 bp, SARS Virus
tggattcaactcgctagcgttgaaa

SEQ ID NO: 228638 - DNA, 25 bp, SARS Virus
ggattcaactcagtagcgttgaaac

SEQ ID NO: 228639 - DNA, 25 bp, SARS Virus
gattcaactcacgagcgttgaaacg

SEQ ID NO: 228640 - DNA, 25 bp, SARS Virus
attcaactcactggcgttgaaacgc

SEQ ID NO: 228641 - DNA, 25 bp, SARS Virus
ttcaactcactagcgttgaaacgcg

SEQ ID NO: 228642 - DNA, 25 bp, SARS Virus
tcaactcactagggttgaaacgcgg

SEQ ID NO: 228643 - DNA, 25 bp, SARS Virus
caactcactagcgttgaaacgcggt

SEQ ID NO: 228644 - DNA, 25 bp, SARS Virus
aactcactagcggtgaaacgcggtc

SEQ ID NO: 228645 - DNA, 25 bp, SARS Virus
actcactagcgtggaaacgcggtcg

SEQ ID NO: 228646 - DNA, 25 bp, SARS Virus
ctcactagcgttgaaacgcggtcgc

SEQ ID NO: 228647 - DNA, 25 bp, SARS Virus
tcactagcgttggaacgcggtcgct

SEQ ID NO: 228648 - DNA, 25 bp, SARS Virus
cactagcgttgagacgcggtcgcta

SEQ ID NO: 228649 - DNA, 25 bp, SARS Virus
actagcgttgaagcgcggtcgctat

SEQ ID NO: 228650 - DNA, 25 bp, SARS Virus
ctagcgttgaaaggcggtcgctatc

SEQ ID NO: 228651 - DNA, 25 bp, SARS Virus
tagcgttgaaacgcggtcgctatca

SEQ ID NO: 228652 - DNA, 25 bp, SARS Virus
agcgttgaaacggggtcgctatcac

SEQ ID NO: 228653 - DNA, 25 bp, SARS Virus
gcgttgaaacgcggtcgctatcact

SEQ ID NO: 228654 - DNA, 25 bp, SARS Virus
cgttgaaacgcggtcgctatcactg

SEQ ID NO: 228655 - DNA, 25 bp, SARS Virus
gttgaaacgcgggcgctatcactga

SEQ ID NO: 228656 - DNA, 25 bp, SARS Virus
ttgaaacgcggtggctatcactgaa

SEQ ID NO: 228657 - DNA, 25 bp, SARS Virus
tgaaacgcggtcgctatcactgaac

SEQ ID NO: 228658 - DNA, 25 bp, SARS Virus
gaaacgcggtcggtatcactgaact

SEQ ID NO: 228659 - DNA, 25 bp, SARS Virus
aaacgcggtcgcgatcactgaacta

SEQ ID NO: 228660 - DNA, 25 bp, SARS Virus
aacgcggtcgctgtcactgaactag

SEQ ID NO: 228661 - DNA, 25 bp, SARS Virus
acgcggtcgctagcactgaactagt

SEQ ID NO: 228662 - DNA, 25 bp, SARS Virus
cgcggtcgctatgactgaactagtt

SEQ ID NO: 228663 - DNA, 25 bp, SARS Virus
gcggtcgctatcgctgaactagtta

SEQ ID NO: 228664 - DNA, 25 bp, SARS Virus
cggtcgctatcagtgaactagttac

SEQ ID NO: 228665 - DNA, 25 bp, SARS Virus
ggtcgctatcacggaactagttacg

SEQ ID NO: 228666 - DNA, 25 bp, SARS Virus
gtcgctatcactgaactagttacgt

SEQ ID NO: 228667 - DNA, 25 bp, SARS Virus
tcgctatcactggactagttacgtg

SEQ ID NO: 228668 - DNA, 25 bp, SARS Virus
cgctatcactgagctagttacgtgt

SEQ ID NO: 228669 - DNA, 25 bp, SARS Virus
gctatcactgaagtagttacgtgta

SEQ ID NO: 228670 - DNA, 25 bp, SARS Virus
ctatcactgaacgagttacgtgtaa

SEQ ID NO: 228671 - DNA, 25 bp, SARS Virus
tatcactgaactggttacgtgtaaa

SEQ ID NO: 228672 - DNA, 25 bp, SARS Virus
atcactgaactagttacgtgtaaag

SEQ ID NO: 228673 - DNA, 25 bp, SARS Virus
tcactgaactaggtacgtgtaaagc

SEQ ID NO: 228674 - DNA, 25 bp, SARS Virus
cactgaactagtgacgtgtaaagct

SEQ ID NO: 228675 - DNA, 25 bp, SARS Virus
actgaactagttgcgtgtaaagctc

SEQ ID NO: 228676 - DNA, 25 bp, SARS Virus
ctgaactagttaggtgtaaagctca

SEQ ID NO: 228677 - DNA, 25 bp, SARS Virus
tgaactagttacgtgtaaagctcac

SEQ ID NO: 228678 - DNA, 25 bp, SARS Virus
gaactagttacgggtaaagctcacg

SEQ ID NO: 228679 - DNA, 25 bp, SARS Virus
aactagttacgtgtaaagctcacgg

SEQ ID NO: 228680 - DNA, 25 bp, SARS Virus
actagttacgtggaaagctcacgga

SEQ ID NO: 228681 - DNA, 25 bp, SARS Virus
ctagttacgtgtgaagctcacggaa

SEQ ID NO: 228682 - DNA, 25 bp, SARS Virus
tagttacgtgtagagctcacggaac

SEQ ID NO: 228683 - DNA, 25 bp, SARS Virus
agttacgtgtaaggctcacggaaca

SEQ ID NO: 228684 - DNA, 25 bp, SARS Virus
gttacgtgtaaagctcacggaacaa

SEQ ID NO: 228685 - DNA, 25 bp, SARS Virus
ttacgtgtaaaggtcacggaacaat

SEQ ID NO: 228686 - DNA, 25 bp, SARS Virus
tacgtgtaaagcgcacggaacaatt

SEQ ID NO: 228687 - DNA, 25 bp, SARS Virus
acgtgtaaagctgacggaacaattg

SEQ ID NO: 228688 - DNA, 25 bp, SARS Virus
cgtgtaaagctcgcggaacaattgt

SEQ ID NO: 228689 - DNA, 25 bp, SARS Virus
gtgtaaagctcagggaacaattgtt

SEQ ID NO: 228690 - DNA, 25 bp, SARS Virus
tgtaaagctcacggaacaattgttg

SEQ ID NO: 228691 - DNA, 25 bp, SARS Virus
gtaaagctcacggaacaattgttgt

SEQ ID NO: 228692 - DNA, 25 bp, SARS Virus
taaagctcacgggacaattgttgta

SEQ ID NO: 228693 - DNA, 25 bp, SARS Virus
aaagctcacggagcaattgttgtag

SEQ ID NO: 228694 - DNA, 25 bp, SARS Virus
aagctcacggaagaattgttgtagt

SEQ ID NO: 228695 - DNA, 25 bp, SARS Virus
agctcacggaacgattgttgtagtt

SEQ ID NO: 228696 - DNA, 25 bp, SARS Virus
gctcacggaacagttgttgtagtta

SEQ ID NO: 228697 - DNA, 25 bp, SARS Virus
ctcacggaacaagtgttgtagttac

SEQ ID NO: 228698 - DNA, 25 bp, SARS Virus
tcacggaacaatggttgtagttact

SEQ ID NO: 228699 - DNA, 25 bp, SARS Virus
cacggaacaattgttgtagttactt

SEQ ID NO: 228700 - DNA, 25 bp, SARS Virus
acggaacaattggtgtagttacttc

SEQ ID NO: 228701 - DNA, 25 bp, SARS Virus
cggaacaattgtggtagttacttcg

SEQ ID NO: 228702 - DNA, 25 bp, SARS Virus
ggaacaattgttgtagttacttcgt

SEQ ID NO: 228703 - DNA, 25 bp, SARS Virus
gaacaattgttggagttacttcgta

SEQ ID NO: 228704 - DNA, 25 bp, SARS Virus
aacaattgttgtggttacttcgtaa

SEQ ID NO: 228705 - DNA, 25 bp, SARS Virus
acaattgttgtagttacttcgtaaa

SEQ ID NO: 228706 - DNA, 25 bp, SARS Virus
caattgttgtaggtacttcgtaaaa

SEQ ID NO: 228707 - DNA, 25 bp, SARS Virus
aattgttgtagtgacttcgtaaaat

SEQ ID NO: 228708 - DNA, 25 bp, SARS Virus
attgttgtagttgcttcgtaaaatg

SEQ ID NO: 228709 - DNA, 25 bp, SARS Virus
ttgttgtagttagttcgtaaaatgt

SEQ ID NO: 228710 - DNA, 25 bp, SARS Virus
tgttgtagttacgtcgtaaaatgtg

SEQ ID NO: 228711 - DNA, 25 bp, SARS Virus
gttgtagttactgcgtaaaatgtgt

SEQ ID NO: 228712 - DNA, 25 bp, SARS Virus
ttgtagttacttggtaaaatgtgtt

SEQ ID NO: 228713 - DNA, 25 bp, SARS Virus
tgtagttacttcgtaaaatgtgtta

SEQ ID NO: 228714 - DNA, 25 bp, SARS Virus
gtagttacttcggaaaatgtgttag

SEQ ID NO: 228715 - DNA, 25 bp, SARS Virus
tagttacttcgtgaaatgtgttagg

SEQ ID NO: 228716 - DNA, 25 bp, SARS Virus
agttacttcgtagaatgtgttagga

SEQ ID NO: 228717 - DNA, 25 bp, SARS Virus
gttacttcgtaagatgtgttaggaa

SEQ ID NO: 228718 - DNA, 25 bp, SARS Virus
ttacttcgtaaagtgtgttaggaac

SEQ ID NO: 228719 - DNA, 25 bp, SARS Virus
tacttcgtaaaaggtgttaggaact

SEQ ID NO: 228720 - DNA, 25 bp, SARS Virus
acttcgtaaaatgtgttaggaacta

SEQ ID NO: 228721 - DNA, 25 bp, SARS Virus
cttcgtaaaatgggttaggaactac

SEQ ID NO: 228722 - DNA, 25 bp, SARS Virus
ttcgtaaaatgtgttaggaactaca

SEQ ID NO: 228723 - DNA, 25 bp, SARS Virus
tcgtaaaatgtggtaggaactacaa

SEQ ID NO: 228724 - DNA, 25 bp, SARS Virus
cgtaaaatgtgtgaggaactacaat

SEQ ID NO: 228725 - DNA, 25 bp, SARS Virus
gtaaaatgtgttgggaactacaata

SEQ ID NO: 228726 - DNA, 25 bp, SARS Virus
taaaatgtgttaggaactacaatag

SEQ ID NO: 228727 - DNA, 25 bp, SARS Virus
aaaatgtgttaggaactacaataga

SEQ ID NO: 228728 - DNA, 25 bp, SARS Virus
aaatgtgttagggactacaatagac

SEQ ID NO: 228729 - DNA, 25 bp, SARS Virus
aatgtgttaggagctacaatagact

SEQ ID NO: 228730 - DNA, 25 bp, SARS Virus
atgtgttaggaagtacaatagactt

SEQ ID NO: 228731 - DNA, 25 bp, SARS Virus
tgtgttaggaacgacaatagacttc

SEQ ID NO: 228732 - DNA, 25 bp, SARS Virus
gtgttaggaactgcaatagacttcg

SEQ ID NO: 228733 - DNA, 25 bp, SARS Virus
tgttaggaactagaatagacttcgt

SEQ ID NO: 228734 - DNA, 25 bp, SARS Virus
gttaggaactacgatagacttcgtt

SEQ ID NO: 228735 - DNA, 25 bp, SARS Virus
ttaggaactacagtagacttcgttg

SEQ ID NO: 228736 - DNA, 25 bp, SARS Virus
taggaactacaagagacttcgttgg

SEQ ID NO: 228737 - DNA, 25 bp, SARS Virus
aggaactacaatggacttcgttgga

SEQ ID NO: 228738 - DNA, 25 bp, SARS Virus
ggaactacaatagacttcgttggac

SEQ ID NO: 228739 - DNA, 25 bp, SARS Virus
gaactacaataggcttcgttggaca

SEQ ID NO: 228740 - DNA, 25 bp, SARS Virus
aactacaatagagttcgttggacat

SEQ ID NO: 228741 - DNA, 25 bp, SARS Virus
actacaatagacgtcgttggacata

SEQ ID NO: 228742 - DNA, 25 bp, SARS Virus
ctacaatagactgcgttggacataa

SEQ ID NO: 228743 - DNA, 25 bp, SARS Virus
tacaatagacttggttggacataaa

SEQ ID NO: 228744 - DNA, 25 bp, SARS Virus
acaatagacttcgttggacataaac

SEQ ID NO: 228745 - DNA, 25 bp, SARS Virus
caatagacttcggtggacataaact

SEQ ID NO: 228746 - DNA, 25 bp, SARS Virus
aatagacttcgtgggacataaactg

SEQ ID NO: 228747 - DNA, 25 bp, SARS Virus
atagacttcgttggacataaactgg

SEQ ID NO: 228748 - DNA, 25 bp, SARS Virus
tagacttcgttggacataaactggg

SEQ ID NO: 228749 - DNA, 25 bp, SARS Virus
agacttcgttgggcataaactggga

SEQ ID NO: 228750 - DNA, 25 bp, SARS Virus
gacttcgttggagataaactgggaa

SEQ ID NO: 228751 - DNA, 25 bp, SARS Virus
acttcgttggacgtaaactgggaac

SEQ ID NO: 228752 - DNA, 25 bp, SARS Virus
cttcgttggacagaaactgggaact

SEQ ID NO: 228753 - DNA, 25 bp, SARS Virus
ttcgttggacatgaactgggaactg

SEQ ID NO: 228754 - DNA, 25 bp, SARS Virus
tcgttggacatagactgggaactgc

SEQ ID NO: 228755 - DNA, 25 bp, SARS Virus
cgttggacataagctgggaactgct

SEQ ID NO: 228756 - DNA, 25 bp, SARS Virus
gttggacataaagtgggaactgcta

SEQ ID NO: 228757 - DNA, 25 bp, SARS Virus
ttggacataaacggggaactgctac

SEQ ID NO: 228758 - DNA, 25 bp, SARS Virus
tggacataaactgggaactgctaca

SEQ ID NO: 228759 - DNA, 25 bp, SARS Virus
ggacataaactgggaactgctacag

SEQ ID NO: 228760 - DNA, 25 bp, SARS Virus
gacataaactgggaactgctacagt

SEQ ID NO: 228761 - DNA, 25 bp, SARS Virus
acataaactggggactgctacagtt

SEQ ID NO: 228762 - DNA, 25 bp, SARS Virus
cataaactgggagctgctacagttt

SEQ ID NO: 228763 - DNA, 25 bp, SARS Virus
ataaactgggaagtgctacagtttt

SEQ ID NO: 228764 - DNA, 25 bp, SARS Virus
taaactgggaacggctacagttttt

SEQ ID NO: 228765 - DNA, 25 bp, SARS Virus
aaactgggaactgctacagtttttg

SEQ ID NO: 228766 - DNA, 25 bp, SARS Virus
aactgggaactggtacagtttttgt

SEQ ID NO: 228767 - DNA, 25 bp, SARS Virus
actgggaactgcgacagtttttgtg

SEQ ID NO: 228768 - DNA, 25 bp, SARS Virus
ctgggaactgctgcagtttttgtgg

SEQ ID NO: 228769 - DNA, 25 bp, SARS Virus
tgggaactgctagagtttttgtgga

SEQ ID NO: 228770 - DNA, 25 bp, SARS Virus
gggaactgctacggtttttgtggac

SEQ ID NO: 228771 - DNA, 25 bp, SARS Virus
ggaactgctacagtttttgtggaca

SEQ ID NO: 228772 - DNA, 25 bp, SARS Virus
gaactgctacaggttttgtggacat

SEQ ID NO: 228773 - DNA, 25 bp, SARS Virus
aactgctacagtgtttgtggacatt

SEQ ID NO: 228774 - DNA, 25 bp, SARS Virus
actgctacagttgttgtggacatta

SEQ ID NO: 228775 - DNA, 25 bp, SARS Virus
ctgctacagtttgtgtggacattac

SEQ ID NO: 228776 - DNA, 25 bp, SARS Virus
tgctacagttttggtggacattact

SEQ ID NO: 228777 - DNA, 25 bp, SARS Virus
gctacagtttttgtggacattactc

SEQ ID NO: 228778 - DNA, 25 bp, SARS Virus
ctacagtttttggggacattactct

SEQ ID NO: 228779 - DNA, 25 bp, SARS Virus
tacagtttttgtggacattactctt

SEQ ID NO: 228780 - DNA, 25 bp, SARS Virus
acagtttttgtggacattactcttt

SEQ ID NO: 228781 - DNA, 25 bp, SARS Virus
cagtttttgtgggcattactcttta

SEQ ID NO: 228782 - DNA, 25 bp, SARS Virus
agtttttgtggagattactctttaa

SEQ ID NO: 228783 - DNA, 25 bp, SARS Virus
gtttttgtggacgttactctttaaa

SEQ ID NO: 228784 - DNA, 25 bp, SARS Virus
tttttgtggacagtactctttaaac

SEQ ID NO: 228785 - DNA, 25 bp, SARS Virus
ttttgtggacatgactctttaaact

SEQ ID NO: 228786 - DNA, 25 bp, SARS Virus
tttgtggacattgctctttaaactc

SEQ ID NO: 228787 - DNA, 25 bp, SARS Virus
ttgtggacattagtctttaaactct

SEQ ID NO: 228788 - DNA, 25 bp, SARS Virus
tgtggacattacgctttaaactctt

SEQ ID NO: 228789 - DNA, 25 bp, SARS Virus
gtggacattactgtttaaactctta

SEQ ID NO: 228790 - DNA, 25 bp, SARS Virus
tggacattactcgttaaactcttag

SEQ ID NO: 228791 - DNA, 25 bp, SARS Virus
ggacattactctgtaaactcttaga

SEQ ID NO: 228792 - DNA, 25 bp, SARS Virus
gacattactcttgaaactcttagag

SEQ ID NO: 228793 - DNA, 25 bp, SARS Virus
acattactctttgaactcttagagg

SEQ ID NO: 228794 - DNA, 25 bp, SARS Virus
cattactctttagactcttagaggg

SEQ ID NO: 228795 - DNA, 25 bp, SARS Virus
attactctttaagctcttagagggt

SEQ ID NO: 228796 - DNA, 25 bp, SARS Virus
ttactctttaaagtcttagagggtt

SEQ ID NO: 228797 - DNA, 25 bp, SARS Virus
tactctttaaacgcttagagggttc

SEQ ID NO: 228798 - DNA, 25 bp, SARS Virus
actctttaaactgttagagggttcg

SEQ ID NO: 228799 - DNA, 25 bp, SARS Virus
ctctttaaactcgtagagggttcgt

SEQ ID NO: 228800 - DNA, 25 bp, SARS Virus
tctttaaactctgagagggttcgta

SEQ ID NO: 228801 - DNA, 25 bp, SARS Virus
ctttaaactcttggagggttcgtag

SEQ ID NO: 228802 - DNA, 25 bp, SARS Virus
tttaaactcttagagggttcgtagg

SEQ ID NO: 228803 - DNA, 25 bp, SARS Virus
ttaaactcttagggggttcgtagga

SEQ ID NO: 228804 - DNA, 25 bp, SARS Virus
taaactcttagagggttcgtaggaa

SEQ ID NO: 228805 - DNA, 25 bp, SARS Virus
aaactcttagagggttcgtaggaac

SEQ ID NO: 228806 - DNA, 25 bp, SARS Virus
aactcttagagggttcgtaggaact

SEQ ID NO: 228807 - DNA, 25 bp, SARS Virus
actcttagaggggtcgtaggaactc

SEQ ID NO: 228808 - DNA, 25 bp, SARS Virus
ctcttagagggtgcgtaggaactct

SEQ ID NO: 228809 - DNA, 25 bp, SARS Virus
tcttagagggttggtaggaactctt

SEQ ID NO: 228810 - DNA, 25 bp, SARS Virus
cttagagggttcgtaggaactcttt

SEQ ID NO: 228811 - DNA, 25 bp, SARS Virus
ttagagggttcggaggaactcttta

SEQ ID NO: 228812 - DNA, 25 bp, SARS Virus
tagagggttcgtgggaactctttaa

SEQ ID NO: 228813 - DNA, 25 bp, SARS Virus
agagggttcgtaggaactctttaag

SEQ ID NO: 228814 - DNA, 25 bp, SARS Virus
gagggttcgtaggaactctttaagt

SEQ ID NO: 228815 - DNA, 25 bp, SARS Virus
agggttcgtagggactctttaagtt

SEQ ID NO: 228816 - DNA, 25 bp, SARS Virus
gggttcgtaggagctctttaagttg

SEQ ID NO: 228817 - DNA, 25 bp, SARS Virus
ggttcgtaggaagtctttaagttga

SEQ ID NO: 228818 - DNA, 25 bp, SARS Virus
gttcgtaggaacgctttaagttgag

SEQ ID NO: 228819 - DNA, 25 bp, SARS Virus
ttcgtaggaactgtttaagttgagg

SEQ ID NO: 228820 - DNA, 25 bp, SARS Virus
tcgtaggaactcgttaagttgagga

SEQ ID NO: 228821 - DNA, 25 bp, SARS Virus
cgtaggaactctgtaagttgaggac

SEQ ID NO: 228822 - DNA, 25 bp, SARS Virus
gtaggaactcttgaagttgaggacg

SEQ ID NO: 228823 - DNA, 25 bp, SARS Virus
taggaactctttgagttgaggacgt

SEQ ID NO: 228824 - DNA, 25 bp, SARS Virus
aggaactctttaggttgaggacgtg

SEQ ID NO: 228825 - DNA, 25 bp, SARS Virus
ggaactctttaagttgaggacgtga

SEQ ID NO: 228826 - DNA, 25 bp, SARS Virus
gaactctttaaggtgaggacgtgat

SEQ ID NO: 228827 - DNA, 25 bp, SARS Virus
aactctttaagtggaggacgtgatt

SEQ ID NO: 228828 - DNA, 25 bp, SARS Virus
actctttaagttgaggacgtgattc

SEQ ID NO: 228829 - DNA, 25 bp, SARS Virus
ctctttaagttggggacgtgattca

SEQ ID NO: 228830 - DNA, 25 bp, SARS Virus
tctttaagttgaggacgtgattcaa

SEQ ID NO: 228831 - DNA, 25 bp, SARS Virus
ctttaagttgaggacgtgattcaaa

SEQ ID NO: 228832 - DNA, 25 bp, SARS Virus
tttaagttgagggcgtgattcaaag

SEQ ID NO: 228833 - DNA, 25 bp, SARS Virus
ttaagttgaggaggtgattcaaagc

SEQ ID NO: 228834 - DNA, 25 bp, SARS Virus
taagttgaggacgtgattcaaagcg

SEQ ID NO: 228835 - DNA, 25 bp, SARS Virus
aagttgaggacgggattcaaagcgg

SEQ ID NO: 228836 - DNA, 25 bp, SARS Virus
agttgaggacgtgattcaaagcgga

SEQ ID NO: 228837 - DNA, 25 bp, SARS Virus
gttgaggacgtggttcaaagcggag

SEQ ID NO: 228838 - DNA, 25 bp, SARS Virus
ttgaggacgtgagtcaaagcggagt

SEQ ID NO: 228839 - DNA, 25 bp, SARS Virus
tgaggacgtgatgcaaagcggagtt

SEQ ID NO: 228840 - DNA, 25 bp, SARS Virus
gaggacgtgattgaaagcggagtta

SEQ ID NO: 228841 - DNA, 25 bp, SARS Virus
aggacgtgattcgaagcggagttag

SEQ ID NO: 228842 - DNA, 25 bp, SARS Virus
ggacgtgattcagagcggagttagg

SEQ ID NO: 228843 - DNA, 25 bp, SARS Virus
gacgtgattcaaggcggagttaggt

SEQ ID NO: 228844 - DNA, 25 bp, SARS Virus
acgtgattcaaagcggagttaggta

SEQ ID NO: 228845 - DNA, 25 bp, SARS Virus
cgtgattcaaaggggagttaggtaa

SEQ ID NO: 228846 - DNA, 25 bp, SARS Virus
gtgattcaaagcggagttaggtaag

SEQ ID NO: 228847 - DNA, 25 bp, SARS Virus
tgattcaaagcggagttaggtaagt

SEQ ID NO: 228848 - DNA, 25 bp, SARS Virus
gattcaaagcggggttaggtaagtt

SEQ ID NO: 228849 - DNA, 25 bp, SARS Virus
attcaaagcggagttaggtaagttt

SEQ ID NO: 228850 - DNA, 25 bp, SARS Virus
ttcaaagcggaggtaggtaagtttc

SEQ ID NO: 228851 - DNA, 25 bp, SARS Virus
tcaaagcggagtgaggtaagtttct

SEQ ID NO: 228852 - DNA, 25 bp, SARS Virus
caaagcggagttgggtaagtttcta

SEQ ID NO: 228853 - DNA, 25 bp, SARS Virus
aaagcggagttaggtaagtttctat

SEQ ID NO: 228854 - DNA, 25 bp, SARS Virus
aagcggagttaggtaagtttctatc

SEQ ID NO: 228855 - DNA, 25 bp, SARS Virus
agcggagttagggaagtttctatcc

SEQ ID NO: 228856 - DNA, 25 bp, SARS Virus
gcggagttaggtgagtttctatccg

SEQ ID NO: 228857 - DNA, 25 bp, SARS Virus
cggagttaggtaggtttctatccgg

SEQ ID NO: 228858 - DNA, 25 bp, SARS Virus
ggagttaggtaagtttctatccgga

SEQ ID NO: 228859 - DNA, 25 bp, SARS Virus
gagttaggtaaggttctatccggac

SEQ ID NO: 228860 - DNA, 25 bp, SARS Virus
agttaggtaagtgtctatccggact

SEQ ID NO: 228861 - DNA, 25 bp, SARS Virus
gttaggtaagttgctatccggactc

SEQ ID NO: 228862 - DNA, 25 bp, SARS Virus
ttaggtaagtttgtatccggactca

SEQ ID NO: 228863 - DNA, 25 bp, SARS Virus
taggtaagtttcgatccggactcaa

SEQ ID NO: 228864 - DNA, 25 bp, SARS Virus
aggtaagtttctgtccggactcaaa

SEQ ID NO: 228865 - DNA, 25 bp, SARS Virus
ggtaagtttctagccggactcaaaa

SEQ ID NO: 228866 - DNA, 25 bp, SARS Virus
gtaagtttctatgcggactcaaaaa

SEQ ID NO: 228867 - DNA, 25 bp, SARS Virus
taagtttctatcgggactcaaaaag

SEQ ID NO: 228868 - DNA, 25 bp, SARS Virus
aagtttctatccggactcaaaaagt

SEQ ID NO: 228869 - DNA, 25 bp, SARS Virus
agtttctatccggactcaaaaagtt

SEQ ID NO: 228870 - DNA, 25 bp, SARS Virus
gtttctatccgggctcaaaaagttg

SEQ ID NO: 228871 - DNA, 25 bp, SARS Virus
tttctatccggagtcaaaaagttgt

SEQ ID NO: 228872 - DNA, 25 bp, SARS Virus
ttctatccggacgcaaaaagttgtc

SEQ ID NO: 228873 - DNA, 25 bp, SARS Virus
tctatccggactgaaaaagttgtca

SEQ ID NO: 228874 - DNA, 25 bp, SARS Virus
ctatccggactcgaaaagttgtcat

SEQ ID NO: 228875 - DNA, 25 bp, SARS Virus
tatccggactcagaaagttgtcatc

SEQ ID NO: 228876 - DNA, 25 bp, SARS Virus
atccggactcaagaagttgtcatca

SEQ ID NO: 228877 - DNA, 25 bp, SARS Virus
tccggactcaaagagttgtcatcac

SEQ ID NO: 228878 - DNA, 25 bp, SARS Virus
ccggactcaaaaggttgtcatcacg

SEQ ID NO: 228879 - DNA, 25 bp, SARS Virus
cggactcaaaaagttgtcatcacgg

SEQ ID NO: 228880 - DNA, 25 bp, SARS Virus
ggactcaaaaaggtgtcatcacggg

SEQ ID NO: 228881 - DNA, 25 bp, SARS Virus
gactcaaaaagtggtcatcacgggt

SEQ ID NO: 228882 - DNA, 25 bp, SARS Virus
actcaaaaagttgtcatcacgggtt

SEQ ID NO: 228883 - DNA, 25 bp, SARS Virus
ctcaaaaagttggcatcacgggttt

SEQ ID NO: 228884 - DNA, 25 bp, SARS Virus
tcaaaaagttgtgatcacgggtttt

SEQ ID NO: 228885 - DNA, 25 bp, SARS Virus
caaaaagttgtcgtcacgggttttc

SEQ ID NO: 228886 - DNA, 25 bp, SARS Virus
aaaaagttgtcagcacgggttttct

SEQ ID NO: 228887 - DNA, 25 bp, SARS Virus
aaaagttgtcatgacgggttttcta

SEQ ID NO: 228888 - DNA, 25 bp, SARS Virus
aaagttgtcatcgcgggttttctaa

SEQ ID NO: 228889 - DNA, 25 bp, SARS Virus
aagttgtcatcaggggttttctaat

SEQ ID NO: 228890 - DNA, 25 bp, SARS Virus
agttgtcatcacgggttttctaatc

SEQ ID NO: 228891 - DNA, 25 bp, SARS Virus
gttgtcatcacgggttttctaatct

SEQ ID NO: 228892 - DNA, 25 bp, SARS Virus
ttgtcatcacgggttttctaatctg

SEQ ID NO: 228893 - DNA, 25 bp, SARS Virus
tgtcatcacggggtttctaatctgt

SEQ ID NO: 228894 - DNA, 25 bp, SARS Virus
gtcatcacgggtgttctaatctgtt

SEQ ID NO: 228895 - DNA, 25 bp, SARS Virus
tcatcacgggttgtctaatctgttg

SEQ ID NO: 228896 - DNA, 25 bp, SARS Virus
catcacgggtttgctaatctgttgg

SEQ ID NO: 228897 - DNA, 25 bp, SARS Virus
atcacgggttttgtaatctgttggt

SEQ ID NO: 228898 - DNA, 25 bp, SARS Virus
tcacgggttttcgaatctgttggtg

SEQ ID NO: 228899 - DNA, 25 bp, SARS Virus
cacgggttttctgatctgttggtga

SEQ ID NO: 228900 - DNA, 25 bp, SARS Virus
acgggttttctagtctgttggtgac

SEQ ID NO: 228901 - DNA, 25 bp, SARS Virus
cgggttttctaagctgttggtgact

SEQ ID NO: 228902 - DNA, 25 bp, SARS Virus
gggttttctaatgtgttggtgactc

SEQ ID NO: 228903 - DNA, 25 bp, SARS Virus
ggttttctaatcggttggtgactct

SEQ ID NO: 228904 - DNA, 25 bp, SARS Virus
gttttctaatctgttggtgactctt

SEQ ID NO: 228905 - DNA, 25 bp, SARS Virus
gttgctatcgagttaaacacttcga

SEQ ID NO: 228906 - DNA, 25 bp, SARS Virus
ttgctatcgaggtaaacacttcgat

SEQ ID NO: 228907 - DNA, 25 bp, SARS Virus
tgctatcgaggttaacacttcgata

SEQ ID NO: 228908 - DNA, 25 bp, SARS Virus
gctatcgaggtatacacttcgatag

SEQ ID NO: 228909 - DNA, 25 bp, SARS Virus
ctatcgaggtaatcacttcgatagt

SEQ ID NO: 228910 - DNA, 25 bp, SARS Virus
tatcgaggtaaatacttcgatagtt

SEQ ID NO: 228911 - DNA, 25 bp, SARS Virus
atcgaggtaaactcttcgatagttg

SEQ ID NO: 228912 - DNA, 25 bp, SARS Virus
tcgaggtaaacatttcgatagttgc

SEQ ID NO: 228913 - DNA, 25 bp, SARS Virus
cgaggtaaacacttcgatagttgcc

SEQ ID NO: 228914 - DNA, 25 bp, SARS Virus
gaggtaaacacttcgatagttgccc

SEQ ID NO: 228915 - DNA, 25 bp, SARS Virus
aggtaaacactttgatagttgcccg

SEQ ID NO: 228916 - DNA, 25 bp, SARS Virus
ggtaaacacttctatagttgcccgc

SEQ ID NO: 228917 - DNA, 25 bp, SARS Virus
gtaaacacttcgttagttgcccgca

SEQ ID NO: 228918 - DNA, 25 bp, SARS Virus
taaacacttcgatagttgcccgcag

SEQ ID NO: 228919 - DNA, 25 bp, SARS Virus
aaacacttcgattgttgcccgcaga

SEQ ID NO: 228920 - DNA, 25 bp, SARS Virus
aacacttcgatatttgcccgcagag

SEQ ID NO: 228921 - DNA, 25 bp, SARS Virus
acacttcgatagttgcccgcagagc

SEQ ID NO: 228922 - DNA, 25 bp, SARS Virus
cacttcgatagttgcccgcagagct

SEQ ID NO: 228923 - DNA, 25 bp, SARS Virus
acttcgatagtttcccgcagagctc

SEQ ID NO: 228924 - DNA, 25 bp, SARS Virus
cttcgatagttgtccgcagagctca

SEQ ID NO: 228925 - DNA, 25 bp, SARS Virus
ttcgatagttgctcgcagagctcac

SEQ ID NO: 228926 - DNA, 25 bp, SARS Virus
tcgatagttgcctgcagagctcacg

SEQ ID NO: 228927 - DNA, 25 bp, SARS Virus
cgatagttgccctcagagctcacga

SEQ ID NO: 228928 - DNA, 25 bp, SARS Virus
gatagttgcccgtagagctcacgaa

SEQ ID NO: 228929 - DNA, 25 bp, SARS Virus
atagttgcccgctgagctcacgaag

SEQ ID NO: 228930 - DNA, 25 bp, SARS Virus
tagttgcccgcatagctcacgaagc

SEQ ID NO: 228931 - DNA, 25 bp, SARS Virus
agttgcccgcagtgctcacgaagct

SEQ ID NO: 228932 - DNA, 25 bp, SARS Virus
gttgcccgcagatctcacgaagctc

SEQ ID NO: 228933 - DNA, 25 bp, SARS Virus
ttgcccgcagagttcacgaagctca

SEQ ID NO: 228934 - DNA, 25 bp, SARS Virus
tgcccgcagagctcacgaagctcaa

SEQ ID NO: 228935 - DNA, 25 bp, SARS Virus
gcccgcagagcttacgaagctcaag

SEQ ID NO: 228936 - DNA, 25 bp, SARS Virus
cccgcagagctctcgaagctcaagt

SEQ ID NO: 228937 - DNA, 25 bp, SARS Virus
ccgcagagctcatgaagctcaagtg

SEQ ID NO: 228938 - DNA, 25 bp, SARS Virus
cgcagagctcactaagctcaagtgg

SEQ ID NO: 228939 - DNA, 25 bp, SARS Virus
gcagagctcacgtagctcaagtggc

SEQ ID NO: 228940 - DNA, 25 bp, SARS Virus
cagagctcacgatgctcaagtggca

SEQ ID NO: 228941 - DNA, 25 bp, SARS Virus
agagctcacgaatctcaagtggcaa

SEQ ID NO: 228942 - DNA, 25 bp, SARS Virus
gagctcacgaagttcaagtggcaag

SEQ ID NO: 228943 - DNA, 25 bp, SARS Virus
agctcacgaagctcaagtggcaaga

SEQ ID NO: 228944 - DNA, 25 bp, SARS Virus
gctcacgaagcttaagtggcaagaa

SEQ ID NO: 228945 - DNA, 25 bp, SARS Virus
ctcacgaagctctagtggcaagaac

SEQ ID NO: 228946 - DNA, 25 bp, SARS Virus
tcacgaagctcatgtggcaagaact

SEQ ID NO: 228947 - DNA, 25 bp, SARS Virus
cacgaagctcaattggcaagaactc

SEQ ID NO: 228948 - DNA, 25 bp, SARS Virus
acgaagctcaagtggcaagaactct

SEQ ID NO: 228949 - DNA, 25 bp, SARS Virus
cgaagctcaagttgcaagaactctt

SEQ ID NO: 228950 - DNA, 25 bp, SARS Virus
gaagctcaagtgtcaagaactcttg

SEQ ID NO: 228951 - DNA, 25 bp, SARS Virus
aagctcaagtggtaagaactcttgt

SEQ ID NO: 228952 - DNA, 25 bp, SARS Virus
agctcaagtggctagaactcttgtt

SEQ ID NO: 228953 - DNA, 25 bp, SARS Virus
gctcaagtggcatgaactcttgttg

SEQ ID NO: 228954 - DNA, 25 bp, SARS Virus
ctcaagtggcaataactcttgttgg

SEQ ID NO: 228955 - DNA, 25 bp, SARS Virus
tcaagtggcaagtactcttgttgga

SEQ ID NO: 228956 - DNA, 25 bp, SARS Virus
caagtggcaagatctcttgttggag

SEQ ID NO: 228957 - DNA, 25 bp, SARS Virus
aagtggcaagaattcttgttggagg

SEQ ID NO: 228958 - DNA, 25 bp, SARS Virus
agtggcaagaactcttgttggagga

SEQ ID NO: 228959 - DNA, 25 bp, SARS Virus
gtggcaagaacttttgttggaggag

SEQ ID NO: 228960 - DNA, 25 bp, SARS Virus
tggcaagaactcttgttggaggagt

SEQ ID NO: 228961 - DNA, 25 bp, SARS Virus
ggcaagaactcttgttggaggagtc

SEQ ID NO: 228962 - DNA, 25 bp, SARS Virus
gcaagaactctttttggaggagtct

SEQ ID NO: 228963 - DNA, 25 bp, SARS Virus
caagaactcttgttggaggagtctc

SEQ ID NO: 228964 - DNA, 25 bp, SARS Virus
aagaactcttgttggaggagtctcc

SEQ ID NO: 228965 - DNA, 25 bp, SARS Virus
agaactcttgtttgaggagtctcca

SEQ ID NO: 228966 - DNA, 25 bp, SARS Virus
gaactcttgttgtaggagtctccat

SEQ ID NO: 228967 - DNA, 25 bp, SARS Virus
aactcttgttggtggagtctccatt

SEQ ID NO: 228968 - DNA, 25 bp, SARS Virus
actcttgttggatgagtctccattc

SEQ ID NO: 228969 - DNA, 25 bp, SARS Virus
ctcttgttggagtagtctccattca

SEQ ID NO: 228970 - DNA, 25 bp, SARS Virus
tcttgttggaggtgtctccattcat

SEQ ID NO: 228971 - DNA, 25 bp, SARS Virus
cttgttggaggattctccattcatg

SEQ ID NO: 228972 - DNA, 25 bp, SARS Virus
ttgttggaggagtctccattcatga

SEQ ID NO: 228973 - DNA, 25 bp, SARS Virus
tgttggaggagtttccattcatgac

SEQ ID NO: 228974 - DNA, 25 bp, SARS Virus
gttggaggagtctccattcatgaca

SEQ ID NO: 228975 - DNA, 25 bp, SARS Virus
ttggaggagtcttcattcatgacac

SEQ ID NO: 228976 - DNA, 25 bp, SARS Virus
tggaggagtctctattcatgacaca

SEQ ID NO: 228977 - DNA, 25 bp, SARS Virus
ggaggagtctcctttcatgacacag

SEQ ID NO: 228978 - DNA, 25 bp, SARS Virus
gaggagtctccattcatgacacagt

SEQ ID NO: 228979 - DNA, 25 bp, SARS Virus
aggagtctccattcatgacacagta

SEQ ID NO: 228980 - DNA, 25 bp, SARS Virus
ggagtctccatttatgacacagtac

SEQ ID NO: 228981 - DNA, 25 bp, SARS Virus
gagtctccattcttgacacagtaca

SEQ ID NO: 228982 - DNA, 25 bp, SARS Virus
agtctccattcatgacacagtacac

SEQ ID NO: 228983 - DNA, 25 bp, SARS Virus
gtctccattcattacacagtacact

SEQ ID NO: 228984 - DNA, 25 bp, SARS Virus
tctccattcatgtcacagtacactt

SEQ ID NO: 228985 - DNA, 25 bp, SARS Virus
ctccattcatgatacagtacactta

SEQ ID NO: 228986 - DNA, 25 bp, SARS Virus
tccattcatgactcagtacacttag

SEQ ID NO: 228987 - DNA, 25 bp, SARS Virus
ccattcatgacatagtacacttagt

SEQ ID NO: 228988 - DNA, 25 bp, SARS Virus
cattcatgacactgtacacttagtg

SEQ ID NO: 228989 - DNA, 25 bp, SARS Virus
attcatgacacattacacttagtgg

SEQ ID NO: 228990 - DNA, 25 bp, SARS Virus
ttcatgacacagtacacttagtgga

SEQ ID NO: 228991 - DNA, 25 bp, SARS Virus
tcatgacacagttcacttagtggaa

SEQ ID NO: 228992 - DNA, 25 bp, SARS Virus
catgacacagtatacttagtggaag

SEQ ID NO: 228993 - DNA, 25 bp, SARS Virus
atgacacagtactcttagtggaagt

SEQ ID NO: 228994 - DNA, 25 bp, SARS Virus
tgacacagtacatttagtggaagtt

SEQ ID NO: 228995 - DNA, 25 bp, SARS Virus
gacacagtacacttagtggaagttc

SEQ ID NO: 228996 - DNA, 25 bp, SARS Virus
acacagtacacttagtggaagttct

SEQ ID NO: 228997 - DNA, 25 bp, SARS Virus
cacagtacactttgtggaagttctt

SEQ ID NO: 228998 - DNA, 25 bp, SARS Virus
acagtacacttattggaagttcttt

SEQ ID NO: 228999 - DNA, 25 bp, SARS Virus
cagtacacttagtggaagttctttc

SEQ ID NO: 229000 - DNA, 25 bp, SARS Virus
agtacacttagttgaagttctttcc

SEQ ID NO: 229001 - DNA, 25 bp, SARS Virus
gtacacttagtgtaagttctttcca

SEQ ID NO: 229002 - DNA, 25 bp, SARS Virus
tacacttagtggtagttctttccaa

SEQ ID NO: 229003 - DNA, 25 bp, SARS Virus
acacttagtggatgttctttccaat

SEQ ID NO: 229004 - DNA, 25 bp, SARS Virus
cacttagtggaatttctttccaatg

SEQ ID NO: 229005 - DNA, 25 bp, SARS Virus
acttagtggaagttctttccaatga

SEQ ID NO: 229006 - DNA, 25 bp, SARS Virus
cttagtggaagttctttccaatgaa

SEQ ID NO: 229007 - DNA, 25 bp, SARS Virus
ttagtggaagttttttccaatgaag

SEQ ID NO: 229008 - DNA, 25 bp, SARS Virus
tagtggaagttctttccaatgaaga

SEQ ID NO: 229009 - DNA, 25 bp, SARS Virus
agtggaagttctttccaatgaagaa

SEQ ID NO: 229010 - DNA, 25 bp, SARS Virus
gtggaagttctttccaatgaagaaa

SEQ ID NO: 229011 - DNA, 25 bp, SARS Virus
tggaagttcttttcaatgaagaaaa

SEQ ID NO: 229012 - DNA, 25 bp, SARS Virus
ggaagttctttctaatgaagaaaac

SEQ ID NO: 229013 - DNA, 25 bp, SARS Virus
gaagttctttcctatgaagaaaacc

SEQ ID NO: 229014 - DNA, 25 bp, SARS Virus
aagttctttccattgaagaaaacca

SEQ ID NO: 229015 - DNA, 25 bp, SARS Virus
agttctttccaatgaagaaaaccac

SEQ ID NO: 229016 - DNA, 25 bp, SARS Virus
gttctttccaattaagaaaaccacg

SEQ ID NO: 229017 - DNA, 25 bp, SARS Virus
ttctttccaatgtagaaaaccacgg

SEQ ID NO: 229018 - DNA, 25 bp, SARS Virus
tctttccaatgatgaaaaccacgga

SEQ ID NO: 229019 - DNA, 25 bp, SARS Virus
ctttccaatgaataaaaccacggaa

SEQ ID NO: 229020 - DNA, 25 bp, SARS Virus
tttccaatgaagtaaaccacggaat

SEQ ID NO: 229021 - DNA, 25 bp, SARS Virus
ttccaatgaagataaccacggaatt

SEQ ID NO: 229022 - DNA, 25 bp, SARS Virus
tccaatgaagaataccacggaattc

SEQ ID NO: 229023 - DNA, 25 bp, SARS Virus
ccaatgaagaaatccacggaattct

SEQ ID NO: 229024 - DNA, 25 bp, SARS Virus
caatgaagaaaatcacggaattctc

SEQ ID NO: 229025 - DNA, 25 bp, SARS Virus
aatgaagaaaactacggaattctcc

SEQ ID NO: 229026 - DNA, 25 bp, SARS Virus
atgaagaaaacctcggaattctccg

SEQ ID NO: 229027 - DNA, 25 bp, SARS Virus
tgaagaaaaccatggaattctccgt

SEQ ID NO: 229028 - DNA, 25 bp, SARS Virus
gaagaaaaccactgaattctccgta

SEQ ID NO: 229029 - DNA, 25 bp, SARS Virus
aagaaaaccacgtaattctccgtac

SEQ ID NO: 229030 - DNA, 25 bp, SARS Virus
agaaaaccacggtattctccgtact

SEQ ID NO: 229031 - DNA, 25 bp, SARS Virus
gaaaaccacggatttctccgtactc

SEQ ID NO: 229032 - DNA, 25 bp, SARS Virus
aaaaccacggaattctccgtactca

SEQ ID NO: 229033 - DNA, 25 bp, SARS Virus
aaaccacggaattctccgtactcat

SEQ ID NO: 229034 - DNA, 25 bp, SARS Virus
aaccacggaattttccgtactcatc

SEQ ID NO: 229035 - DNA, 25 bp, SARS Virus
accacggaattctccgtactcatca

SEQ ID NO: 229036 - DNA, 25 bp, SARS Virus
ccacggaattcttcgtactcatcaa

SEQ ID NO: 229037 - DNA, 25 bp, SARS Virus
cacggaattctctgtactcatcaac

SEQ ID NO: 229038 - DNA, 25 bp, SARS Virus
acggaattctccttactcatcaacg

SEQ ID NO: 229039 - DNA, 25 bp, SARS Virus
cggaattctccgtactcatcaacgt

SEQ ID NO: 229040 - DNA, 25 bp, SARS Virus
ggaattctccgttctcatcaacgtc

SEQ ID NO: 229041 - DNA, 25 bp, SARS Virus
gaattctccgtattcatcaacgtcg

SEQ ID NO: 229042 - DNA, 25 bp, SARS Virus
aattctccgtactcatcaacgtcga

SEQ ID NO: 229043 - DNA, 25 bp, SARS Virus
attctccgtacttatcaacgtcgac

SEQ ID NO: 229044 - DNA, 25 bp, SARS Virus
ttctccgtactcttcaacgtcgacg

SEQ ID NO: 229045 - DNA, 25 bp, SARS Virus
tctccgtactcatcaacgtcgacga

SEQ ID NO: 229046 - DNA, 25 bp, SARS Virus
ctccgtactcattaacgtcgacgag

SEQ ID NO: 229047 - DNA, 25 bp, SARS Virus
tccgtactcatctacgtcgacgagg

SEQ ID NO: 229048 - DNA, 25 bp, SARS Virus
ccgtactcatcatcgtcgacgagga

SEQ ID NO: 229049 - DNA, 25 bp, SARS Virus
cgtactcatcaatgtcgacgaggaa

SEQ ID NO: 229050 - DNA, 25 bp, SARS Virus
gtactcatcaacttcgacgaggaac

SEQ ID NO: 229051 - DNA, 25 bp, SARS Virus
tactcatcaacgtcgacgaggaacg

SEQ ID NO: 229052 - DNA, 25 bp, SARS Virus
actcatcaacgttgacgaggaacgg

SEQ ID NO: 229053 - DNA, 25 bp, SARS Virus
ctcatcaacgtctacgaggaacggt

SEQ ID NO: 229054 - DNA, 25 bp, SARS Virus
tcatcaacgtcgtcgaggaacggtg

SEQ ID NO: 229055 - DNA, 25 bp, SARS Virus
catcaacgtcgatgaggaacggtgc

SEQ ID NO: 229056 - DNA, 25 bp, SARS Virus
atcaacgtcgactaggaacggtgca

SEQ ID NO: 229057 - DNA, 25 bp, SARS Virus
tcaacgtcgacgtggaacggtgcat

SEQ ID NO: 229058 - DNA, 25 bp, SARS Virus
caacgtcgacgatgaacggtgcata

SEQ ID NO: 229059 - DNA, 25 bp, SARS Virus
aacgtcgacgagtaacggtgcatat

SEQ ID NO: 229060 - DNA, 25 bp, SARS Virus
acgtcgacgaggtacggtgcatatg

SEQ ID NO: 229061 - DNA, 25 bp, SARS Virus
cgtcgacgaggatcggtgcatatgt

SEQ ID NO: 229062 - DNA, 25 bp, SARS Virus
gtcgacgaggaatggtgcatatgtg

SEQ ID NO: 229063 - DNA, 25 bp, SARS Virus
tcgacgaggaactgtgcatatgtga

SEQ ID NO: 229064 - DNA, 25 bp, SARS Virus
cgacgaggaacgttgcatatgtgac

SEQ ID NO: 229065 - DNA, 25 bp, SARS Virus
gacgaggaacggtgcatatgtgact

SEQ ID NO: 229066 - DNA, 25 bp, SARS Virus
acgaggaacggttcatatgtgactg

SEQ ID NO: 229067 - DNA, 25 bp, SARS Virus
cgaggaacggtgtatatgtgactgc

SEQ ID NO: 229068 - DNA, 25 bp, SARS Virus
gaggaacggtgcttatgtgactgcc

SEQ ID NO: 229069 - DNA, 25 bp, SARS Virus
aggaacggtgcatatgtgactgcca

SEQ ID NO: 229070 - DNA, 25 bp, SARS Virus
ggaacggtgcatttgtgactgccat

SEQ ID NO: 229071 - DNA, 25 bp, SARS Virus
gaacggtgcatatgtgactgccatt

SEQ ID NO: 229072 - DNA, 25 bp, SARS Virus
aacggtgcatatttgactgccattt

SEQ ID NO: 229073 - DNA, 25 bp, SARS Virus
acggtgcatatgtgactgccatttc

SEQ ID NO: 229074 - DNA, 25 bp, SARS Virus
cggtgcatatgttactgccatttca

SEQ ID NO: 229075 - DNA, 25 bp, SARS Virus
ggtgcatatgtgtctgccatttcag

SEQ ID NO: 229076 - DNA, 25 bp, SARS Virus
gtgcatatgtgattgccatttcagg

SEQ ID NO: 229077 - DNA, 25 bp, SARS Virus
tgcatatgtgactgccatttcaggg

SEQ ID NO: 229078 - DNA, 25 bp, SARS Virus
gcatatgtgacttccatttcaggga

SEQ ID NO: 229079 - DNA, 25 bp, SARS Virus
catatgtgactgtcatttcagggaa

SEQ ID NO: 229080 - DNA, 25 bp, SARS Virus
atatgtgactgctatttcagggaac

SEQ ID NO: 229081 - DNA, 25 bp, SARS Virus
tatgtgactgccttttcagggaacg

SEQ ID NO: 229082 - DNA, 25 bp, SARS Virus
atgtgactgccatttcagggaacga

SEQ ID NO: 229083 - DNA, 25 bp, SARS Virus
tgtgactgccatttcagggaacgaa

SEQ ID NO: 229084 - DNA, 25 bp, SARS Virus
gtgactgccatttcagggaacgaaa

SEQ ID NO: 229085 - DNA, 25 bp, SARS Virus
tgactgccattttagggaacgaaac

SEQ ID NO: 229086 - DNA, 25 bp, SARS Virus
gactgccatttctgggaacgaaact

SEQ ID NO: 229087 - DNA, 25 bp, SARS Virus
actgccatttcatggaacgaaactc

SEQ ID NO: 229088 - DNA, 25 bp, SARS Virus
ctgccatttcagtgaacgaaactcg

SEQ ID NO: 229089 - DNA, 25 bp, SARS Virus
tgccatttcaggtaacgaaactcgc

SEQ ID NO: 229090 - DNA, 25 bp, SARS Virus
gccatttcagggtacgaaactcgct

SEQ ID NO: 229091 - DNA, 25 bp, SARS Virus
ccatttcagggatcgaaactcgcta

SEQ ID NO: 229092 - DNA, 25 bp, SARS Virus
catttcagggaatgaaactcgctac

SEQ ID NO: 229093 - DNA, 25 bp, SARS Virus
atttcagggaactaaactcgctact

SEQ ID NO: 229094 - DNA, 25 bp, SARS Virus
tttcagggaacgtaactcgctactt

SEQ ID NO: 229095 - DNA, 25 bp, SARS Virus
ttcagggaacgatactcgctacttc

SEQ ID NO: 229096 - DNA, 25 bp, SARS Virus
tcagggaacgaatctcgctacttct

SEQ ID NO: 229097 - DNA, 25 bp, SARS Virus
cagggaacgaaattcgctacttctg

SEQ ID NO: 229098 - DNA, 25 bp, SARS Virus
agggaacgaaactcgctacttctga

SEQ ID NO: 229099 - DNA, 25 bp, SARS Virus
gggaacgaaacttgctacttctgaa

SEQ ID NO: 229100 - DNA, 25 bp, SARS Virus
ggaacgaaactctctacttctgaag

SEQ ID NO: 229101 - DNA, 25 bp, SARS Virus
gaacgaaactcgttacttctgaagt

SEQ ID NO: 229102 - DNA, 25 bp, SARS Virus
aacgaaactcgctacttctgaagtg

SEQ ID NO: 229103 - DNA, 25 bp, SARS Virus
acgaaactcgcttcttctgaagtgg

SEQ ID NO: 229104 - DNA, 25 bp, SARS Virus
cgaaactcgctatttctgaagtgga

SEQ ID NO: 229105 - DNA, 25 bp, SARS Virus
gaaactcgctacttctgaagtggat

SEQ ID NO: 229106 - DNA, 25 bp, SARS Virus
aaactcgctacttctgaagtggatt

SEQ ID NO: 229107 - DNA, 25 bp, SARS Virus
aactcgctacttttgaagtggattc

SEQ ID NO: 229108 - DNA, 25 bp, SARS Virus
actcgctacttctgaagtggattca

SEQ ID NO: 229109 - DNA, 25 bp, SARS Virus
ctcgctacttcttaagtggattcaa

SEQ ID NO: 229110 - DNA, 25 bp, SARS Virus
tcgctacttctgtagtggattcaac

SEQ ID NO: 229111 - DNA, 25 bp, SARS Virus
cgctacttctgatgtggattcaact

SEQ ID NO: 229112 - DNA, 25 bp, SARS Virus
gctacttctgaattggattcaactc

SEQ ID NO: 229113 - DNA, 25 bp, SARS Virus
ctacttctgaagtggattcaactca

SEQ ID NO: 229114 - DNA, 25 bp, SARS Virus
tacttctgaagttgattcaactcac

SEQ ID NO: 229115 - DNA, 25 bp, SARS Virus
acttctgaagtgtattcaactcact

SEQ ID NO: 229116 - DNA, 25 bp, SARS Virus
cttctgaagtggtttcaactcacta

SEQ ID NO: 229117 - DNA, 25 bp, SARS Virus
ttctgaagtggattcaactcactag

SEQ ID NO: 229118 - DNA, 25 bp, SARS Virus
tctgaagtggattcaactcactagc

SEQ ID NO: 229119 - DNA, 25 bp, SARS Virus
ctgaagtggatttaactcactagcg

SEQ ID NO: 229120 - DNA, 25 bp, SARS Virus
tgaagtggattctactcactagcgt

SEQ ID NO: 229121 - DNA, 25 bp, SARS Virus
gaagtggattcatctcactagcgtt

SEQ ID NO: 229122 - DNA, 25 bp, SARS Virus
aagtggattcaattcactagcgttg

SEQ ID NO: 229123 - DNA, 25 bp, SARS Virus
agtggattcaactcactagcgttga

SEQ ID NO: 229124 - DNA, 25 bp, SARS Virus
gtggattcaacttactagcgttgaa

SEQ ID NO: 229125 - DNA, 25 bp, SARS Virus
tggattcaactctctagcgttgaaa

SEQ ID NO: 229126 - DNA, 25 bp, SARS Virus
ggattcaactcattagcgttgaaac

SEQ ID NO: 229127 - DNA, 25 bp, SARS Virus
gattcaactcactagcgttgaaacg

SEQ ID NO: 229128 - DNA, 25 bp, SARS Virus
attcaactcacttgcgttgaaacgc

SEQ ID NO: 229129 - DNA, 25 bp, SARS Virus
ttcaactcactatcgttgaaacgcg

SEQ ID NO: 229130 - DNA, 25 bp, SARS Virus
tcaactcactagtgttgaaacgcgg

SEQ ID NO: 229131 - DNA, 25 bp, SARS Virus
caactcactagctttgaaacgcggt

SEQ ID NO: 229132 - DNA, 25 bp, SARS Virus
aactcactagcgttgaaacgcggtc

SEQ ID NO: 229133 - DNA, 25 bp, SARS Virus
actcactagcgttgaaacgcggtcg

SEQ ID NO: 229134 - DNA, 25 bp, SARS Virus
ctcactagcgtttaaacgcggtcgc

SEQ ID NO: 229135 - DNA, 25 bp, SARS Virus
tcactagcgttgtaacgcggtcgct

SEQ ID NO: 229136 - DNA, 25 bp, SARS Virus
cactagcgttgatacgcggtcgcta

SEQ ID NO: 229137 - DNA, 25 bp, SARS Virus
actagcgttgaatcgcggtcgctat

SEQ ID NO: 229138 - DNA, 25 bp, SARS Virus
ctagcgttgaaatgcggtcgctatc

SEQ ID NO: 229139 - DNA, 25 bp, SARS Virus
tagcgttgaaactcggtcgctatca

SEQ ID NO: 229140 - DNA, 25 bp, SARS Virus
agcgttgaaacgtggtcgctatcac

SEQ ID NO: 229141 - DNA, 25 bp, SARS Virus
gcgttgaaacgctgtcgctatcact

SEQ ID NO: 229142 - DNA, 25 bp, SARS Virus
cgttgaaacgcgttcgctatcactg

SEQ ID NO: 229143 - DNA, 25 bp, SARS Virus
gttgaaacgcggtcgctatcactga

SEQ ID NO: 229144 - DNA, 25 bp, SARS Virus
ttgaaacgcggttgctatcactgaa

SEQ ID NO: 229145 - DNA, 25 bp, SARS Virus
tgaaacgcggtctctatcactgaac

SEQ ID NO: 229146 - DNA, 25 bp, SARS Virus
gaaacgcggtcgttatcactgaact

SEQ ID NO: 229147 - DNA, 25 bp, SARS Virus
aaacgcggtcgctatcactgaacta

SEQ ID NO: 229148 - DNA, 25 bp, SARS Virus
aacgcggtcgctttcactgaactag

SEQ ID NO: 229149 - DNA, 25 bp, SARS Virus
acgcggtcgctatcactgaactagt

SEQ ID NO: 229150 - DNA, 25 bp, SARS Virus
cgcggtcgctattactgaactagtt

SEQ ID NO: 229151 - DNA, 25 bp, SARS Virus
gcggtcgctatctctgaactagtta

SEQ ID NO: 229152 - DNA, 25 bp, SARS Virus
cggtcgctatcattgaactagttac

SEQ ID NO: 229153 - DNA, 25 bp, SARS Virus
ggtcgctatcactgaactagttacg

SEQ ID NO: 229154 - DNA, 25 bp, SARS Virus
gtcgctatcacttaactagttacgt

SEQ ID NO: 229155 - DNA, 25 bp, SARS Virus
tcgctatcactgtactagttacgtg

SEQ ID NO: 229156 - DNA, 25 bp, SARS Virus
cgctatcactgatctagttacgtgt

SEQ ID NO: 229157 - DNA, 25 bp, SARS Virus
gctatcactgaattagttacgtgta

SEQ ID NO: 229158 - DNA, 25 bp, SARS Virus
ctatcactgaactagttacgtgtaa

SEQ ID NO: 229159 - DNA, 25 bp, SARS Virus
tatcactgaacttgttacgtgtaaa

SEQ ID NO: 229160 - DNA, 25 bp, SARS Virus
atcactgaactatttacgtgtaaag

SEQ ID NO: 229161 - DNA, 25 bp, SARS Virus
tcactgaactagttacgtgtaaagc

SEQ ID NO: 229162 - DNA, 25 bp, SARS Virus
cactgaactagttacgtgtaaagct

SEQ ID NO: 229163 - DNA, 25 bp, SARS Virus
actgaactagtttcgtgtaaagctc

SEQ ID NO: 229164 - DNA, 25 bp, SARS Virus
ctgaactagttatgtgtaaagctca

SEQ ID NO: 229165 - DNA, 25 bp, SARS Virus
tgaactagttacttgtaaagctcac

SEQ ID NO: 229166 - DNA, 25 bp, SARS Virus
gaactagttacgtgtaaagctcacg

SEQ ID NO: 229167 - DNA, 25 bp, SARS Virus
aactagttacgtttaaagctcacgg

SEQ ID NO: 229168 - DNA, 25 bp, SARS Virus
actagttacgtgtaaagctcacgga

SEQ ID NO: 229169 - DNA, 25 bp, SARS Virus
ctagttacgtgttaagctcacggaa

SEQ ID NO: 229170 - DNA, 25 bp, SARS Virus
tagttacgtgtatagctcacggaac

SEQ ID NO: 229171 - DNA, 25 bp, SARS Virus
agttacgtgtaatgctcacggaaca

SEQ ID NO: 229172 - DNA, 25 bp, SARS Virus
gttacgtgtaaatctcacggaacaa

SEQ ID NO: 229173 - DNA, 25 bp, SARS Virus
ttacgtgtaaagttcacggaacaat

SEQ ID NO: 229174 - DNA, 25 bp, SARS Virus
tacgtgtaaagctcacggaacaatt

SEQ ID NO: 229175 - DNA, 25 bp, SARS Virus
acgtgtaaagcttacggaacaattg

SEQ ID NO: 229176 - DNA, 25 bp, SARS Virus
cgtgtaaagctctcggaacaattgt

SEQ ID NO: 229177 - DNA, 25 bp, SARS Virus
gtgtaaagctcatggaacaattgtt

SEQ ID NO: 229178 - DNA, 25 bp, SARS Virus
tgtaaagctcactgaacaattgttg

SEQ ID NO: 229179 - DNA, 25 bp, SARS Virus
gtaaagctcacgtaacaattgttgt

SEQ ID NO: 229180 - DNA, 25 bp, SARS Virus
taaagctcacggtacaattgttgta

SEQ ID NO: 229181 - DNA, 25 bp, SARS Virus
aaagctcacggatcaattgttgtag

SEQ ID NO: 229182 - DNA, 25 bp, SARS Virus
aagctcacggaataattgttgtagt

SEQ ID NO: 229183 - DNA, 25 bp, SARS Virus
agctcacggaactattgttgtagtt

SEQ ID NO: 229184 - DNA, 25 bp, SARS Virus
gctcacggaacatttgttgtagtta

SEQ ID NO: 229185 - DNA, 25 bp, SARS Virus
ctcacggaacaattgttgtagttac

SEQ ID NO: 229186 - DNA, 25 bp, SARS Virus
tcacggaacaattgttgtagttact

SEQ ID NO: 229187 - DNA, 25 bp, SARS Virus
cacggaacaatttttgtagttactt

SEQ ID NO: 229188 - DNA, 25 bp, SARS Virus
acggaacaattgttgtagttacttc

SEQ ID NO: 229189 - DNA, 25 bp, SARS Virus
cggaacaattgttgtagttacttcg

SEQ ID NO: 229190 - DNA, 25 bp, SARS Virus
ggaacaattgttttagttacttcgt

SEQ ID NO: 229191 - DNA, 25 bp, SARS Virus
gaacaattgttgtagttacttcgta

SEQ ID NO: 229192 - DNA, 25 bp, SARS Virus
aacaattgttgttgttacttcgtaa

SEQ ID NO: 229193 - DNA, 25 bp, SARS Virus
acaattgttgtatttacttcgtaaa

SEQ ID NO: 229194 - DNA, 25 bp, SARS Virus
caattgttgtagttacttcgtaaaa

SEQ ID NO: 229195 - DNA, 25 bp, SARS Virus
aattgttgtagttacttcgtaaaat

SEQ ID NO: 229196 - DNA, 25 bp, SARS Virus
attgttgtagtttcttcgtaaaatg

SEQ ID NO: 229197 - DNA, 25 bp, SARS Virus
ttgttgtagttatttcgtaaaatgt

SEQ ID NO: 229198 - DNA, 25 bp, SARS Virus
tgttgtagttacttcgtaaaatgtg

SEQ ID NO: 229199 - DNA, 25 bp, SARS Virus
gttgtagttacttcgtaaaatgtgt

SEQ ID NO: 229200 - DNA, 25 bp, SARS Virus
ttgtagttactttgtaaaatgtgtt

SEQ ID NO: 229201 - DNA, 25 bp, SARS Virus
tgtagttacttcttaaaatgtgtta

SEQ ID NO: 229202 - DNA, 25 bp, SARS Virus
gtagttacttcgtaaaatgtgttag

SEQ ID NO: 229203 - DNA, 25 bp, SARS Virus
tagttacttcgttaaatgtgttagg

SEQ ID NO: 229204 - DNA, 25 bp, SARS Virus
agttacttcgtataatgtgttagga

SEQ ID NO: 229205 - DNA, 25 bp, SARS Virus
gttacttcgtaatatgtgttaggaa

SEQ ID NO: 229206 - DNA, 25 bp, SARS Virus
ttacttcgtaaattgtgttaggaac

SEQ ID NO: 229207 - DNA, 25 bp, SARS Virus
tacttcgtaaaatgtgttaggaact

SEQ ID NO: 229208 - DNA, 25 bp, SARS Virus
acttcgtaaaatttgttaggaacta

SEQ ID NO: 229209 - DNA, 25 bp, SARS Virus
cttcgtaaaatgtgttaggaactac

SEQ ID NO: 229210 - DNA, 25 bp, SARS Virus
ttcgtaaaatgttttaggaactaca

SEQ ID NO: 229211 - DNA, 25 bp, SARS Virus
tcgtaaaatgtgttaggaactacaa

SEQ ID NO: 229212 - DNA, 25 bp, SARS Virus
cgtaaaatgtgttaggaactacaat

SEQ ID NO: 229213 - DNA, 25 bp, SARS Virus
gtaaaatgtgtttggaactacaata

SEQ ID NO: 229214 - DNA, 25 bp, SARS Virus
taaaatgtgttatgaactacaatag

SEQ ID NO: 229215 - DNA, 25 bp, SARS Virus
aaaatgtgttagtaactacaataga

SEQ ID NO: 229216 - DNA, 25 bp, SARS Virus
aaatgtgttaggtactacaatagac

SEQ ID NO: 229217 - DNA, 25 bp, SARS Virus
aatgtgttaggatctacaatagact

SEQ ID NO: 229218 - DNA, 25 bp, SARS Virus
atgtgttaggaattacaatagactt

SEQ ID NO: 229219 - DNA, 25 bp, SARS Virus
tgtgttaggaactacaatagacttc

SEQ ID NO: 229220 - DNA, 25 bp, SARS Virus
gtgttaggaacttcaatagacttcg

SEQ ID NO: 229221 - DNA, 25 bp, SARS Virus
tgttaggaactataatagacttcgt

SEQ ID NO: 229222 - DNA, 25 bp, SARS Virus
gttaggaactactatagacttcgtt

SEQ ID NO: 229223 - DNA, 25 bp, SARS Virus
ttaggaactacattagacttcgttg

SEQ ID NO: 229224 - DNA, 25 bp, SARS Virus
taggaactacaatagacttcgttgg

SEQ ID NO: 229225 - DNA, 25 bp, SARS Virus
aggaactacaattgacttcgttgga

SEQ ID NO: 229226 - DNA, 25 bp, SARS Virus
ggaactacaatatacttcgttggac

SEQ ID NO: 229227 - DNA, 25 bp, SARS Virus
gaactacaatagtcttcgttggaca

SEQ ID NO: 229228 - DNA, 25 bp, SARS Virus
aactacaatagatttcgttggacat

SEQ ID NO: 229229 - DNA, 25 bp, SARS Virus
actacaatagacttcgttggacata

SEQ ID NO: 229230 - DNA, 25 bp, SARS Virus
ctacaatagacttcgttggacataa

SEQ ID NO: 229231 - DNA, 25 bp, SARS Virus
tacaatagactttgttggacataaa

SEQ ID NO: 229232 - DNA, 25 bp, SARS Virus
acaatagacttctttggacataaac

SEQ ID NO: 229233 - DNA, 25 bp, SARS Virus
caatagacttcgttggacataaact

SEQ ID NO: 229234 - DNA, 25 bp, SARS Virus
aatagacttcgttggacataaactg

SEQ ID NO: 229235 - DNA, 25 bp, SARS Virus
atagacttcgtttgacataaactgg

SEQ ID NO: 229236 - DNA, 25 bp, SARS Virus
tagacttcgttgtacataaactggg

SEQ ID NO: 229237 - DNA, 25 bp, SARS Virus
agacttcgttggtcataaactggga

SEQ ID NO: 229238 - DNA, 25 bp, SARS Virus
gacttcgttggatataaactgggaa

SEQ ID NO: 229239 - DNA, 25 bp, SARS Virus
acttcgttggacttaaactgggaac

SEQ ID NO: 229240 - DNA, 25 bp, SARS Virus
cttcgttggacataaactgggaact

SEQ ID NO: 229241 - DNA, 25 bp, SARS Virus
ttcgttggacattaactgggaactg

SEQ ID NO: 229242 - DNA, 25 bp, SARS Virus
tcgttggacatatactgggaactgc

SEQ ID NO: 229243 - DNA, 25 bp, SARS Virus
cgttggacataatctgggaactgct

SEQ ID NO: 229244 - DNA, 25 bp, SARS Virus
gttggacataaattgggaactgcta

SEQ ID NO: 229245 - DNA, 25 bp, SARS Virus
ttggacataaactgggaactgctac

SEQ ID NO: 229246 - DNA, 25 bp, SARS Virus
tggacataaacttggaactgctaca

SEQ ID NO: 229247 - DNA, 25 bp, SARS Virus
ggacataaactgtgaactgctacag

SEQ ID NO: 229248 - DNA, 25 bp, SARS Virus
gacataaactggtaactgctacagt

SEQ ID NO: 229249 - DNA, 25 bp, SARS Virus
acataaactgggtactgctacagtt

SEQ ID NO: 229250 - DNA, 25 bp, SARS Virus
cataaactgggatctgctacagttt

SEQ ID NO: 229251 - DNA, 25 bp, SARS Virus
ataaactgggaattgctacagtttt

SEQ ID NO: 229252 - DNA, 25 bp, SARS Virus
taaactgggaactgctacagttttt

SEQ ID NO: 229253 - DNA, 25 bp, SARS Virus
aaactgggaacttctacagtttttg

SEQ ID NO: 229254 - DNA, 25 bp, SARS Virus
aactgggaactgttacagtttttgt

SEQ ID NO: 229255 - DNA, 25 bp, SARS Virus
actgggaactgctacagtttttgtg

SEQ ID NO: 229256 - DNA, 25 bp, SARS Virus
ctgggaactgcttcagtttttgtgg

SEQ ID NO: 229257 - DNA, 25 bp, SARS Virus
tgggaactgctatagtttttgtgga

SEQ ID NO: 229258 - DNA, 25 bp, SARS Virus
gggaactgctactgtttttgtggac

SEQ ID NO: 229259 - DNA, 25 bp, SARS Virus
ggaactgctacattttttgtggaca

SEQ ID NO: 229260 - DNA, 25 bp, SARS Virus
gaactgctacagtttttgtggacat

SEQ ID NO: 229261 - DNA, 25 bp, SARS Virus
aactgctacagtttttgtggacatt

SEQ ID NO: 229262 - DNA, 25 bp, SARS Virus
actgctacagtttttgtggacatta

SEQ ID NO: 229263 - DNA, 25 bp, SARS Virus
ctgctacagtttttgtggacattac

SEQ ID NO: 229264 - DNA, 25 bp, SARS Virus
tgctacagtttttgtggacattact

SEQ ID NO: 229265 - DNA, 25 bp, SARS Virus
gctacagtttttttggacattactc

SEQ ID NO: 229266 - DNA, 25 bp, SARS Virus
ctacagtttttgtggacattactct

SEQ ID NO: 229267 - DNA, 25 bp, SARS Virus
tacagtttttgttgacattactctt

SEQ ID NO: 229268 - DNA, 25 bp, SARS Virus
acagtttttgtgtacattactcttt

SEQ ID NO: 229269 - DNA, 25 bp, SARS Virus
cagtttttgtggtcattactcttta

SEQ ID NO: 229270 - DNA, 25 bp, SARS Virus
agtttttgtggatattactctttaa

SEQ ID NO: 229271 - DNA, 25 bp, SARS Virus
gtttttgtggactttactctttaaa

SEQ ID NO: 229272 - DNA, 25 bp, SARS Virus
tttttgtggacattactctttaaac

SEQ ID NO: 229273 - DNA, 25 bp, SARS Virus
ttttgtggacattactctttaaact

SEQ ID NO: 229274 - DNA, 25 bp, SARS Virus
tttgtggacatttctctttaaactc

SEQ ID NO: 229275 - DNA, 25 bp, SARS Virus
ttgtggacattattctttaaactct

SEQ ID NO: 229276 - DNA, 25 bp, SARS Virus
tgtggacattactctttaaactctt

SEQ ID NO: 229277 - DNA, 25 bp, SARS Virus
gtggacattactttttaaactctta

SEQ ID NO: 229278 - DNA, 25 bp, SARS Virus
tggacattactctttaaactcttag

SEQ ID NO: 229279 - DNA, 25 bp, SARS Virus
ggacattactctttaaactcttaga

SEQ ID NO: 229280 - DNA, 25 bp, SARS Virus
gacattactctttaaactcttagag

SEQ ID NO: 229281 - DNA, 25 bp, SARS Virus
acattactcttttaactcttagagg

SEQ ID NO: 229282 - DNA, 25 bp, SARS Virus
cattactctttatactcttagaggg

SEQ ID NO: 229283 - DNA, 25 bp, SARS Virus
attactctttaatctcttagagggt

SEQ ID NO: 229284 - DNA, 25 bp, SARS Virus
ttactctttaaattcttagagggtt

SEQ ID NO: 229285 - DNA, 25 bp, SARS Virus
tactctttaaactcttagagggttc

SEQ ID NO: 229286 - DNA, 25 bp, SARS Virus
actctttaaacttttagagggttcg

SEQ ID NO: 229287 - DNA, 25 bp, SARS Virus
ctctttaaactcttagagggttcgt

SEQ ID NO: 229288 - DNA, 25 bp, SARS Virus
tctttaaactcttagagggttcgta

SEQ ID NO: 229289 - DNA, 25 bp, SARS Virus
ctttaaactctttgagggttcgtag

SEQ ID NO: 229290 - DNA, 25 bp, SARS Virus
tttaaactcttatagggttcgtagg

SEQ ID NO: 229291 - DNA, 25 bp, SARS Virus
ttaaactcttagtgggttcgtagga

SEQ ID NO: 229292 - DNA, 25 bp, SARS Virus
taaactcttagatggttcgtaggaa

SEQ ID NO: 229293 - DNA, 25 bp, SARS Virus
aaactcttagagtgttcgtaggaac

SEQ ID NO: 229294 - DNA, 25 bp, SARS Virus
aactcttagaggtttcgtaggaact

SEQ ID NO: 229295 - DNA, 25 bp, SARS Virus
actcttagagggttcgtaggaactc

SEQ ID NO: 229296 - DNA, 25 bp, SARS Virus
ctcttagagggttcgtaggaactct

SEQ ID NO: 229297 - DNA, 25 bp, SARS Virus
tcttagagggtttgtaggaactctt

SEQ ID NO: 229298 - DNA, 25 bp, SARS Virus
cttagagggttcttaggaactcttt

SEQ ID NO: 229299 - DNA, 25 bp, SARS Virus
ttagagggttcgtaggaactcttta

SEQ ID NO: 229300 - DNA, 25 bp, SARS Virus
tagagggttcgttggaactctttaa

SEQ ID NO: 229301 - DNA, 25 bp, SARS Virus
agagggttcgtatgaactctttaag

SEQ ID NO: 229302 - DNA, 25 bp, SARS Virus
gagggttcgtagtaactctttaagt

SEQ ID NO: 229303 - DNA, 25 bp, SARS Virus
agggttcgtaggtactctttaagtt

SEQ ID NO: 229304 - DNA, 25 bp, SARS Virus
gggttcgtaggatctctttaagttg

SEQ ID NO: 229305 - DNA, 25 bp, SARS Virus
ggttcgtaggaattctttaagttga

SEQ ID NO: 229306 - DNA, 25 bp, SARS Virus
gttcgtaggaactctttaagttgag

SEQ ID NO: 229307 - DNA, 25 bp, SARS Virus
ttcgtaggaactttttaagttgagg

SEQ ID NO: 229308 - DNA, 25 bp, SARS Virus
tcgtaggaactctttaagttgagga

SEQ ID NO: 229309 - DNA, 25 bp, SARS Virus
cgtaggaactctttaagttgaggac

SEQ ID NO: 229310 - DNA, 25 bp, SARS Virus
gtaggaactctttaagttgaggacg

SEQ ID NO: 229311 - DNA, 25 bp, SARS Virus
taggaactcttttagttgaggacgt

SEQ ID NO: 229312 - DNA, 25 bp, SARS Virus
aggaactctttatgttgaggacgtg

SEQ ID NO: 229313 - DNA, 25 bp, SARS Virus
ggaactctttaatttgaggacgtga

SEQ ID NO: 229314 - DNA, 25 bp, SARS Virus
gaactctttaagttgaggacgtgat

SEQ ID NO: 229315 - DNA, 25 bp, SARS Virus
aactctttaagttgaggacgtgatt

SEQ ID NO: 229316 - DNA, 25 bp, SARS Virus
actctttaagtttaggacgtgattc

SEQ ID NO: 229317 - DNA, 25 bp, SARS Virus
ctctttaagttgtggacgtgattca

SEQ ID NO: 229318 - DNA, 25 bp, SARS Virus
tctttaagttgatgacgtgattcaa

SEQ ID NO: 229319 - DNA, 25 bp, SARS Virus
ctttaagttgagtacgtgattcaaa

SEQ ID NO: 229320 - DNA, 25 bp, SARS Virus
tttaagttgaggtcgtgattcaaag

SEQ ID NO: 229321 - DNA, 25 bp, SARS Virus
ttaagttgaggatgtgattcaaagc

SEQ ID NO: 229322 - DNA, 25 bp, SARS Virus
taagttgaggacttgattcaaagcg

SEQ ID NO: 229323 - DNA, 25 bp, SARS Virus
aagttgaggacgtgattcaaagcgg

SEQ ID NO: 229324 - DNA, 25 bp, SARS Virus
agttgaggacgttattcaaagcgga

SEQ ID NO: 229325 - DNA, 25 bp, SARS Virus
gttgaggacgtgtttcaaagcggag

SEQ ID NO: 229326 - DNA, 25 bp, SARS Virus
ttgaggacgtgattcaaagcggagt

SEQ ID NO: 229327 - DNA, 25 bp, SARS Virus
tgaggacgtgattcaaagcggagtt

SEQ ID NO: 229328 - DNA, 25 bp, SARS Virus
gaggacgtgatttaaagcggagtta

SEQ ID NO: 229329 - DNA, 25 bp, SARS Virus
aggacgtgattctaagcggagttag

SEQ ID NO: 229330 - DNA, 25 bp, SARS Virus
ggacgtgattcatagcggagttagg

SEQ ID NO: 229331 - DNA, 25 bp, SARS Virus
gacgtgattcaatgcggagttaggt

SEQ ID NO: 229332 - DNA, 25 bp, SARS Virus
acgtgattcaaatcggagttaggta

SEQ ID NO: 229333 - DNA, 25 bp, SARS Virus
cgtgattcaaagtggagttaggtaa

SEQ ID NO: 229334 - DNA, 25 bp, SARS Virus
gtgattcaaagctgagttaggtaag

SEQ ID NO: 229335 - DNA, 25 bp, SARS Virus
tgattcaaagcgtagttaggtaagt

SEQ ID NO: 229336 - DNA, 25 bp, SARS Virus
gattcaaagcggtgttaggtaagtt

SEQ ID NO: 229337 - DNA, 25 bp, SARS Virus
attcaaagcggatttaggtaagttt

SEQ ID NO: 229338 - DNA, 25 bp, SARS Virus
ttcaaagcggagttaggtaagtttc

SEQ ID NO: 229339 - DNA, 25 bp, SARS Virus
tcaaagcggagttaggtaagtttct

SEQ ID NO: 229340 - DNA, 25 bp, SARS Virus
caaagcggagtttggtaagtttcta

SEQ ID NO: 229341 - DNA, 25 bp, SARS Virus
aaagcggagttatgtaagtttctat

SEQ ID NO: 229342 - DNA, 25 bp, SARS Virus
aagcggagttagttaagtttctatc

SEQ ID NO: 229343 - DNA, 25 bp, SARS Virus
agcggagttaggtaagtttctatcc

SEQ ID NO: 229344 - DNA, 25 bp, SARS Virus
gcggagttaggttagtttctatccg

SEQ ID NO: 229345 - DNA, 25 bp, SARS Virus
cggagttaggtatgtttctatccgg

SEQ ID NO: 229346 - DNA, 25 bp, SARS Virus
ggagttaggtaattttctatccgga

SEQ ID NO: 229347 - DNA, 25 bp, SARS Virus
gagttaggtaagtttctatccggac

SEQ ID NO: 229348 - DNA, 25 bp, SARS Virus
agttaggtaagtttctatccggact

SEQ ID NO: 229349 - DNA, 25 bp, SARS Virus
gttaggtaagtttctatccggactc

SEQ ID NO: 229350 - DNA, 25 bp, SARS Virus
ttaggtaagtttttatccggactca

SEQ ID NO: 229351 - DNA, 25 bp, SARS Virus
taggtaagtttctatccggactcaa

SEQ ID NO: 229352 - DNA, 25 bp, SARS Virus
aggtaagtttctttccggactcaaa

SEQ ID NO: 229353 - DNA, 25 bp, SARS Virus
ggtaagtttctatccggactcaaaa

SEQ ID NO: 229354 - DNA, 25 bp, SARS Virus
gtaagtttctattcggactcaaaaa

SEQ ID NO: 229355 - DNA, 25 bp, SARS Virus
taagtttctatctggactcaaaaag

SEQ ID NO: 229356 - DNA, 25 bp, SARS Virus
aagtttctatcctgactcaaaaagt

SEQ ID NO: 229357 - DNA, 25 bp, SARS Virus
agtttctatccgtactcaaaaagtt

SEQ ID NO: 229358 - DNA, 25 bp, SARS Virus
gtttctatccggtctcaaaaagttg

SEQ ID NO: 229359 - DNA, 25 bp, SARS Virus
tttctatccggattcaaaaagttgt

SEQ ID NO: 229360 - DNA, 25 bp, SARS Virus
ttctatccggactcaaaaagttgtc

SEQ ID NO: 229361 - DNA, 25 bp, SARS Virus
tctatccggacttaaaaagttgtca

SEQ ID NO: 229362 - DNA, 25 bp, SARS Virus
ctatccggactctaaaagttgtcat

SEQ ID NO: 229363 - DNA, 25 bp, SARS Virus
tatccggactcataaagttgtcatc

SEQ ID NO: 229364 - DNA, 25 bp, SARS Virus
atccggactcaataagttgtcatca

SEQ ID NO: 229365 - DNA, 25 bp, SARS Virus
tccggactcaaatagttgtcatcac

SEQ ID NO: 229366 - DNA, 25 bp, SARS Virus
ccggactcaaaatgttgtcatcacg

SEQ ID NO: 229367 - DNA, 25 bp, SARS Virus
cggactcaaaaatttgtcatcacgg

SEQ ID NO: 229368 - DNA, 25 bp, SARS Virus
ggactcaaaaagttgtcatcacggg

SEQ ID NO: 229369 - DNA, 25 bp, SARS Virus
gactcaaaaagttgtcatcacgggt

SEQ ID NO: 229370 - DNA, 25 bp, SARS Virus
actcaaaaagttttcatcacgggtt

SEQ ID NO: 229371 - DNA, 25 bp, SARS Virus
ctcaaaaagttgtcatcacgggttt

SEQ ID NO: 229372 - DNA, 25 bp, SARS Virus
tcaaaaagttgttatcacgggtttt

SEQ ID NO: 229373 - DNA, 25 bp, SARS Virus
caaaaagttgtcttcacgggttttc

SEQ ID NO: 229374 - DNA, 25 bp, SARS Virus
aaaaagttgtcatcacgggttttct

SEQ ID NO: 229375 - DNA, 25 bp, SARS Virus
aaaagttgtcattacgggttttcta

SEQ ID NO: 229376 - DNA, 25 bp, SARS Virus
aaagttgtcatctcgggttttctaa

SEQ ID NO: 229377 - DNA, 25 bp, SARS Virus
aagttgtcatcatgggttttctaat

SEQ ID NO: 229378 - DNA, 25 bp, SARS Virus
agttgtcatcactggttttctaatc

SEQ ID NO: 229379 - DNA, 25 bp, SARS Virus
gttgtcatcacgtgttttctaatct

SEQ ID NO: 229380 - DNA, 25 bp, SARS Virus
ttgtcatcacggtttttctaatctg

SEQ ID NO: 229381 - DNA, 25 bp, SARS Virus
tgtcatcacgggttttctaatctgt

SEQ ID NO: 229382 - DNA, 25 bp, SARS Virus
gtcatcacgggttttctaatctgtt

SEQ ID NO: 229383 - DNA, 25 bp, SARS Virus
tcatcacgggttttctaatctgttg

SEQ ID NO: 229384 - DNA, 25 bp, SARS Virus
catcacgggttttctaatctgttgg

SEQ ID NO: 229385 - DNA, 25 bp, SARS Virus
atcacgggttttttaatctgttggt

SEQ ID NO: 229386 - DNA, 25 bp, SARS Virus
tcacgggttttctaatctgttggtg

SEQ ID NO: 229387 - DNA, 25 bp, SARS Virus
cacgggttttcttatctgttggtga

SEQ ID NO: 229388 - DNA, 25 bp, SARS Virus
acgggttttctattctgttggtgac

SEQ ID NO: 229389 - DNA, 25 bp, SARS Virus
cgggttttctaatctgttggtgact

SEQ ID NO: 229390 - DNA, 25 bp, SARS Virus
gggttttctaatttgttggtgactc

SEQ ID NO: 229391 - DNA, 25 bp, SARS Virus
ggttttctaatctgttggtgactct

SEQ ID NO: 229392 - DNA, 25 bp, SARS Virus
gttttctaatcttttggtgactctt

SEQ ID NO: 229393 - DNA, 25 bp, SARS Virus
ttttctaatctgatggtgactcttc

SEQ ID NO: 229394 - DNA, 25 bp, SARS Virus
tttctaatctgtaggtgactcttca

SEQ ID NO: 229395 - DNA, 25 bp, SARS Virus
ttctaatctgttagtgactcttcag

SEQ ID NO: 229396 - DNA, 25 bp, SARS Virus
tctaatctgttgatgactcttcaga

SEQ ID NO: 229397 - DNA, 25 bp, SARS Virus
ctaatctgttggagactcttcagac

SEQ ID NO: 229398 - DNA, 25 bp, SARS Virus
taatctgttggtaactcttcagaca

SEQ ID NO: 229399 - DNA, 25 bp, SARS Virus
aatctgttggtgactcttcagacaa

SEQ ID NO: 229400 - DNA, 25 bp, SARS Virus
atctgttggtgaatcttcagacaac

SEQ ID NO: 229401 - DNA, 25 bp, SARS Virus
tctgttggtgacacttcagacaaca

SEQ ID NO: 229402 - DNA, 25 bp, SARS Virus
ctgttggtgactattcagacaacat

SEQ ID NO: 229403 - DNA, 25 bp, SARS Virus
tgttggtgactcatcagacaacatg

SEQ ID NO: 229404 - DNA, 25 bp, SARS Virus
gttggtgactctacagacaacatgt

SEQ ID NO: 229405 - DNA, 25 bp, SARS Virus
ttggtgactcttaagacaacatgtt

SEQ ID NO: 229406 - DNA, 25 bp, SARS Virus
tggtgactcttcagacaacatgttc

SEQ ID NO: 229407 - DNA, 25 bp, SARS Virus
ggtgactcttcaaacaacatgttct

SEQ ID NO: 229408 - DNA, 25 bp, SARS Virus
gtgactcttcagacaacatgttctg

SEQ ID NO: 229409 - DNA, 25 bp, SARS Virus
tgactcttcagaaaacatgttctgg

SEQ ID NO: 229410 - DNA, 25 bp, SARS Virus
gactcttcagacaacatgttctggt

SEQ ID NO: 229411 - DNA, 25 bp, SARS Virus
actcttcagacaacatgttctggtg

SEQ ID NO: 229412 - DNA, 25 bp, SARS Virus
ctcttcagacaaaatgttctggtgg

SEQ ID NO: 229413 - DNA, 25 bp, SARS Virus
tcttcagacaacatgttctggtggt

SEQ ID NO: 229414 - DNA, 25 bp, SARS Virus
cttcagacaacaagttctggtggtc

SEQ ID NO: 229415 - DNA, 25 bp, SARS Virus
ttcagacaacatattctggtggtca

SEQ ID NO: 229416 - DNA, 25 bp, SARS Virus
tcagacaacatgatctggtggtcaa

SEQ ID NO: 229417 - DNA, 25 bp, SARS Virus
cagacaacatgtactggtggtcaat

SEQ ID NO: 229418 - DNA, 25 bp, SARS Virus
agacaacatgttatggtggtcaatg

SEQ ID NO: 229419 - DNA, 25 bp, SARS Virus
gacaacatgttcaggtggtcaatgt

SEQ ID NO: 229420 - DNA, 25 bp, SARS Virus
acaacatgttctagtggtcaatgta

SEQ ID NO: 229421 - DNA, 25 bp, SARS Virus
caacatgttctgatggtcaatgtat

SEQ ID NO: 229422 - DNA, 25 bp, SARS Virus
aacatgttctggaggtcaatgtata

SEQ ID NO: 229423 - DNA, 25 bp, SARS Virus
acatgttctggtagtcaatgtatac

SEQ ID NO: 229424 - DNA, 25 bp, SARS Virus
catgttctggtgatcaatgtatacg

SEQ ID NO: 229425 - DNA, 25 bp, SARS Virus
atgttctggtggacaatgtatacgg

SEQ ID NO: 229426 - DNA, 25 bp, SARS Virus
tgttctggtggtaaatgtatacggt

SEQ ID NO: 229427 - DNA, 25 bp, SARS Virus
gttctggtggtcaatgtatacggta

SEQ ID NO: 229428 - DNA, 25 bp, SARS Virus
ttctggtggtcaatgtatacggtat

SEQ ID NO: 229429 - DNA, 25 bp, SARS Virus
tctggtggtcaaagtatacggtatt

SEQ ID NO: 229430 - DNA, 25 bp, SARS Virus
ctggtggtcaatatatacggtatta

SEQ ID NO: 229431 - DNA, 25 bp, SARS Virus
tggtggtcaatgaatacggtattat

SEQ ID NO: 229432 - DNA, 25 bp, SARS Virus
ggtggtcaatgtatacggtattatt

SEQ ID NO: 229433 - DNA, 25 bp, SARS Virus
gtggtcaatgtaaacggtattatta

SEQ ID NO: 229434 - DNA, 25 bp, SARS Virus
tggtcaatgtatacggtattattac

SEQ ID NO: 229435 - DNA, 25 bp, SARS Virus
ggtcaatgtataaggtattattact

SEQ ID NO: 229436 - DNA, 25 bp, SARS Virus
gtcaatgtatacagtattattactg

SEQ ID NO: 229437 - DNA, 25 bp, SARS Virus
tcaatgtatacgatattattactgt

SEQ ID NO: 229438 - DNA, 25 bp, SARS Virus
caatgtatacggaattattactgtg

SEQ ID NO: 229439 - DNA, 25 bp, SARS Virus
aatgtatacggtattattactgtga

SEQ ID NO: 229440 - DNA, 25 bp, SARS Virus
atgtatacggtaatattactgtgac

SEQ ID NO: 229441 - DNA, 25 bp, SARS Virus
tgtatacggtataattactgtgaca

SEQ ID NO: 229442 - DNA, 25 bp, SARS Virus
gtatacggtattattactgtgacaa

SEQ ID NO: 229443 - DNA, 25 bp, SARS Virus
tatacggtattaatactgtgacaac

SEQ ID NO: 229444 - DNA, 25 bp, SARS Virus
atacggtattataactgtgacaacc

SEQ ID NO: 229445 - DNA, 25 bp, SARS Virus
tacggtattattactgtgacaacca

SEQ ID NO: 229446 - DNA, 25 bp, SARS Virus
acggtattattaatgtgacaaccac

SEQ ID NO: 229447 - DNA, 25 bp, SARS Virus
cggtattattacagtgacaaccact

SEQ ID NO: 229448 - DNA, 25 bp, SARS Virus
ggtattattactatgacaaccactc

SEQ ID NO: 229449 - DNA, 25 bp, SARS Virus
gtattattactgagacaaccactcg

SEQ ID NO: 229450 - DNA, 25 bp, SARS Virus
tattattactgtaacaaccactcgt

SEQ ID NO: 229451 - DNA, 25 bp, SARS Virus
attattactgtgacaaccactcgtc

SEQ ID NO: 229452 - DNA, 25 bp, SARS Virus
ttattactgtgaaaaccactcgtcc

SEQ ID NO: 229453 - DNA, 25 bp, SARS Virus
tattactgtgacaaccactcgtcca

SEQ ID NO: 229454 - DNA, 25 bp, SARS Virus
attactgtgacaaccactcgtccag

SEQ ID NO: 229455 - DNA, 25 bp, SARS Virus
ttactgtgacaaacactcgtccaga

SEQ ID NO: 229456 - DNA, 25 bp, SARS Virus
tactgtgacaacaactcgtccagac

SEQ ID NO: 229457 - DNA, 25 bp, SARS Virus
actgtgacaaccactcgtccagact

SEQ ID NO: 229458 - DNA, 25 bp, SARS Virus
ctgtgacaaccaatcgtccagactt

SEQ ID NO: 229459 - DNA, 25 bp, SARS Virus
tgtgacaaccacacgtccagacttc

SEQ ID NO: 229460 - DNA, 25 bp, SARS Virus
gtgacaaccactagtccagacttca

SEQ ID NO: 229461 - DNA, 25 bp, SARS Virus
tgacaaccactcatccagacttcat

SEQ ID NO: 229462 - DNA, 25 bp, SARS Virus
gacaaccactcgaccagacttcata

SEQ ID NO: 229463 - DNA, 25 bp, SARS Virus
acaaccactcgtacagacttcatat

SEQ ID NO: 229464 - DNA, 25 bp, SARS Virus
caaccactcgtcaagacttcatatt

SEQ ID NO: 229465 - DNA, 25 bp, SARS Virus
aaccactcgtccagacttcatattt

SEQ ID NO: 229466 - DNA, 25 bp, SARS Virus
accactcgtccaaacttcatatttg

SEQ ID NO: 229467 - DNA, 25 bp, SARS Virus
ccactcgtccagacttcatatttgg

SEQ ID NO: 229468 - DNA, 25 bp, SARS Virus
cactcgtccagaattcatatttggt

SEQ ID NO: 229469 - DNA, 25 bp, SARS Virus
actcgtccagacatcatatttggta

SEQ ID NO: 229470 - DNA, 25 bp, SARS Virus
ctcgtccagactacatatttggtac

SEQ ID NO: 229471 - DNA, 25 bp, SARS Virus
tcgtccagacttaatatttggtacc

SEQ ID NO: 229472 - DNA, 25 bp, SARS Virus
cgtccagacttcatatttggtaccg

SEQ ID NO: 229473 - DNA, 25 bp, SARS Virus
gtccagacttcaaatttggtaccgc

SEQ ID NO: 229474 - DNA, 25 bp, SARS Virus
tccagacttcatatttggtaccgca

SEQ ID NO: 229475 - DNA, 25 bp, SARS Virus
ccagacttcataattggtaccgcag

SEQ ID NO: 229476 - DNA, 25 bp, SARS Virus
cagacttcatatatggtaccgcagc

SEQ ID NO: 229477 - DNA, 25 bp, SARS Virus
agacttcatattaggtaccgcagct

SEQ ID NO: 229478 - DNA, 25 bp, SARS Virus
gacttcatatttagtaccgcagctg

SEQ ID NO: 229479 - DNA, 25 bp, SARS Virus
acttcatatttgataccgcagctgt

SEQ ID NO: 229480 - DNA, 25 bp, SARS Virus
cttcatatttggaaccgcagctgtt

SEQ ID NO: 229481 - DNA, 25 bp, SARS Virus
ttcatatttggtaccgcagctgttc

SEQ ID NO: 229482 - DNA, 25 bp, SARS Virus
tcatatttggtaacgcagctgttct

SEQ ID NO: 229483 - DNA, 25 bp, SARS Virus
catatttggtacagcagctgttctg

SEQ ID NO: 229484 - DNA, 25 bp, SARS Virus
atatttggtaccacagctgttctgc

SEQ ID NO: 229485 - DNA, 25 bp, SARS Virus
tatttggtaccgaagctgttctgca

SEQ ID NO: 229486 - DNA, 25 bp, SARS Virus
atttggtaccgcagctgttctgcat

SEQ ID NO: 229487 - DNA, 25 bp, SARS Virus
tttggtaccgcaactgttctgcatt

SEQ ID NO: 229488 - DNA, 25 bp, SARS Virus
ttggtaccgcagatgttctgcatta

SEQ ID NO: 229489 - DNA, 25 bp, SARS Virus
tggtaccgcagcagttctgcattac

SEQ ID NO: 229490 - DNA, 25 bp, SARS Virus
ggtaccgcagctattctgcattact

SEQ ID NO: 229491 - DNA, 25 bp, SARS Virus
gtaccgcagctgatctgcattactg

SEQ ID NO: 229492 - DNA, 25 bp, SARS Virus
taccgcagctgtactgcattactga

SEQ ID NO: 229493 - DNA, 25 bp, SARS Virus
accgcagctgttatgcattactgac

SEQ ID NO: 229494 - DNA, 25 bp, SARS Virus
ccgcagctgttcagcattactgaca

SEQ ID NO: 229495 - DNA, 25 bp, SARS Virus
cgcagctgttctacattactgacaa

SEQ ID NO: 229496 - DNA, 25 bp, SARS Virus
gcagctgttctgaattactgacaag

SEQ ID NO: 229497 - DNA, 25 bp, SARS Virus
cagctgttctgcattactgacaagt

SEQ ID NO: 229498 - DNA, 25 bp, SARS Virus
agctgttctgcaatactgacaagtc

SEQ ID NO: 229499 - DNA, 25 bp, SARS Virus
gctgttctgcataactgacaagtct

SEQ ID NO: 229500 - DNA, 25 bp, SARS Virus
ctgttctgcattactgacaagtctt

SEQ ID NO: 229501 - DNA, 25 bp, SARS Virus
tgttctgcattaatgacaagtcttt

SEQ ID NO: 229502 - DNA, 25 bp, SARS Virus
gttctgcattacagacaagtcttta

SEQ ID NO: 229503 - DNA, 25 bp, SARS Virus
ttctgcattactaacaagtctttat

SEQ ID NO: 229504 - DNA, 25 bp, SARS Virus
tctgcattactgacaagtctttatg

SEQ ID NO: 229505 - DNA, 25 bp, SARS Virus
ctgcattactgaaaagtctttatgg

SEQ ID NO: 229506 - DNA, 25 bp, SARS Virus
tgcattactgacaagtctttatggt

SEQ ID NO: 229507 - DNA, 25 bp, SARS Virus
gcattactgacaagtctttatggta

SEQ ID NO: 229508 - DNA, 25 bp, SARS Virus
cattactgacaaatctttatggtag

SEQ ID NO: 229509 - DNA, 25 bp, SARS Virus
attactgacaagactttatggtagt

SEQ ID NO: 229510 - DNA, 25 bp, SARS Virus
ttactgacaagtatttatggtagtt

SEQ ID NO: 229511 - DNA, 25 bp, SARS Virus
tactgacaagtcattatggtagttc

SEQ ID NO: 229512 - DNA, 25 bp, SARS Virus
actgacaagtctatatggtagttca

SEQ ID NO: 229513 - DNA, 25 bp, SARS Virus
ctgacaagtcttaatggtagttcat

SEQ ID NO: 229514 - DNA, 25 bp, SARS Virus
tgacaagtctttatggtagttcata

SEQ ID NO: 229515 - DNA, 25 bp, SARS Virus
gacaagtctttaaggtagttcatac

SEQ ID NO: 229516 - DNA, 25 bp, SARS Virus
acaagtctttatagtagttcatacc

SEQ ID NO: 229517 - DNA, 25 bp, SARS Virus
caagtctttatgatagttcatacca

SEQ ID NO: 229518 - DNA, 25 bp, SARS Virus
aagtctttatggaagttcataccac

SEQ ID NO: 229519 - DNA, 25 bp, SARS Virus
agtctttatggtagttcataccact

SEQ ID NO: 229520 - DNA, 25 bp, SARS Virus
gtctttatggtaattcataccactg

SEQ ID NO: 229521 - DNA, 25 bp, SARS Virus
tctttatggtagatcataccactgt

SEQ ID NO: 229522 - DNA, 25 bp, SARS Virus
ctttatggtagtacataccactgtc

SEQ ID NO: 229523 - DNA, 25 bp, SARS Virus
tttatggtagttaataccactgtcg

SEQ ID NO: 229524 - DNA, 25 bp, SARS Virus
ttatggtagttcataccactgtcga

SEQ ID NO: 229525 - DNA, 25 bp, SARS Virus
tatggtagttcaaaccactgtcgac

SEQ ID NO: 229526 - DNA, 25 bp, SARS Virus
atggtagttcataccactgtcgacg

SEQ ID NO: 229527 - DNA, 25 bp, SARS Virus
tggtagttcataacactgtcgacga

SEQ ID NO: 229528 - DNA, 25 bp, SARS Virus
ggtagttcatacaactgtcgacgag

SEQ ID NO: 229529 - DNA, 25 bp, SARS Virus
gtagttcataccactgtcgacgaga

SEQ ID NO: 229530 - DNA, 25 bp, SARS Virus
tagttcataccaatgtcgacgagaa

SEQ ID NO: 229531 - DNA, 25 bp, SARS Virus
agttcataccacagtcgacgagaaa

SEQ ID NO: 229532 - DNA, 25 bp, SARS Virus
gttcataccactatcgacgagaaac

SEQ ID NO: 229533 - DNA, 25 bp, SARS Virus
ttcataccactgacgacgagaaacg

SEQ ID NO: 229534 - DNA, 25 bp, SARS Virus
tcataccactgtagacgagaaacgt

SEQ ID NO: 229535 - DNA, 25 bp, SARS Virus
cataccactgtcaacgagaaacgtt

SEQ ID NO: 229536 - DNA, 25 bp, SARS Virus
ataccactgtcgacgagaaacgttt

SEQ ID NO: 229537 - DNA, 25 bp, SARS Virus
taccactgtcgaagagaaacgttta

SEQ ID NO: 229538 - DNA, 25 bp, SARS Virus
accactgtcgacaagaaacgtttag

SEQ ID NO: 229539 - DNA, 25 bp, SARS Virus
ccactgtcgacgagaaacgtttagt

SEQ ID NO: 229540 - DNA, 25 bp, SARS Virus
cactgtcgacgaaaaacgtttagtc

SEQ ID NO: 229541 - DNA, 25 bp, SARS Virus
actgtcgacgagaaacgtttagtcc

SEQ ID NO: 229542 - DNA, 25 bp, SARS Virus
ctgtcgacgagaaacgtttagtcct

SEQ ID NO: 229543 - DNA, 25 bp, SARS Virus
tgtcgacgagaaacgtttagtcctt

SEQ ID NO: 229544 - DNA, 25 bp, SARS Virus
gtcgacgagaaaagtttagtcctta

SEQ ID NO: 229545 - DNA, 25 bp, SARS Virus
tcgacgagaaacatttagtccttaa

SEQ ID NO: 229546 - DNA, 25 bp, SARS Virus
cgacgagaaacgattagtccttaac

SEQ ID NO: 229547 - DNA, 25 bp, SARS Virus
gacgagaaacgtatagtccttaact

SEQ ID NO: 229548 - DNA, 25 bp, SARS Virus
acgagaaacgttaagtccttaactc

SEQ ID NO: 229549 - DNA, 25 bp, SARS Virus
cgagaaacgtttagtccttaactca

SEQ ID NO: 229550 - DNA, 25 bp, SARS Virus
gagaaacgtttaatccttaactcac

SEQ ID NO: 229551 - DNA, 25 bp, SARS Virus
agaaacgtttagaccttaactcacc

SEQ ID NO: 229552 - DNA, 25 bp, SARS Virus
gaaacgtttagtacttaactcacca

SEQ ID NO: 229553 - DNA, 25 bp, SARS Virus
aaacgtttagtcattaactcaccaa

SEQ ID NO: 229554 - DNA, 25 bp, SARS Virus
aacgtttagtccataactcaccaaa

SEQ ID NO: 229555 - DNA, 25 bp, SARS Virus
acgtttagtcctaaactcaccaaac

SEQ ID NO: 229556 - DNA, 25 bp, SARS Virus
cgtttagtccttaactcaccaaacg

SEQ ID NO: 229557 - DNA, 25 bp, SARS Virus
gtttagtccttaactcaccaaacga

SEQ ID NO: 229558 - DNA, 25 bp, SARS Virus
tttagtccttaaatcaccaaacgac

SEQ ID NO: 229559 - DNA, 25 bp, SARS Virus
ttagtccttaacacaccaaacgacg

SEQ ID NO: 229560 - DNA, 25 bp, SARS Virus
tagtccttaactaaccaaacgacgt

SEQ ID NO: 229561 - DNA, 25 bp, SARS Virus
agtccttaactcaccaaacgacgta

SEQ ID NO: 229562 - DNA, 25 bp, SARS Virus
gtccttaactcaacaaacgacgtag

SEQ ID NO: 229563 - DNA, 25 bp, SARS Virus
tccttaactcacaaaacgacgtagt

SEQ ID NO: 229564 - DNA, 25 bp, SARS Virus
ccttaactcaccaaacgacgtagtt

SEQ ID NO: 229565 - DNA, 25 bp, SARS Virus
cttaactcaccaaacgacgtagttc

SEQ ID NO: 229566 - DNA, 25 bp, SARS Virus
ttaactcaccaaacgacgtagttca

SEQ ID NO: 229567 - DNA, 25 bp, SARS Virus
taactcaccaaaagacgtagttcac

SEQ ID NO: 229568 - DNA, 25 bp, SARS Virus
aactcaccaaacaacgtagttcaca

SEQ ID NO: 229569 - DNA, 25 bp, SARS Virus
actcaccaaacgacgtagttcacac

SEQ ID NO: 229570 - DNA, 25 bp, SARS Virus
ctcaccaaacgaagtagttcacacg

SEQ ID NO: 229571 - DNA, 25 bp, SARS Virus
tcaccaaacgacatagttcacacgc

SEQ ID NO: 229572 - DNA, 25 bp, SARS Virus
caccaaacgacgaagttcacacgcg

SEQ ID NO: 229573 - DNA, 25 bp, SARS Virus
accaaacgacgtagttcacacgcgc

SEQ ID NO: 229574 - DNA, 25 bp, SARS Virus
ccaaacgacgtaattcacacgcgcg

SEQ ID NO: 229575 - DNA, 25 bp, SARS Virus
caaacgacgtagatcacacgcgcgt

SEQ ID NO: 229576 - DNA, 25 bp, SARS Virus
aaacgacgtagtacacacgcgcgtt

SEQ ID NO: 229577 - DNA, 25 bp, SARS Virus
aacgacgtagttaacacgcgcgttt

SEQ ID NO: 229578 - DNA, 25 bp, SARS Virus
acgacgtagttcacacgcgcgtttt

SEQ ID NO: 229579 - DNA, 25 bp, SARS Virus
cgacgtagttcaaacgcgcgttttt

SEQ ID NO: 229580 - DNA, 25 bp, SARS Virus
gacgtagttcacacgcgcgttttta

SEQ ID NO: 229581 - DNA, 25 bp, SARS Virus
acgtagttcacaagcgcgtttttaa

SEQ ID NO: 229582 - DNA, 25 bp, SARS Virus
cgtagttcacacacgcgtttttaac

SEQ ID NO: 229583 - DNA, 25 bp, SARS Virus
gtagttcacacgagcgtttttaact

SEQ ID NO: 229584 - DNA, 25 bp, SARS Virus
tagttcacacgcacgtttttaacta

SEQ ID NO: 229585 - DNA, 25 bp, SARS Virus
agttcacacgcgagtttttaactag

SEQ ID NO: 229586 - DNA, 25 bp, SARS Virus
gttcacacgcgcatttttaactaga

SEQ ID NO: 229587 - DNA, 25 bp, SARS Virus
ttcacacgcgcgattttaactagac

SEQ ID NO: 229588 - DNA, 25 bp, SARS Virus
tcacacgcgcgtatttaactagact

SEQ ID NO: 229589 - DNA, 25 bp, SARS Virus
cacacgcgcgttattaactagacta

SEQ ID NO: 229590 - DNA, 25 bp, SARS Virus
acacgcgcgtttataactagactat

SEQ ID NO: 229591 - DNA, 25 bp, SARS Virus
cacgcgcgttttaaactagactatt

SEQ ID NO: 229592 - DNA, 25 bp, SARS Virus
acgcgcgtttttaactagactattg

SEQ ID NO: 229593 - DNA, 25 bp, SARS Virus
cgcgcgtttttaactagactattgt

SEQ ID NO: 229594 - DNA, 25 bp, SARS Virus
gcgcgtttttaaatagactattgtg

SEQ ID NO: 229595 - DNA, 25 bp, SARS Virus
cgcgtttttaacaagactattgtgg

SEQ ID NO: 229596 - DNA, 25 bp, SARS Virus
gcgtttttaactagactattgtggt

SEQ ID NO: 229597 - DNA, 25 bp, SARS Virus
cgtttttaactaaactattgtggtc

SEQ ID NO: 229598 - DNA, 25 bp, SARS Virus
gtttttaactagactattgtggtcg

SEQ ID NO: 229599 - DNA, 25 bp, SARS Virus
tttttaactagaatattgtggtcgt

SEQ ID NO: 229600 - DNA, 25 bp, SARS Virus
ttttaactagacaattgtggtcgtc

SEQ ID NO: 229601 - DNA, 25 bp, SARS Virus
tttaactagactattgtggtcgtcg

SEQ ID NO: 229602 - DNA, 25 bp, SARS Virus
ttaactagactaatgtggtcgtcgg

SEQ ID NO: 229603 - DNA, 25 bp, SARS Virus
taactagactatagtggtcgtcgga

SEQ ID NO: 229604 - DNA, 25 bp, SARS Virus
aactagactattatggtcgtcggac

SEQ ID NO: 229605 - DNA, 25 bp, SARS Virus
actagactattgaggtcgtcggaca

SEQ ID NO: 229606 - DNA, 25 bp, SARS Virus
ctagactattgtagtcgtcggacac

SEQ ID NO: 229607 - DNA, 25 bp, SARS Virus
tagactattgtgatcgtcggacact

SEQ ID NO: 229608 - DNA, 25 bp, SARS Virus
agactattgtggacgtcggacactc

SEQ ID NO: 229609 - DNA, 25 bp, SARS Virus
gactattgtggtagtcggacactcc

SEQ ID NO: 229610 - DNA, 25 bp, SARS Virus
actattgtggtcatcggacactccc

SEQ ID NO: 229611 - DNA, 25 bp, SARS Virus
ctattgtggtcgacggacactccct

SEQ ID NO: 229612 - DNA, 25 bp, SARS Virus
tattgtggtcgtaggacactccctt

SEQ ID NO: 229613 - DNA, 25 bp, SARS Virus
attgtggtcgtcagacactcccttt

SEQ ID NO: 229614 - DNA, 25 bp, SARS Virus
ttgtggtcgtcgaacactccctttt

SEQ ID NO: 229615 - DNA, 25 bp, SARS Virus
tgtggtcgtcggacactcccttttg

SEQ ID NO: 229616 - DNA, 25 bp, SARS Virus
gtggtcgtcggaaactcccttttgg

SEQ ID NO: 229617 - DNA, 25 bp, SARS Virus
tggtcgtcggacactcccttttggt

SEQ ID NO: 229618 - DNA, 25 bp, SARS Virus
ggtcgtcggacaatcccttttggtg

SEQ ID NO: 229619 - DNA, 25 bp, SARS Virus
gtcgtcggacacacccttttggtgt

SEQ ID NO: 229620 - DNA, 25 bp, SARS Virus
tcgtcggacactaccttttggtgtg

SEQ ID NO: 229621 - DNA, 25 bp, SARS Virus
cgtcggacactcacttttggtgtgt

SEQ ID NO: 229622 - DNA, 25 bp, SARS Virus
gtcggacactccattttggtgtgtc

SEQ ID NO: 229623 - DNA, 25 bp, SARS Virus
tcggacactcccatttggtgtgtca

SEQ ID NO: 229624 - DNA, 25 bp, SARS Virus
cggacactccctattggtgtgtcac

SEQ ID NO: 229625 - DNA, 25 bp, SARS Virus
ggacactcccttatggtgtgtcacc

SEQ ID NO: 229626 - DNA, 25 bp, SARS Virus
gacactccctttaggtgtgtcacca

SEQ ID NO: 229627 - DNA, 25 bp, SARS Virus
acactcccttttagtgtgtcaccac

SEQ ID NO: 229628 - DNA, 25 bp, SARS Virus
cactcccttttgatgtgtcaccaca

SEQ ID NO: 229629 - DNA, 25 bp, SARS Virus
actcccttttggagtgtcaccacaa

SEQ ID NO: 229630 - DNA, 25 bp, SARS Virus
ctcccttttggtatgtcaccacaat

SEQ ID NO: 229631 - DNA, 25 bp, SARS Virus
tcccttttggtgagtcaccacaatt

SEQ ID NO: 229632 - DNA, 25 bp, SARS Virus
cccttttggtgtatcaccacaattt

SEQ ID NO: 229633 - DNA, 25 bp, SARS Virus
ccttttggtgtgacaccacaatttt

SEQ ID NO: 229634 - DNA, 25 bp, SARS Virus
cttttggtgtgtaaccacaattttg

SEQ ID NO: 229635 - DNA, 25 bp, SARS Virus
ttttggtgtgtcaccacaattttga

SEQ ID NO: 229636 - DNA, 25 bp, SARS Virus
tttggtgtgtcaacacaattttgac

SEQ ID NO: 229637 - DNA, 25 bp, SARS Virus
ttggtgtgtcacaacaattttgact

SEQ ID NO: 229638 - DNA, 25 bp, SARS Virus
tggtgtgtcaccacaattttgacta

SEQ ID NO: 229639 - DNA, 25 bp, SARS Virus
ggtgtgtcaccaaaattttgactag

SEQ ID NO: 229640 - DNA, 25 bp, SARS Virus
gtgtgtcaccacaattttgactaga

SEQ ID NO: 229641 - DNA, 25 bp, SARS Virus
tgtgtcaccacaattttgactagag

SEQ ID NO: 229642 - DNA, 25 bp, SARS Virus
gtgtcaccacaaatttgactagaga

SEQ ID NO: 229643 - DNA, 25 bp, SARS Virus
tgtcaccacaatattgactagagac

SEQ ID NO: 229644 - DNA, 25 bp, SARS Virus
gtcaccacaattatgactagagaca

SEQ ID NO: 229645 - DNA, 25 bp, SARS Virus
tcaccacaatttagactagagacaa

SEQ ID NO: 229646 - DNA, 25 bp, SARS Virus
caccacaattttaactagagacaac

SEQ ID NO: 229647 - DNA, 25 bp, SARS Virus
accacaattttgactagagacaaca

SEQ ID NO: 229648 - DNA, 25 bp, SARS Virus
ccacaattttgaatagagacaacag

SEQ ID NO: 229649 - DNA, 25 bp, SARS Virus
cacaattttgacaagagacaacagg

SEQ ID NO: 229650 - DNA, 25 bp, SARS Virus
acaattttgactagagacaacaggt

SEQ ID NO: 229651 - DNA, 25 bp, SARS Virus
caattttgactaaagacaacaggtt

SEQ ID NO: 229652 - DNA, 25 bp, SARS Virus
aattttgactagagacaacaggtta

SEQ ID NO: 229653 - DNA, 25 bp, SARS Virus
attttgactagaaacaacaggttac

SEQ ID NO: 229654 - DNA, 25 bp, SARS Virus
ttttgactagagacaacaggttaca

SEQ ID NO: 229655 - DNA, 25 bp, SARS Virus
tttgactagagaaaacaggttacaa

SEQ ID NO: 229656 - DNA, 25 bp, SARS Virus
ttgactagagacaacaggttacaag

SEQ ID NO: 229657 - DNA, 25 bp, SARS Virus
tgactagagacaacaggttacaagg

SEQ ID NO: 229658 - DNA, 25 bp, SARS Virus
gactagagacaaaaggttacaaggt

SEQ ID NO: 229659 - DNA, 25 bp, SARS Virus
actagagacaacaggttacaaggtt

SEQ ID NO: 229660 - DNA, 25 bp, SARS Virus
ctagagacaacaagttacaaggttc

SEQ ID NO: 229661 - DNA, 25 bp, SARS Virus
tagagacaacagattacaaggttcg

SEQ ID NO: 229662 - DNA, 25 bp, SARS Virus
agagacaacaggatacaaggttcgt

SEQ ID NO: 229663 - DNA, 25 bp, SARS Virus
gagacaacaggtaacaaggttcgtg

SEQ ID NO: 229664 - DNA, 25 bp, SARS Virus
agacaacaggttacaaggttcgtgg

SEQ ID NO: 229665 - DNA, 25 bp, SARS Virus
gacaacaggttaaaaggttcgtgga

SEQ ID NO: 229666 - DNA, 25 bp, SARS Virus
acaacaggttacaaggttcgtggaa

SEQ ID NO: 229667 - DNA, 25 bp, SARS Virus
caacaggttacaaggttcgtggaaa

SEQ ID NO: 229668 - DNA, 25 bp, SARS Virus
aacaggttacaaagttcgtggaaaa

SEQ ID NO: 229669 - DNA, 25 bp, SARS Virus
acaggttacaagattcgtggaaaat

SEQ ID NO: 229670 - DNA, 25 bp, SARS Virus
caggttacaaggatcgtggaaaatg

SEQ ID NO: 229671 - DNA, 25 bp, SARS Virus
aggttacaaggtacgtggaaaatgc

SEQ ID NO: 229672 - DNA, 25 bp, SARS Virus
ggttacaaggttagtggaaaatgcc

SEQ ID NO: 229673 - DNA, 25 bp, SARS Virus
gttacaaggttcatggaaaatgccc

SEQ ID NO: 229674 - DNA, 25 bp, SARS Virus
ttacaaggttcgaggaaaatgcccg

SEQ ID NO: 229675 - DNA, 25 bp, SARS Virus
tacaaggttcgtagaaaatgcccga

SEQ ID NO: 229676 - DNA, 25 bp, SARS Virus
acaaggttcgtgaaaaatgcccgaa

SEQ ID NO: 229677 - DNA, 25 bp, SARS Virus
caaggttcgtggaaaatgcccgaaa

SEQ ID NO: 229678 - DNA, 25 bp, SARS Virus
aaggttcgtggaaaatgcccgaaag

SEQ ID NO: 229679 - DNA, 25 bp, SARS Virus
aggttcgtggaaaatgcccgaaagg

SEQ ID NO: 229680 - DNA, 25 bp, SARS Virus
ggttcgtggaaaatgcccgaaaggg

SEQ ID NO: 229681 - DNA, 25 bp, SARS Virus
gttcgtggaaaaagcccgaaaggga

SEQ ID NO: 229682 - DNA, 25 bp, SARS Virus
ttcgtggaaaatacccgaaagggaa

SEQ ID NO: 229683 - DNA, 25 bp, SARS Virus
tcgtggaaaatgaccgaaagggaac

SEQ ID NO: 229684 - DNA, 25 bp, SARS Virus
cgtggaaaatgcacgaaagggaacc

SEQ ID NO: 229685 - DNA, 25 bp, SARS Virus
gtggaaaatgccagaaagggaacca

SEQ ID NO: 229686 - DNA, 25 bp, SARS Virus
tggaaaatgcccaaaagggaaccat

SEQ ID NO: 229687 - DNA, 25 bp, SARS Virus
ggaaaatgcccgaaagggaaccatt

SEQ ID NO: 229688 - DNA, 25 bp, SARS Virus
gaaaatgcccgaaagggaaccattg

SEQ ID NO: 229689 - DNA, 25 bp, SARS Virus
aaaatgcccgaaagggaaccattga

SEQ ID NO: 229690 - DNA, 25 bp, SARS Virus
aaatgcccgaaaaggaaccattgaa

SEQ ID NO: 229691 - DNA, 25 bp, SARS Virus
aatgcccgaaagagaaccattgaaa

SEQ ID NO: 229692 - DNA, 25 bp, SARS Virus
atgcccgaaaggaaaccattgaaat

SEQ ID NO: 229693 - DNA, 25 bp, SARS Virus
tgcccgaaagggaaccattgaaata

SEQ ID NO: 229694 - DNA, 25 bp, SARS Virus
gcccgaaagggaaccattgaaatat

SEQ ID NO: 229695 - DNA, 25 bp, SARS Virus
cccgaaagggaaacattgaaatatc

SEQ ID NO: 229696 - DNA, 25 bp, SARS Virus
ccgaaagggaacaattgaaatatca

SEQ ID NO: 229697 - DNA, 25 bp, SARS Virus
cgaaagggaaccattgaaatatcaa

SEQ ID NO: 229698 - DNA, 25 bp, SARS Virus
gaaagggaaccaatgaaatatcaat

SEQ ID NO: 229699 - DNA, 25 bp, SARS Virus
aaagggaaccatagaaatatcaatg

SEQ ID NO: 229700 - DNA, 25 bp, SARS Virus
aagggaaccattaaaatatcaatgg

SEQ ID NO: 229701 - DNA, 25 bp, SARS Virus
agggaaccattgaaatatcaatggc

SEQ ID NO: 229702 - DNA, 25 bp, SARS Virus
gggaaccattgaaatatcaatggcg

SEQ ID NO: 229703 - DNA, 25 bp, SARS Virus
ggaaccattgaaatatcaatggcgt

SEQ ID NO: 229704 - DNA, 25 bp, SARS Virus
gaaccattgaaaaatcaatggcgtc

SEQ ID NO: 229705 - DNA, 25 bp, SARS Virus
aaccattgaaatatcaatggcgtcc

SEQ ID NO: 229706 - DNA, 25 bp, SARS Virus
accattgaaataacaatggcgtcct

SEQ ID NO: 229707 - DNA, 25 bp, SARS Virus
ccattgaaatataaatggcgtcctg

SEQ ID NO: 229708 - DNA, 25 bp, SARS Virus
cattgaaatatcaatggcgtcctga

SEQ ID NO: 229709 - DNA, 25 bp, SARS Virus
attgaaatatcaatggcgtcctgag

SEQ ID NO: 229710 - DNA, 25 bp, SARS Virus
ttgaaatatcaaaggcgtcctgagt

SEQ ID NO: 229711 - DNA, 25 bp, SARS Virus
tgaaatatcaatagcgtcctgagtt

SEQ ID NO: 229712 - DNA, 25 bp, SARS Virus
gaaatatcaatgacgtcctgagttg

SEQ ID NO: 229713 - DNA, 25 bp, SARS Virus
aaatatcaatggagtcctgagttgt

SEQ ID NO: 229714 - DNA, 25 bp, SARS Virus
aatatcaatggcatcctgagttgtt

SEQ ID NO: 229715 - DNA, 25 bp, SARS Virus
atatcaatggcgacctgagttgtta

SEQ ID NO: 229716 - DNA, 25 bp, SARS Virus
tatcaatggcgtactgagttgttac

SEQ ID NO: 229717 - DNA, 25 bp, SARS Virus
atcaatggcgtcatgagttgttacc

SEQ ID NO: 229718 - DNA, 25 bp, SARS Virus
tcaatggcgtccagagttgttacca

SEQ ID NO: 229719 - DNA, 25 bp, SARS Virus
caatggcgtcctaagttgttaccaa

SEQ ID NO: 229720 - DNA, 25 bp, SARS Virus
aatggcgtcctgagttgttaccaaa

SEQ ID NO: 229721 - DNA, 25 bp, SARS Virus
atggcgtcctgaattgttaccaaaa

SEQ ID NO: 229722 - DNA, 25 bp, SARS Virus
tggcgtcctgagatgttaccaaaac

SEQ ID NO: 229723 - DNA, 25 bp, SARS Virus
ggcgtcctgagtagttaccaaaact

SEQ ID NO: 229724 - DNA, 25 bp, SARS Virus
gcgtcctgagttattaccaaaactt

SEQ ID NO: 229725 - DNA, 25 bp, SARS Virus
cgtcctgagttgataccaaaacttt

SEQ ID NO: 229726 - DNA, 25 bp, SARS Virus
gtcctgagttgtaaccaaaactttc

SEQ ID NO: 229727 - DNA, 25 bp, SARS Virus
tcctgagttgttaccaaaactttct

SEQ ID NO: 229728 - DNA, 25 bp, SARS Virus
cctgagttgttaacaaaactttctg

SEQ ID NO: 229729 - DNA, 25 bp, SARS Virus
ctgagttgttacaaaaactttctga

SEQ ID NO: 229730 - DNA, 25 bp, SARS Virus
tgagttgttaccaaaactttctgaa

SEQ ID NO: 229731 - DNA, 25 bp, SARS Virus
gagttgttaccaaaactttctgaac

SEQ ID NO: 229732 - DNA, 25 bp, SARS Virus
agttgttaccaaaactttctgaaca

SEQ ID NO: 229733 - DNA, 25 bp, SARS Virus
gttgttaccaaaactttctgaacat

SEQ ID NO: 229734 - DNA, 25 bp, SARS Virus
ttgttaccaaaaatttctgaacatt

SEQ ID NO: 229735 - DNA, 25 bp, SARS Virus
tgttaccaaaacattctgaacatta

SEQ ID NO: 229736 - DNA, 25 bp, SARS Virus
gttaccaaaactatctgaacattag

SEQ ID NO: 229737 - DNA, 25 bp, SARS Virus
ttaccaaaacttactgaacattagt

SEQ ID NO: 229738 - DNA, 25 bp, SARS Virus
taccaaaactttatgaacattagtt

SEQ ID NO: 229739 - DNA, 25 bp, SARS Virus
accaaaactttcagaacattagttc

SEQ ID NO: 229740 - DNA, 25 bp, SARS Virus
ccaaaactttctaaacattagttct

SEQ ID NO: 229741 - DNA, 25 bp, SARS Virus
caaaactttctgaacattagttctg

SEQ ID NO: 229742 - DNA, 25 bp, SARS Virus
aaaactttctgaacattagttctga

SEQ ID NO: 229743 - DNA, 25 bp, SARS Virus
aaactttctgaaaattagttctgag

SEQ ID NO: 229744 - DNA, 25 bp, SARS Virus
aactttctgaacattagttctgaga

SEQ ID NO: 229745 - DNA, 25 bp, SARS Virus
actttctgaacaatagttctgagaa

SEQ ID NO: 229746 - DNA, 25 bp, SARS Virus
ctttctgaacataagttctgagaaa

SEQ ID NO: 229747 - DNA, 25 bp, SARS Virus
tttctgaacattagttctgagaaat

SEQ ID NO: 229748 - DNA, 25 bp, SARS Virus
ttctgaacattaattctgagaaata

SEQ ID NO: 229749 - DNA, 25 bp, SARS Virus
tctgaacattagatctgagaaatat

SEQ ID NO: 229750 - DNA, 25 bp, SARS Virus
ctgaacattagtactgagaaatatc

SEQ ID NO: 229751 - DNA, 25 bp, SARS Virus
tgaacattagttatgagaaatatca

SEQ ID NO: 229752 - DNA, 25 bp, SARS Virus
gaacattagttcagagaaatatcac

SEQ ID NO: 229753 - DNA, 25 bp, SARS Virus
aacattagttctaagaaatatcaca

SEQ ID NO: 229754 - DNA, 25 bp, SARS Virus
acattagttctgagaaatatcacag

SEQ ID NO: 229755 - DNA, 25 bp, SARS Virus
cattagttctgaaaaatatcacagt

SEQ ID NO: 229756 - DNA, 25 bp, SARS Virus
attagttctgagaaatatcacagtt

SEQ ID NO: 229757 - DNA, 25 bp, SARS Virus
ttagttctgagaaatatcacagtta

SEQ ID NO: 229758 - DNA, 25 bp, SARS Virus
tagttctgagaaatatcacagttat

SEQ ID NO: 229759 - DNA, 25 bp, SARS Virus
agttctgagaaaaatcacagttatt

SEQ ID NO: 229760 - DNA, 25 bp, SARS Virus
gttctgagaaatatcacagttattt

SEQ ID NO: 229761 - DNA, 25 bp, SARS Virus
ttctgagaaataacacagttatttc

SEQ ID NO: 229762 - DNA, 25 bp, SARS Virus
tctgagaaatataacagttatttcc

SEQ ID NO: 229763 - DNA, 25 bp, SARS Virus
ctgagaaatatcacagttatttccg

SEQ ID NO: 229764 - DNA, 25 bp, SARS Virus
tgagaaatatcaaagttatttccgt

SEQ ID NO: 229765 - DNA, 25 bp, SARS Virus
gagaaatatcacagttatttccgtg

SEQ ID NO: 229766 - DNA, 25 bp, SARS Virus
agaaatatcacaattatttccgtga

SEQ ID NO: 229767 - DNA, 25 bp, SARS Virus
gaaatatcacagatatttccgtgaa

SEQ ID NO: 229768 - DNA, 25 bp, SARS Virus
aaatatcacagtaatttccgtgaac

SEQ ID NO: 229769 - DNA, 25 bp, SARS Virus
aatatcacagttatttccgtgaaca

SEQ ID NO: 229770 - DNA, 25 bp, SARS Virus
atatcacagttaattccgtgaacat

SEQ ID NO: 229771 - DNA, 25 bp, SARS Virus
tatcacagttatatccgtgaacatc

SEQ ID NO: 229772 - DNA, 25 bp, SARS Virus
atcacagttattaccgtgaacatct

SEQ ID NO: 229773 - DNA, 25 bp, SARS Virus
tcacagttatttacgtgaacatctt

SEQ ID NO: 229774 - DNA, 25 bp, SARS Virus
cacagttatttcagtgaacatcttc

SEQ ID NO: 229775 - DNA, 25 bp, SARS Virus
acagttatttccatgaacatcttcg

SEQ ID NO: 229776 - DNA, 25 bp, SARS Virus
cagttatttccgagaacatcttcgt

SEQ ID NO: 229777 - DNA, 25 bp, SARS Virus
agttatttccgtaaacatcttcgtc

SEQ ID NO: 229778 - DNA, 25 bp, SARS Virus
gttatttccgtgaacatcttcgtct

SEQ ID NO: 229779 - DNA, 25 bp, SARS Virus
ttatttccgtgaacatcttcgtctc

SEQ ID NO: 229780 - DNA, 25 bp, SARS Virus
tatttccgtgaaaatcttcgtctct

SEQ ID NO: 229781 - DNA, 25 bp, SARS Virus
atttccgtgaacatcttcgtctctt

SEQ ID NO: 229782 - DNA, 25 bp, SARS Virus
tttccgtgaacaacttcgtctcttt

SEQ ID NO: 229783 - DNA, 25 bp, SARS Virus
ttccgtgaacatattcgtctctttc

SEQ ID NO: 229784 - DNA, 25 bp, SARS Virus
tccgtgaacatcatcgtctctttct

SEQ ID NO: 229785 - DNA, 25 bp, SARS Virus
ccgtgaacatctacgtctctttcta

SEQ ID NO: 229786 - DNA, 25 bp, SARS Virus
cgtgaacatcttagtctctttctac

SEQ ID NO: 229787 - DNA, 25 bp, SARS Virus
gtgaacatcttcatctctttctacg

SEQ ID NO: 229788 - DNA, 25 bp, SARS Virus
tgaacatcttcgactctttctacgg

SEQ ID NO: 229789 - DNA, 25 bp, SARS Virus
gaacatcttcgtatctttctacggt

SEQ ID NO: 229790 - DNA, 25 bp, SARS Virus
aacatcttcgtcactttctacggtt

SEQ ID NO: 229791 - DNA, 25 bp, SARS Virus
acatcttcgtctatttctacggttt

SEQ ID NO: 229792 - DNA, 25 bp, SARS Virus
catcttcgtctcattctacggtttt

SEQ ID NO: 229793 - DNA, 25 bp, SARS Virus
atcttcgtctctatctacggtttta

SEQ ID NO: 229794 - DNA, 25 bp, SARS Virus
tcttcgtctcttactacggttttac

SEQ ID NO: 229795 - DNA, 25 bp, SARS Virus
cttcgtctctttatacggttttact

SEQ ID NO: 229796 - DNA, 25 bp, SARS Virus
ttcgtctctttcaacggttttacta

SEQ ID NO: 229797 - DNA, 25 bp, SARS Virus
tcgtctctttctacggttttactac

SEQ ID NO: 229798 - DNA, 25 bp, SARS Virus
cgtctctttctaaggttttactacc

SEQ ID NO: 229799 - DNA, 25 bp, SARS Virus
gtctctttctacagttttactaccg

SEQ ID NO: 229800 - DNA, 25 bp, SARS Virus
tctctttctacgattttactaccgt

SEQ ID NO: 229801 - DNA, 25 bp, SARS Virus
ctctttctacggatttactaccgtt

SEQ ID NO: 229802 - DNA, 25 bp, SARS Virus
tctttctacggtattactaccgttg

SEQ ID NO: 229803 - DNA, 25 bp, SARS Virus
ctttctacggttatactaccgttgg

SEQ ID NO: 229804 - DNA, 25 bp, SARS Virus
tttctacggtttaactaccgttgga

SEQ ID NO: 229805 - DNA, 25 bp, SARS Virus
ttctacggttttactaccgttggag

SEQ ID NO: 229806 - DNA, 25 bp, SARS Virus
tctacggttttaataccgttggaga

SEQ ID NO: 229807 - DNA, 25 bp, SARS Virus
ctacggttttacaaccgttggagaa

SEQ ID NO: 229808 - DNA, 25 bp, SARS Virus
tacggttttactaccgttggagaag

SEQ ID NO: 229809 - DNA, 25 bp, SARS Virus
acggttttactaacgttggagaagt

SEQ ID NO: 229810 - DNA, 25 bp, SARS Virus
cggttttactacagttggagaagta

SEQ ID NO: 229811 - DNA, 25 bp, SARS Virus
ggttttactaccattggagaagtaa

SEQ ID NO: 229812 - DNA, 25 bp, SARS Virus
gttttactaccgatggagaagtaag

SEQ ID NO: 229813 - DNA, 25 bp, SARS Virus
ttttactaccgtaggagaagtaagt

SEQ ID NO: 229814 - DNA, 25 bp, SARS Virus
tttactaccgttagagaagtaagtt

SEQ ID NO: 229815 - DNA, 25 bp, SARS Virus
ttactaccgttgaagaagtaagttt

SEQ ID NO: 229816 - DNA, 25 bp, SARS Virus
tactaccgttggagaagtaagttta

SEQ ID NO: 229817 - DNA, 25 bp, SARS Virus
actaccgttggaaaagtaagtttac

SEQ ID NO: 229818 - DNA, 25 bp, SARS Virus
ctaccgttggagaagtaagtttact

SEQ ID NO: 229819 - DNA, 25 bp, SARS Virus
taccgttggagaagtaagtttactt

SEQ ID NO: 229820 - DNA, 25 bp, SARS Virus
accgttggagaaataagtttacttt

SEQ ID NO: 229821 - DNA, 25 bp, SARS Virus
ccgttggagaagaaagtttactttt

SEQ ID NO: 229822 - DNA, 25 bp, SARS Virus
cgttggagaagtaagtttactttta

SEQ ID NO: 229823 - DNA, 25 bp, SARS Virus
gttggagaagtaagtttacttttag

SEQ ID NO: 229824 - DNA, 25 bp, SARS Virus
ttggagaagtaaatttacttttagc

SEQ ID NO: 229825 - DNA, 25 bp, SARS Virus
tggagaagtaagattacttttagcg

SEQ ID NO: 229826 - DNA, 25 bp, SARS Virus
ggagaagtaagtatacttttagcgg

SEQ ID NO: 229827 - DNA, 25 bp, SARS Virus
gagaagtaagttaacttttagcggt

SEQ ID NO: 229828 - DNA, 25 bp, SARS Virus
agaagtaagtttacttttagcggtt

SEQ ID NO: 229829 - DNA, 25 bp, SARS Virus
gaagtaagtttaattttagcggttg

SEQ ID NO: 229830 - DNA, 25 bp, SARS Virus
aagtaagtttacatttagcggttgt

SEQ ID NO: 229831 - DNA, 25 bp, SARS Virus
agtaagtttactattagcggttgtt

SEQ ID NO: 229832 - DNA, 25 bp, SARS Virus
gtaagtttacttatagcggttgtta

SEQ ID NO: 229833 - DNA, 25 bp, SARS Virus
taagtttactttaagcggttgttac

SEQ ID NO: 229834 - DNA, 25 bp, SARS Virus
aagtttacttttagcggttgttaca

SEQ ID NO: 229835 - DNA, 25 bp, SARS Virus
agtttacttttaacggttgttacaa

SEQ ID NO: 229836 - DNA, 25 bp, SARS Virus
gtttacttttagaggttgttacaat

SEQ ID NO: 229837 - DNA, 25 bp, SARS Virus
tttacttttagcagttgttacaatt

SEQ ID NO: 229838 - DNA, 25 bp, SARS Virus
ttacttttagcgattgttacaatta

SEQ ID NO: 229839 - DNA, 25 bp, SARS Virus
tacttttagcggatgttacaattac

SEQ ID NO: 229840 - DNA, 25 bp, SARS Virus
acttttagcggtagttacaattaca

SEQ ID NO: 229841 - DNA, 25 bp, SARS Virus
cttttagcggttattacaattacaa

SEQ ID NO: 229842 - DNA, 25 bp, SARS Virus
ttttagcggttgatacaattacaat

SEQ ID NO: 229843 - DNA, 25 bp, SARS Virus
tttagcggttgtaacaattacaatt

SEQ ID NO: 229844 - DNA, 25 bp, SARS Virus
ttagcggttgttacaattacaattg

SEQ ID NO: 229845 - DNA, 25 bp, SARS Virus
tagcggttgttaaaattacaattgt

SEQ ID NO: 229846 - DNA, 25 bp, SARS Virus
agcggttgttacaattacaattgtg

SEQ ID NO: 229847 - DNA, 25 bp, SARS Virus
gcggttgttacaattacaattgtgc

SEQ ID NO: 229848 - DNA, 25 bp, SARS Virus
cggttgttacaaatacaattgtgca

SEQ ID NO: 229849 - DNA, 25 bp, SARS Virus
ggttgttacaataacaattgtgcaa

SEQ ID NO: 229850 - DNA, 25 bp, SARS Virus
gttgttacaattacaattgtgcaag

SEQ ID NO: 229851 - DNA, 25 bp, SARS Virus
ttgttacaattaaaattgtgcaagt

SEQ ID NO: 229852 - DNA, 25 bp, SARS Virus
tgttacaattacaattgtgcaagtg

SEQ ID NO: 229853 - DNA, 25 bp, SARS Virus
gttacaattacaattgtgcaagtgc

SEQ ID NO: 229854 - DNA, 25 bp, SARS Virus
ttacaattacaaatgtgcaagtgct

SEQ ID NO: 229855 - DNA, 25 bp, SARS Virus
tacaattacaatagtgcaagtgctg

SEQ ID NO: 229856 - DNA, 25 bp, SARS Virus
acaattacaattatgcaagtgctga

SEQ ID NO: 229857 - DNA, 25 bp, SARS Virus
caattacaattgagcaagtgctgag

SEQ ID NO: 229858 - DNA, 25 bp, SARS Virus
aattacaattgtacaagtgctgagt

SEQ ID NO: 229859 - DNA, 25 bp, SARS Virus
attacaattgtgaaagtgctgagtc

SEQ ID NO: 229860 - DNA, 25 bp, SARS Virus
ttacaattgtgcaagtgctgagtca

SEQ ID NO: 229861 - DNA, 25 bp, SARS Virus
tacaattgtgcaagtgctgagtcat

SEQ ID NO: 229862 - DNA, 25 bp, SARS Virus
acaattgtgcaaatgctgagtcata

SEQ ID NO: 229863 - DNA, 25 bp, SARS Virus
caattgtgcaagagctgagtcatag

SEQ ID NO: 229864 - DNA, 25 bp, SARS Virus
aattgtgcaagtactgagtcataga

SEQ ID NO: 229865 - DNA, 25 bp, SARS Virus
attgtgcaagtgatgagtcatagag

SEQ ID NO: 229866 - DNA, 25 bp, SARS Virus
ttgtgcaagtgcagagtcatagagt

SEQ ID NO: 229867 - DNA, 25 bp, SARS Virus
tgtgcaagtgctaagtcatagagtt

SEQ ID NO: 229868 - DNA, 25 bp, SARS Virus
gtgcaagtgctgagtcatagagttc

SEQ ID NO: 229869 - DNA, 25 bp, SARS Virus
tgcaagtgctgaatcatagagttcc

SEQ ID NO: 229870 - DNA, 25 bp, SARS Virus
gcaagtgctgagacatagagttcct

SEQ ID NO: 229871 - DNA, 25 bp, SARS Virus
caagtgctgagtaatagagttcctc

SEQ ID NO: 229872 - DNA, 25 bp, SARS Virus
aagtgctgagtcatagagttcctct

SEQ ID NO: 229873 - DNA, 25 bp, SARS Virus
agtgctgagtcaaagagttcctcta

SEQ ID NO: 229874 - DNA, 25 bp, SARS Virus
gtgctgagtcatagagttcctctag

SEQ ID NO: 229875 - DNA, 25 bp, SARS Virus
tgctgagtcataaagttcctctagg

SEQ ID NO: 229876 - DNA, 25 bp, SARS Virus
gctgagtcatagagttcctctagga

SEQ ID NO: 229877 - DNA, 25 bp, SARS Virus
ctgagtcatagaattcctctaggag

SEQ ID NO: 229878 - DNA, 25 bp, SARS Virus
tgagtcatagagatcctctaggagt

SEQ ID NO: 229879 - DNA, 25 bp, SARS Virus
gagtcatagagtacctctaggagta

SEQ ID NO: 229880 - DNA, 25 bp, SARS Virus
agtcatagagttactctaggagtaa

SEQ ID NO: 229881 - DNA, 25 bp, SARS Virus
ttttctaatctgctggtgactcttc

SEQ ID NO: 229882 - DNA, 25 bp, SARS Virus
tttctaatctgtcggtgactcttca

SEQ ID NO: 229883 - DNA, 25 bp, SARS Virus
ttctaatctgttcgtgactcttcag

SEQ ID NO: 229884 - DNA, 25 bp, SARS Virus
tctaatctgttgctgactcttcaga

SEQ ID NO: 229885 - DNA, 25 bp, SARS Virus
ctaatctgttggcgactcttcagac

SEQ ID NO: 229886 - DNA, 25 bp, SARS Virus
taatctgttggtcactcttcagaca

SEQ ID NO: 229887 - DNA, 25 bp, SARS Virus
aatctgttggtgcctcttcagacaa

SEQ ID NO: 229888 - DNA, 25 bp, SARS Virus
atctgttggtgactcttcagacaac

SEQ ID NO: 229889 - DNA, 25 bp, SARS Virus
tctgttggtgacccttcagacaaca

SEQ ID NO: 229890 - DNA, 25 bp, SARS Virus
ctgttggtgactcttcagacaacat

SEQ ID NO: 229891 - DNA, 25 bp, SARS Virus
tgttggtgactcctcagacaacatg

SEQ ID NO: 229892 - DNA, 25 bp, SARS Virus
gttggtgactctccagacaacatgt

SEQ ID NO: 229893 - DNA, 25 bp, SARS Virus
ttggtgactcttcagacaacatgtt

SEQ ID NO: 229894 - DNA, 25 bp, SARS Virus
tggtgactcttccgacaacatgttc

SEQ ID NO: 229895 - DNA, 25 bp, SARS Virus
ggtgactcttcacacaacatgttct

SEQ ID NO: 229896 - DNA, 25 bp, SARS Virus
gtgactcttcagccaacatgttctg

SEQ ID NO: 229897 - DNA, 25 bp, SARS Virus
tgactcttcagacaacatgttctgg

SEQ ID NO: 229898 - DNA, 25 bp, SARS Virus
gactcttcagaccacatgttctggt

SEQ ID NO: 229899 - DNA, 25 bp, SARS Virus
actcttcagacaccatgttctggtg

SEQ ID NO: 229900 - DNA, 25 bp, SARS Virus
ctcttcagacaacatgttctggtgg

SEQ ID NO: 229901 - DNA, 25 bp, SARS Virus
tcttcagacaacctgttctggtggt

SEQ ID NO: 229902 - DNA, 25 bp, SARS Virus
cttcagacaacacgttctggtggtc

SEQ ID NO: 229903 - DNA, 25 bp, SARS Virus
ttcagacaacatcttctggtggtca

SEQ ID NO: 229904 - DNA, 25 bp, SARS Virus
tcagacaacatgctctggtggtcaa

SEQ ID NO: 229905 - DNA, 25 bp, SARS Virus
cagacaacatgtcctggtggtcaat

SEQ ID NO: 229906 - DNA, 25 bp, SARS Virus
agacaacatgttctggtggtcaatg

SEQ ID NO: 229907 - DNA, 25 bp, SARS Virus
gacaacatgttccggtggtcaatgt

SEQ ID NO: 229908 - DNA, 25 bp, SARS Virus
acaacatgttctcgtggtcaatgta

SEQ ID NO: 229909 - DNA, 25 bp, SARS Virus
caacatgttctgctggtcaatgtat

SEQ ID NO: 229910 - DNA, 25 bp, SARS Virus
aacatgttctggcggtcaatgtata

SEQ ID NO: 229911 - DNA, 25 bp, SARS Virus
acatgttctggtcgtcaatgtatac

SEQ ID NO: 229912 - DNA, 25 bp, SARS Virus
catgttctggtgctcaatgtatacg

SEQ ID NO: 229913 - DNA, 25 bp, SARS Virus
atgttctggtggccaatgtatacgg

SEQ ID NO: 229914 - DNA, 25 bp, SARS Virus
tgttctggtggtcaatgtatacggt

SEQ ID NO: 229915 - DNA, 25 bp, SARS Virus
gttctggtggtccatgtatacggta

SEQ ID NO: 229916 - DNA, 25 bp, SARS Virus
ttctggtggtcactgtatacggtat

SEQ ID NO: 229917 - DNA, 25 bp, SARS Virus
tctggtggtcaacgtatacggtatt

SEQ ID NO: 229918 - DNA, 25 bp, SARS Virus
ctggtggtcaatctatacggtatta

SEQ ID NO: 229919 - DNA, 25 bp, SARS Virus
tggtggtcaatgcatacggtattat

SEQ ID NO: 229920 - DNA, 25 bp, SARS Virus
ggtggtcaatgtctacggtattatt

SEQ ID NO: 229921 - DNA, 25 bp, SARS Virus
gtggtcaatgtacacggtattatta

SEQ ID NO: 229922 - DNA, 25 bp, SARS Virus
tggtcaatgtatccggtattattac

SEQ ID NO: 229923 - DNA, 25 bp, SARS Virus
ggtcaatgtatacggtattattact

SEQ ID NO: 229924 - DNA, 25 bp, SARS Virus
gtcaatgtataccgtattattactg

SEQ ID NO: 229925 - DNA, 25 bp, SARS Virus
tcaatgtatacgctattattactgt

SEQ ID NO: 229926 - DNA, 25 bp, SARS Virus
caatgtatacggcattattactgtg

SEQ ID NO: 229927 - DNA, 25 bp, SARS Virus
aatgtatacggtcttattactgtga

SEQ ID NO: 229928 - DNA, 25 bp, SARS Virus
atgtatacggtactattactgtgac

SEQ ID NO: 229929 - DNA, 25 bp, SARS Virus
tgtatacggtatcattactgtgaca

SEQ ID NO: 229930 - DNA, 25 bp, SARS Virus
gtatacggtattcttactgtgacaa

SEQ ID NO: 229931 - DNA, 25 bp, SARS Virus
tatacggtattactactgtgacaac

SEQ ID NO: 229932 - DNA, 25 bp, SARS Virus
atacggtattatcactgtgacaacc

SEQ ID NO: 229933 - DNA, 25 bp, SARS Virus
tacggtattattcctgtgacaacca

SEQ ID NO: 229934 - DNA, 25 bp, SARS Virus
acggtattattactgtgacaaccac

SEQ ID NO: 229935 - DNA, 25 bp, SARS Virus
cggtattattaccgtgacaaccact

SEQ ID NO: 229936 - DNA, 25 bp, SARS Virus
ggtattattactctgacaaccactc

SEQ ID NO: 229937 - DNA, 25 bp, SARS Virus
gtattattactgcgacaaccactcg

SEQ ID NO: 229938 - DNA, 25 bp, SARS Virus
tattattactgtcacaaccactcgt

SEQ ID NO: 229939 - DNA, 25 bp, SARS Virus
attattactgtgccaaccactcgtc

SEQ ID NO: 229940 - DNA, 25 bp, SARS Virus
ttattactgtgacaaccactcgtcc

SEQ ID NO: 229941 - DNA, 25 bp, SARS Virus
tattactgtgaccaccactcgtcca

SEQ ID NO: 229942 - DNA, 25 bp, SARS Virus
attactgtgacacccactcgtccag

SEQ ID NO: 229943 - DNA, 25 bp, SARS Virus
ttactgtgacaaccactcgtccaga

SEQ ID NO: 229944 - DNA, 25 bp, SARS Virus
tactgtgacaaccactcgtccagac

SEQ ID NO: 229945 - DNA, 25 bp, SARS Virus
actgtgacaacccctcgtccagact

SEQ ID NO: 229946 - DNA, 25 bp, SARS Virus
ctgtgacaaccactcgtccagactt

SEQ ID NO: 229947 - DNA, 25 bp, SARS Virus
tgtgacaaccacccgtccagacttc

SEQ ID NO: 229948 - DNA, 25 bp, SARS Virus
gtgacaaccactcgtccagacttca

SEQ ID NO: 229949 - DNA, 25 bp, SARS Virus
tgacaaccactcctccagacttcat

SEQ ID NO: 229950 - DNA, 25 bp, SARS Virus
gacaaccactcgcccagacttcata

SEQ ID NO: 229951 - DNA, 25 bp, SARS Virus
acaaccactcgtccagacttcatat

SEQ ID NO: 229952 - DNA, 25 bp, SARS Virus
caaccactcgtccagacttcatatt

SEQ ID NO: 229953 - DNA, 25 bp, SARS Virus
aaccactcgtcccgacttcatattt

SEQ ID NO: 229954 - DNA, 25 bp, SARS Virus
accactcgtccacacttcatatttg

SEQ ID NO: 229955 - DNA, 25 bp, SARS Virus
ccactcgtccagccttcatatttgg

SEQ ID NO: 229956 - DNA, 25 bp, SARS Virus
cactcgtccagacttcatatttggt

SEQ ID NO: 229957 - DNA, 25 bp, SARS Virus
actcgtccagacctcatatttggta

SEQ ID NO: 229958 - DNA, 25 bp, SARS Virus
ctcgtccagactccatatttggtac

SEQ ID NO: 229959 - DNA, 25 bp, SARS Virus
tcgtccagacttcatatttggtacc

SEQ ID NO: 229960 - DNA, 25 bp, SARS Virus
cgtccagacttcctatttggtaccg

SEQ ID NO: 229961 - DNA, 25 bp, SARS Virus
gtccagacttcacatttggtaccgc

SEQ ID NO: 229962 - DNA, 25 bp, SARS Virus
tccagacttcatctttggtaccgca

SEQ ID NO: 229963 - DNA, 25 bp, SARS Virus
ccagacttcatacttggtaccgcag

SEQ ID NO: 229964 - DNA, 25 bp, SARS Virus
cagacttcatatctggtaccgcagc

SEQ ID NO: 229965 - DNA, 25 bp, SARS Virus
agacttcatattcggtaccgcagct

SEQ ID NO: 229966 - DNA, 25 bp, SARS Virus
gacttcatatttcgtaccgcagctg

SEQ ID NO: 229967 - DNA, 25 bp, SARS Virus
acttcatatttgctaccgcagctgt

SEQ ID NO: 229968 - DNA, 25 bp, SARS Virus
cttcatatttggcaccgcagctgtt

SEQ ID NO: 229969 - DNA, 25 bp, SARS Virus
ttcatatttggtcccgcagctgttc

SEQ ID NO: 229970 - DNA, 25 bp, SARS Virus
tcatatttggtaccgcagctgttct

SEQ ID NO: 229971 - DNA, 25 bp, SARS Virus
catatttggtaccgcagctgttctg

SEQ ID NO: 229972 - DNA, 25 bp, SARS Virus
atatttggtaccccagctgttctgc

SEQ ID NO: 229973 - DNA, 25 bp, SARS Virus
tatttggtaccgcagctgttctgca

SEQ ID NO: 229974 - DNA, 25 bp, SARS Virus
atttggtaccgccgctgttctgcat

SEQ ID NO: 229975 - DNA, 25 bp, SARS Virus
tttggtaccgcacctgttctgcatt

SEQ ID NO: 229976 - DNA, 25 bp, SARS Virus
ttggtaccgcagctgttctgcatta

SEQ ID NO: 229977 - DNA, 25 bp, SARS Virus
tggtaccgcagccgttctgcattac

SEQ ID NO: 229978 - DNA, 25 bp, SARS Virus
ggtaccgcagctcttctgcattact

SEQ ID NO: 229979 - DNA, 25 bp, SARS Virus
gtaccgcagctgctctgcattactg

SEQ ID NO: 229980 - DNA, 25 bp, SARS Virus
taccgcagctgtcctgcattactga

SEQ ID NO: 229981 - DNA, 25 bp, SARS Virus
accgcagctgttctgcattactgac

SEQ ID NO: 229982 - DNA, 25 bp, SARS Virus
ccgcagctgttccgcattactgaca

SEQ ID NO: 229983 - DNA, 25 bp, SARS Virus
cgcagctgttctccattactgacaa

SEQ ID NO: 229984 - DNA, 25 bp, SARS Virus
gcagctgttctgcattactgacaag

SEQ ID NO: 229985 - DNA, 25 bp, SARS Virus
cagctgttctgccttactgacaagt

SEQ ID NO: 229986 - DNA, 25 bp, SARS Virus
agctgttctgcactactgacaagtc

SEQ ID NO: 229987 - DNA, 25 bp, SARS Virus
gctgttctgcatcactgacaagtct

SEQ ID NO: 229988 - DNA, 25 bp, SARS Virus
ctgttctgcattcctgacaagtctt

SEQ ID NO: 229989 - DNA, 25 bp, SARS Virus
tgttctgcattactgacaagtcttt

SEQ ID NO: 229990 - DNA, 25 bp, SARS Virus
gttctgcattaccgacaagtcttta

SEQ ID NO: 229991 - DNA, 25 bp, SARS Virus
ttctgcattactcacaagtctttat

SEQ ID NO: 229992 - DNA, 25 bp, SARS Virus
tctgcattactgccaagtctttatg

SEQ ID NO: 229993 - DNA, 25 bp, SARS Virus
ctgcattactgacaagtctttatgg

SEQ ID NO: 229994 - DNA, 25 bp, SARS Virus
tgcattactgaccagtctttatggt

SEQ ID NO: 229995 - DNA, 25 bp, SARS Virus
gcattactgacacgtctttatggta

SEQ ID NO: 229996 - DNA, 25 bp, SARS Virus
cattactgacaactctttatggtag

SEQ ID NO: 229997 - DNA, 25 bp, SARS Virus
attactgacaagcctttatggtagt

SEQ ID NO: 229998 - DNA, 25 bp, SARS Virus
ttactgacaagtctttatggtagtt

SEQ ID NO: 229999 - DNA, 25 bp, SARS Virus
tactgacaagtccttatggtagttc

SEQ ID NO: 230000 - DNA, 25 bp, SARS Virus
actgacaagtctctatggtagttca

SEQ ID NO: 230001 - DNA, 25 bp, SARS Virus
ctgacaagtcttcatggtagttcat

SEQ ID NO: 230002 - DNA, 25 bp, SARS Virus
tgacaagtctttctggtagttcata

SEQ ID NO: 230003 - DNA, 25 bp, SARS Virus
gacaagtctttacggtagttcatac

SEQ ID NO: 230004 - DNA, 25 bp, SARS Virus
acaagtctttatcgtagttcatacc

SEQ ID NO: 230005 - DNA, 25 bp, SARS Virus
caagtctttatgctagttcatacca

SEQ ID NO: 230006 - DNA, 25 bp, SARS Virus
aagtctttatggcagttcataccac

SEQ ID NO: 230007 - DNA, 25 bp, SARS Virus
agtctttatggtcgttcataccact

SEQ ID NO: 230008 - DNA, 25 bp, SARS Virus
gtctttatggtacttcataccactg

SEQ ID NO: 230009 - DNA, 25 bp, SARS Virus
tctttatggtagctcataccactgt

SEQ ID NO: 230010 - DNA, 25 bp, SARS Virus
ctttatggtagtccataccactgtc

SEQ ID NO: 230011 - DNA, 25 bp, SARS Virus
tttatggtagttcataccactgtcg

SEQ ID NO: 230012 - DNA, 25 bp, SARS Virus
ttatggtagttcctaccactgtcga

SEQ ID NO: 230013 - DNA, 25 bp, SARS Virus
tatggtagttcacaccactgtcgac

SEQ ID NO: 230014 - DNA, 25 bp, SARS Virus
atggtagttcatcccactgtcgacg

SEQ ID NO: 230015 - DNA, 25 bp, SARS Virus
tggtagttcataccactgtcgacga

SEQ ID NO: 230016 - DNA, 25 bp, SARS Virus
ggtagttcataccactgtcgacgag

SEQ ID NO: 230017 - DNA, 25 bp, SARS Virus
gtagttcatacccctgtcgacgaga

SEQ ID NO: 230018 - DNA, 25 bp, SARS Virus
tagttcataccactgtcgacgagaa

SEQ ID NO: 230019 - DNA, 25 bp, SARS Virus
agttcataccaccgtcgacgagaaa

SEQ ID NO: 230020 - DNA, 25 bp, SARS Virus
gttcataccactctcgacgagaaac

SEQ ID NO: 230021 - DNA, 25 bp, SARS Virus
ttcataccactgccgacgagaaacg

SEQ ID NO: 230022 - DNA, 25 bp, SARS Virus
tcataccactgtcgacgagaaacgt

SEQ ID NO: 230023 - DNA, 25 bp, SARS Virus
cataccactgtccacgagaaacgtt

SEQ ID NO: 230024 - DNA, 25 bp, SARS Virus
ataccactgtcgccgagaaacgttt

SEQ ID NO: 230025 - DNA, 25 bp, SARS Virus
taccactgtcgacgagaaacgttta

SEQ ID NO: 230026 - DNA, 25 bp, SARS Virus
accactgtcgaccagaaacgtttag

SEQ ID NO: 230027 - DNA, 25 bp, SARS Virus
ccactgtcgacgcgaaacgtttagt

SEQ ID NO: 230028 - DNA, 25 bp, SARS Virus
cactgtcgacgacaaacgtttagtc

SEQ ID NO: 230029 - DNA, 25 bp, SARS Virus
actgtcgacgagcaacgtttagtcc

SEQ ID NO: 230030 - DNA, 25 bp, SARS Virus
ctgtcgacgagacacgtttagtcct

SEQ ID NO: 230031 - DNA, 25 bp, SARS Virus
tgtcgacgagaaccgtttagtcctt

SEQ ID NO: 230032 - DNA, 25 bp, SARS Virus
gtcgacgagaaacgtttagtcctta

SEQ ID NO: 230033 - DNA, 25 bp, SARS Virus
tcgacgagaaacctttagtccttaa

SEQ ID NO: 230034 - DNA, 25 bp, SARS Virus
cgacgagaaacgcttagtccttaac

SEQ ID NO: 230035 - DNA, 25 bp, SARS Virus
gacgagaaacgtctagtccttaact

SEQ ID NO: 230036 - DNA, 25 bp, SARS Virus
acgagaaacgttcagtccttaactc

SEQ ID NO: 230037 - DNA, 25 bp, SARS Virus
cgagaaacgtttcgtccttaactca

SEQ ID NO: 230038 - DNA, 25 bp, SARS Virus
gagaaacgtttactccttaactcac

SEQ ID NO: 230039 - DNA, 25 bp, SARS Virus
agaaacgtttagcccttaactcacc

SEQ ID NO: 230040 - DNA, 25 bp, SARS Virus
gaaacgtttagtccttaactcacca

SEQ ID NO: 230041 - DNA, 25 bp, SARS Virus
aaacgtttagtccttaactcaccaa

SEQ ID NO: 230042 - DNA, 25 bp, SARS Virus
aacgtttagtccctaactcaccaaa

SEQ ID NO: 230043 - DNA, 25 bp, SARS Virus
acgtttagtcctcaactcaccaaac

SEQ ID NO: 230044 - DNA, 25 bp, SARS Virus
cgtttagtccttcactcaccaaacg

SEQ ID NO: 230045 - DNA, 25 bp, SARS Virus
gtttagtccttacctcaccaaacga

SEQ ID NO: 230046 - DNA, 25 bp, SARS Virus
tttagtccttaactcaccaaacgac

SEQ ID NO: 230047 - DNA, 25 bp, SARS Virus
ttagtccttaacccaccaaacgacg

SEQ ID NO: 230048 - DNA, 25 bp, SARS Virus
tagtccttaactcaccaaacgacgt

SEQ ID NO: 230049 - DNA, 25 bp, SARS Virus
agtccttaactccccaaacgacgta

SEQ ID NO: 230050 - DNA, 25 bp, SARS Virus
gtccttaactcaccaaacgacgtag

SEQ ID NO: 230051 - DNA, 25 bp, SARS Virus
tccttaactcaccaaacgacgtagt

SEQ ID NO: 230052 - DNA, 25 bp, SARS Virus
ccttaactcacccaacgacgtagtt

SEQ ID NO: 230053 - DNA, 25 bp, SARS Virus
cttaactcaccacacgacgtagttc

SEQ ID NO: 230054 - DNA, 25 bp, SARS Virus
ttaactcaccaaccgacgtagttca

SEQ ID NO: 230055 - DNA, 25 bp, SARS Virus
taactcaccaaacgacgtagttcac

SEQ ID NO: 230056 - DNA, 25 bp, SARS Virus
aactcaccaaaccacgtagttcaca

SEQ ID NO: 230057 - DNA, 25 bp, SARS Virus
actcaccaaacgccgtagttcacac

SEQ ID NO: 230058 - DNA, 25 bp, SARS Virus
ctcaccaaacgacgtagttcacacg

SEQ ID NO: 230059 - DNA, 25 bp, SARS Virus
tcaccaaacgacctagttcacacgc

SEQ ID NO: 230060 - DNA, 25 bp, SARS Virus
caccaaacgacgcagttcacacgcg

SEQ ID NO: 230061 - DNA, 25 bp, SARS Virus
accaaacgacgtcgttcacacgcgc

SEQ ID NO: 230062 - DNA, 25 bp, SARS Virus
ccaaacgacgtacttcacacgcgcg

SEQ ID NO: 230063 - DNA, 25 bp, SARS Virus
caaacgacgtagctcacacgcgcgt

SEQ ID NO: 230064 - DNA, 25 bp, SARS Virus
aaacgacgtagtccacacgcgcgtt

SEQ ID NO: 230065 - DNA, 25 bp, SARS Virus
aacgacgtagttcacacgcgcgttt

SEQ ID NO: 230066 - DNA, 25 bp, SARS Virus
acgacgtagttcccacgcgcgtttt

SEQ ID NO: 230067 - DNA, 25 bp, SARS Virus
cgacgtagttcacacgcgcgttttt

SEQ ID NO: 230068 - DNA, 25 bp, SARS Virus
gacgtagttcacccgcgcgttttta

SEQ ID NO: 230069 - DNA, 25 bp, SARS Virus
acgtagttcacacgcgcgtttttaa

SEQ ID NO: 230070 - DNA, 25 bp, SARS Virus
cgtagttcacacccgcgtttttaac

SEQ ID NO: 230071 - DNA, 25 bp, SARS Virus
gtagttcacacgcgcgtttttaact

SEQ ID NO: 230072 - DNA, 25 bp, SARS Virus
tagttcacacgcccgtttttaacta

SEQ ID NO: 230073 - DNA, 25 bp, SARS Virus
agttcacacgcgcgtttttaactag

SEQ ID NO: 230074 - DNA, 25 bp, SARS Virus
gttcacacgcgcctttttaactaga

SEQ ID NO: 230075 - DNA, 25 bp, SARS Virus
ttcacacgcgcgcttttaactagac

SEQ ID NO: 230076 - DNA, 25 bp, SARS Virus
tcacacgcgcgtctttaactagact

SEQ ID NO: 230077 - DNA, 25 bp, SARS Virus
cacacgcgcgttcttaactagacta

SEQ ID NO: 230078 - DNA, 25 bp, SARS Virus
acacgcgcgtttctaactagactat

SEQ ID NO: 230079 - DNA, 25 bp, SARS Virus
cacgcgcgttttcaactagactatt

SEQ ID NO: 230080 - DNA, 25 bp, SARS Virus
acgcgcgtttttcactagactattg

SEQ ID NO: 230081 - DNA, 25 bp, SARS Virus
cgcgcgtttttacctagactattgt

SEQ ID NO: 230082 - DNA, 25 bp, SARS Virus
gcgcgtttttaactagactattgtg

SEQ ID NO: 230083 - DNA, 25 bp, SARS Virus
cgcgtttttaaccagactattgtgg

SEQ ID NO: 230084 - DNA, 25 bp, SARS Virus
gcgtttttaactcgactattgtggt

SEQ ID NO: 230085 - DNA, 25 bp, SARS Virus
cgtttttaactacactattgtggtc

SEQ ID NO: 230086 - DNA, 25 bp, SARS Virus
gtttttaactagcctattgtggtcg

SEQ ID NO: 230087 - DNA, 25 bp, SARS Virus
tttttaactagactattgtggtcgt

SEQ ID NO: 230088 - DNA, 25 bp, SARS Virus
ttttaactagaccattgtggtcgtc

SEQ ID NO: 230089 - DNA, 25 bp, SARS Virus
tttaactagactcttgtggtcgtcg

SEQ ID NO: 230090 - DNA, 25 bp, SARS Virus
ttaactagactactgtggtcgtcgg

SEQ ID NO: 230091 - DNA, 25 bp, SARS Virus
taactagactatcgtggtcgtcgga

SEQ ID NO: 230092 - DNA, 25 bp, SARS Virus
aactagactattctggtcgtcggac

SEQ ID NO: 230093 - DNA, 25 bp, SARS Virus
actagactattgcggtcgtcggaca

SEQ ID NO: 230094 - DNA, 25 bp, SARS Virus
ctagactattgtcgtcgtcggacac

SEQ ID NO: 230095 - DNA, 25 bp, SARS Virus
tagactattgtgctcgtcggacact

SEQ ID NO: 230096 - DNA, 25 bp, SARS Virus
agactattgtggccgtcggacactc

SEQ ID NO: 230097 - DNA, 25 bp, SARS Virus
gactattgtggtcgtcggacactcc

SEQ ID NO: 230098 - DNA, 25 bp, SARS Virus
actattgtggtcctcggacactccc

SEQ ID NO: 230099 - DNA, 25 bp, SARS Virus
ctattgtggtcgccggacactccct

SEQ ID NO: 230100 - DNA, 25 bp, SARS Virus
tattgtggtcgtcggacactccctt

SEQ ID NO: 230101 - DNA, 25 bp, SARS Virus
attgtggtcgtccgacactcccttt

SEQ ID NO: 230102 - DNA, 25 bp, SARS Virus
ttgtggtcgtcgcacactccctttt

SEQ ID NO: 230103 - DNA, 25 bp, SARS Virus
tgtggtcgtcggccactcccttttg

SEQ ID NO: 230104 - DNA, 25 bp, SARS Virus
gtggtcgtcggacactcccttttgg

SEQ ID NO: 230105 - DNA, 25 bp, SARS Virus
tggtcgtcggaccctcccttttggt

SEQ ID NO: 230106 - DNA, 25 bp, SARS Virus
ggtcgtcggacactcccttttggtg

SEQ ID NO: 230107 - DNA, 25 bp, SARS Virus
gtcgtcggacacccccttttggtgt

SEQ ID NO: 230108 - DNA, 25 bp, SARS Virus
tcgtcggacactcccttttggtgtg

SEQ ID NO: 230109 - DNA, 25 bp, SARS Virus
cgtcggacactcccttttggtgtgt

SEQ ID NO: 230110 - DNA, 25 bp, SARS Virus
gtcggacactcccttttggtgtgtc

SEQ ID NO: 230111 - DNA, 25 bp, SARS Virus
tcggacactcccctttggtgtgtca

SEQ ID NO: 230112 - DNA, 25 bp, SARS Virus
cggacactccctcttggtgtgtcac

SEQ ID NO: 230113 - DNA, 25 bp, SARS Virus
ggacactcccttctggtgtgtcacc

SEQ ID NO: 230114 - DNA, 25 bp, SARS Virus
gacactccctttcggtgtgtcacca

SEQ ID NO: 230115 - DNA, 25 bp, SARS Virus
acactcccttttcgtgtgtcaccac

SEQ ID NO: 230116 - DNA, 25 bp, SARS Virus
cactcccttttgctgtgtcaccaca

SEQ ID NO: 230117 - DNA, 25 bp, SARS Virus
actcccttttggcgtgtcaccacaa

SEQ ID NO: 230118 - DNA, 25 bp, SARS Virus
ctcccttttggtctgtcaccacaat

SEQ ID NO: 230119 - DNA, 25 bp, SARS Virus
tcccttttggtgcgtcaccacaatt

SEQ ID NO: 230120 - DNA, 25 bp, SARS Virus
cccttttggtgtctcaccacaattt

SEQ ID NO: 230121 - DNA, 25 bp, SARS Virus
ccttttggtgtgccaccacaatttt

SEQ ID NO: 230122 - DNA, 25 bp, SARS Virus
cttttggtgtgtcaccacaattttg

SEQ ID NO: 230123 - DNA, 25 bp, SARS Virus
ttttggtgtgtccccacaattttga

SEQ ID NO: 230124 - DNA, 25 bp, SARS Virus
tttggtgtgtcaccacaattttgac

SEQ ID NO: 230125 - DNA, 25 bp, SARS Virus
ttggtgtgtcaccacaattttgact

SEQ ID NO: 230126 - DNA, 25 bp, SARS Virus
tggtgtgtcaccccaattttgacta

SEQ ID NO: 230127 - DNA, 25 bp, SARS Virus
ggtgtgtcaccacaattttgactag

SEQ ID NO: 230128 - DNA, 25 bp, SARS Virus
gtgtgtcaccaccattttgactaga

SEQ ID NO: 230129 - DNA, 25 bp, SARS Virus
tgtgtcaccacacttttgactagag

SEQ ID NO: 230130 - DNA, 25 bp, SARS Virus
gtgtcaccacaactttgactagaga

SEQ ID NO: 230131 - DNA, 25 bp, SARS Virus
tgtcaccacaatcttgactagagac

SEQ ID NO: 230132 - DNA, 25 bp, SARS Virus
gtcaccacaattctgactagagaca

SEQ ID NO: 230133 - DNA, 25 bp, SARS Virus
tcaccacaatttcgactagagacaa

SEQ ID NO: 230134 - DNA, 25 bp, SARS Virus
caccacaattttcactagagacaac

SEQ ID NO: 230135 - DNA, 25 bp, SARS Virus
accacaattttgcctagagacaaca

SEQ ID NO: 230136 - DNA, 25 bp, SARS Virus
ccacaattttgactagagacaacag

SEQ ID NO: 230137 - DNA, 25 bp, SARS Virus
cacaattttgaccagagacaacagg

SEQ ID NO: 230138 - DNA, 25 bp, SARS Virus
acaattttgactcgagacaacaggt

SEQ ID NO: 230139 - DNA, 25 bp, SARS Virus
caattttgactacagacaacaggtt

SEQ ID NO: 230140 - DNA, 25 bp, SARS Virus
aattttgactagcgacaacaggtta

SEQ ID NO: 230141 - DNA, 25 bp, SARS Virus
attttgactagacacaacaggttac

SEQ ID NO: 230142 - DNA, 25 bp, SARS Virus
ttttgactagagccaacaggttaca

SEQ ID NO: 230143 - DNA, 25 bp, SARS Virus
tttgactagagacaacaggttacaa

SEQ ID NO: 230144 - DNA, 25 bp, SARS Virus
ttgactagagaccacaggttacaag

SEQ ID NO: 230145 - DNA, 25 bp, SARS Virus
tgactagagacaccaggttacaagg

SEQ ID NO: 230146 - DNA, 25 bp, SARS Virus
gactagagacaacaggttacaaggt

SEQ ID NO: 230147 - DNA, 25 bp, SARS Virus
actagagacaaccggttacaaggtt

SEQ ID NO: 230148 - DNA, 25 bp, SARS Virus
ctagagacaacacgttacaaggttc

SEQ ID NO: 230149 - DNA, 25 bp, SARS Virus
tagagacaacagcttacaaggttcg

SEQ ID NO: 230150 - DNA, 25 bp, SARS Virus
agagacaacaggctacaaggttcgt

SEQ ID NO: 230151 - DNA, 25 bp, SARS Virus
gagacaacaggtcacaaggttcgtg

SEQ ID NO: 230152 - DNA, 25 bp, SARS Virus
agacaacaggttccaaggttcgtgg

SEQ ID NO: 230153 - DNA, 25 bp, SARS Virus
gacaacaggttacaaggttcgtgga

SEQ ID NO: 230154 - DNA, 25 bp, SARS Virus
acaacaggttaccaggttcgtggaa

SEQ ID NO: 230155 - DNA, 25 bp, SARS Virus
caacaggttacacggttcgtggaaa

SEQ ID NO: 230156 - DNA, 25 bp, SARS Virus
aacaggttacaacgttcgtggaaaa

SEQ ID NO: 230157 - DNA, 25 bp, SARS Virus
acaggttacaagcttcgtggaaaat

SEQ ID NO: 230158 - DNA, 25 bp, SARS Virus
caggttacaaggctcgtggaaaatg

SEQ ID NO: 230159 - DNA, 25 bp, SARS Virus
aggttacaaggtccgtggaaaatgc

SEQ ID NO: 230160 - DNA, 25 bp, SARS Virus
ggttacaaggttcgtggaaaatgcc

SEQ ID NO: 230161 - DNA, 25 bp, SARS Virus
gttacaaggttcctggaaaatgccc

SEQ ID NO: 230162 - DNA, 25 bp, SARS Virus
ttacaaggttcgcggaaaatgcccg

SEQ ID NO: 230163 - DNA, 25 bp, SARS Virus
tacaaggttcgtcgaaaatgcccga

SEQ ID NO: 230164 - DNA, 25 bp, SARS Virus
acaaggttcgtgcaaaatgcccgaa

SEQ ID NO: 230165 - DNA, 25 bp, SARS Virus
caaggttcgtggcaaatgcccgaaa

SEQ ID NO: 230166 - DNA, 25 bp, SARS Virus
aaggttcgtggacaatgcccgaaag

SEQ ID NO: 230167 - DNA, 25 bp, SARS Virus
aggttcgtggaacatgcccgaaagg

SEQ ID NO: 230168 - DNA, 25 bp, SARS Virus
ggttcgtggaaactgcccgaaaggg

SEQ ID NO: 230169 - DNA, 25 bp, SARS Virus
gttcgtggaaaacgcccgaaaggga

SEQ ID NO: 230170 - DNA, 25 bp, SARS Virus
ttcgtggaaaatccccgaaagggaa

SEQ ID NO: 230171 - DNA, 25 bp, SARS Virus
tcgtggaaaatgcccgaaagggaac

SEQ ID NO: 230172 - DNA, 25 bp, SARS Virus
cgtggaaaatgcccgaaagggaacc

SEQ ID NO: 230173 - DNA, 25 bp, SARS Virus
gtggaaaatgcccgaaagggaacca

SEQ ID NO: 230174 - DNA, 25 bp, SARS Virus
tggaaaatgccccaaagggaaccat

SEQ ID NO: 230175 - DNA, 25 bp, SARS Virus
ggaaaatgcccgcaagggaaccatt

SEQ ID NO: 230176 - DNA, 25 bp, SARS Virus
gaaaatgcccgacagggaaccattg

SEQ ID NO: 230177 - DNA, 25 bp, SARS Virus
aaaatgcccgaacgggaaccattga

SEQ ID NO: 230178 - DNA, 25 bp, SARS Virus
aaatgcccgaaacggaaccattgaa

SEQ ID NO: 230179 - DNA, 25 bp, SARS Virus
aatgcccgaaagcgaaccattgaaa

SEQ ID NO: 230180 - DNA, 25 bp, SARS Virus
atgcccgaaaggcaaccattgaaat

SEQ ID NO: 230181 - DNA, 25 bp, SARS Virus
tgcccgaaagggcaccattgaaata

SEQ ID NO: 230182 - DNA, 25 bp, SARS Virus
gcccgaaagggacccattgaaatat

SEQ ID NO: 230183 - DNA, 25 bp, SARS Virus
cccgaaagggaaccattgaaatatc

SEQ ID NO: 230184 - DNA, 25 bp, SARS Virus
ccgaaagggaaccattgaaatatca

SEQ ID NO: 230185 - DNA, 25 bp, SARS Virus
cgaaagggaacccttgaaatatcaa

SEQ ID NO: 230186 - DNA, 25 bp, SARS Virus
gaaagggaaccactgaaatatcaat

SEQ ID NO: 230187 - DNA, 25 bp, SARS Virus
aaagggaaccatcgaaatatcaatg

SEQ ID NO: 230188 - DNA, 25 bp, SARS Virus
aagggaaccattcaaatatcaatgg

SEQ ID NO: 230189 - DNA, 25 bp, SARS Virus
agggaaccattgcaatatcaatggc

SEQ ID NO: 230190 - DNA, 25 bp, SARS Virus
gggaaccattgacatatcaatggcg

SEQ ID NO: 230191 - DNA, 25 bp, SARS Virus
ggaaccattgaactatcaatggcgt

SEQ ID NO: 230192 - DNA, 25 bp, SARS Virus
gaaccattgaaacatcaatggcgtc

SEQ ID NO: 230193 - DNA, 25 bp, SARS Virus
aaccattgaaatctcaatggcgtcc

SEQ ID NO: 230194 - DNA, 25 bp, SARS Virus
accattgaaataccaatggcgtcct

SEQ ID NO: 230195 - DNA, 25 bp, SARS Virus
ccattgaaatatcaatggcgtcctg

SEQ ID NO: 230196 - DNA, 25 bp, SARS Virus
cattgaaatatccatggcgtcctga

SEQ ID NO: 230197 - DNA, 25 bp, SARS Virus
attgaaatatcactggcgtcctgag

SEQ ID NO: 230198 - DNA, 25 bp, SARS Virus
ttgaaatatcaacggcgtcctgagt

SEQ ID NO: 230199 - DNA, 25 bp, SARS Virus
tgaaatatcaatcgcgtcctgagtt

SEQ ID NO: 230200 - DNA, 25 bp, SARS Virus
gaaatatcaatgccgtcctgagttg

SEQ ID NO: 230201 - DNA, 25 bp, SARS Virus
aaatatcaatggcgtcctgagttgt

SEQ ID NO: 230202 - DNA, 25 bp, SARS Virus
aatatcaatggcctcctgagttgtt

SEQ ID NO: 230203 - DNA, 25 bp, SARS Virus
atatcaatggcgccctgagttgtta

SEQ ID NO: 230204 - DNA, 25 bp, SARS Virus
tatcaatggcgtcctgagttgttac

SEQ ID NO: 230205 - DNA, 25 bp, SARS Virus
atcaatggcgtcctgagttgttacc

SEQ ID NO: 230206 - DNA, 25 bp, SARS Virus
tcaatggcgtcccgagttgttacca

SEQ ID NO: 230207 - DNA, 25 bp, SARS Virus
caatggcgtcctcagttgttaccaa

SEQ ID NO: 230208 - DNA, 25 bp, SARS Virus
aatggcgtcctgcgttgttaccaaa

SEQ ID NO: 230209 - DNA, 25 bp, SARS Virus
atggcgtcctgacttgttaccaaaa

SEQ ID NO: 230210 - DNA, 25 bp, SARS Virus
tggcgtcctgagctgttaccaaaac

SEQ ID NO: 230211 - DNA, 25 bp, SARS Virus
ggcgtcctgagtcgttaccaaaact

SEQ ID NO: 230212 - DNA, 25 bp, SARS Virus
gcgtcctgagttcttaccaaaactt

SEQ ID NO: 230213 - DNA, 25 bp, SARS Virus
cgtcctgagttgctaccaaaacttt

SEQ ID NO: 230214 - DNA, 25 bp, SARS Virus
gtcctgagttgtcaccaaaactttc

SEQ ID NO: 230215 - DNA, 25 bp, SARS Virus
tcctgagttgttcccaaaactttct

SEQ ID NO: 230216 - DNA, 25 bp, SARS Virus
cctgagttgttaccaaaactttctg

SEQ ID NO: 230217 - DNA, 25 bp, SARS Virus
ctgagttgttaccaaaactttctga

SEQ ID NO: 230218 - DNA, 25 bp, SARS Virus
tgagttgttacccaaactttctgaa

SEQ ID NO: 230219 - DNA, 25 bp, SARS Virus
gagttgttaccacaactttctgaac

SEQ ID NO: 230220 - DNA, 25 bp, SARS Virus
agttgttaccaacactttctgaaca

SEQ ID NO: 230221 - DNA, 25 bp, SARS Virus
gttgttaccaaacctttctgaacat

SEQ ID NO: 230222 - DNA, 25 bp, SARS Virus
ttgttaccaaaactttctgaacatt

SEQ ID NO: 230223 - DNA, 25 bp, SARS Virus
tgttaccaaaaccttctgaacatta

SEQ ID NO: 230224 - DNA, 25 bp, SARS Virus
gttaccaaaactctctgaacattag

SEQ ID NO: 230225 - DNA, 25 bp, SARS Virus
ttaccaaaacttcctgaacattagt

SEQ ID NO: 230226 - DNA, 25 bp, SARS Virus
taccaaaactttctgaacattagtt

SEQ ID NO: 230227 - DNA, 25 bp, SARS Virus
accaaaactttccgaacattagttc

SEQ ID NO: 230228 - DNA, 25 bp, SARS Virus
ccaaaactttctcaacattagttct

SEQ ID NO: 230229 - DNA, 25 bp, SARS Virus
caaaactttctgcacattagttctg

SEQ ID NO: 230230 - DNA, 25 bp, SARS Virus
aaaactttctgaccattagttctga

SEQ ID NO: 230231 - DNA, 25 bp, SARS Virus
aaactttctgaacattagttctgag

SEQ ID NO: 230232 - DNA, 25 bp, SARS Virus
aactttctgaaccttagttctgaga

SEQ ID NO: 230233 - DNA, 25 bp, SARS Virus
actttctgaacactagttctgagaa

SEQ ID NO: 230234 - DNA, 25 bp, SARS Virus
ctttctgaacatcagttctgagaaa

SEQ ID NO: 230235 - DNA, 25 bp, SARS Virus
tttctgaacattcgttctgagaaat

SEQ ID NO: 230236 - DNA, 25 bp, SARS Virus
ttctgaacattacttctgagaaata

SEQ ID NO: 230237 - DNA, 25 bp, SARS Virus
tctgaacattagctctgagaaatat

SEQ ID NO: 230238 - DNA, 25 bp, SARS Virus
ctgaacattagtcctgagaaatatc

SEQ ID NO: 230239 - DNA, 25 bp, SARS Virus
tgaacattagttctgagaaatatca

SEQ ID NO: 230240 - DNA, 25 bp, SARS Virus
gaacattagttccgagaaatatcac

SEQ ID NO: 230241 - DNA, 25 bp, SARS Virus
aacattagttctcagaaatatcaca

SEQ ID NO: 230242 - DNA, 25 bp, SARS Virus
acattagttctgcgaaatatcacag

SEQ ID NO: 230243 - DNA, 25 bp, SARS Virus
cattagttctgacaaatatcacagt

SEQ ID NO: 230244 - DNA, 25 bp, SARS Virus
attagttctgagcaatatcacagtt

SEQ ID NO: 230245 - DNA, 25 bp, SARS Virus
ttagttctgagacatatcacagtta

SEQ ID NO: 230246 - DNA, 25 bp, SARS Virus
tagttctgagaactatcacagttat

SEQ ID NO: 230247 - DNA, 25 bp, SARS Virus
agttctgagaaacatcacagttatt

SEQ ID NO: 230248 - DNA, 25 bp, SARS Virus
gttctgagaaatctcacagttattt

SEQ ID NO: 230249 - DNA, 25 bp, SARS Virus
ttctgagaaataccacagttatttc

SEQ ID NO: 230250 - DNA, 25 bp, SARS Virus
tctgagaaatatcacagttatttcc

SEQ ID NO: 230251 - DNA, 25 bp, SARS Virus
ctgagaaatatcccagttatttccg

SEQ ID NO: 230252 - DNA, 25 bp, SARS Virus
tgagaaatatcacagttatttccgt

SEQ ID NO: 230253 - DNA, 25 bp, SARS Virus
gagaaatatcaccgttatttccgtg

SEQ ID NO: 230254 - DNA, 25 bp, SARS Virus
agaaatatcacacttatttccgtga

SEQ ID NO: 230255 - DNA, 25 bp, SARS Virus
gaaatatcacagctatttccgtgaa

SEQ ID NO: 230256 - DNA, 25 bp, SARS Virus
aaatatcacagtcatttccgtgaac

SEQ ID NO: 230257 - DNA, 25 bp, SARS Virus
aatatcacagttctttccgtgaaca

SEQ ID NO: 230258 - DNA, 25 bp, SARS Virus
atatcacagttacttccgtgaacat

SEQ ID NO: 230259 - DNA, 25 bp, SARS Virus
tatcacagttatctccgtgaacatc

SEQ ID NO: 230260 - DNA, 25 bp, SARS Virus
atcacagttattcccgtgaacatct

SEQ ID NO: 230261 - DNA, 25 bp, SARS Virus
tcacagttatttccgtgaacatctt

SEQ ID NO: 230262 - DNA, 25 bp, SARS Virus
cacagttatttccgtgaacatcttc

SEQ ID NO: 230263 - DNA, 25 bp, SARS Virus
acagttatttccctgaacatcttcg

SEQ ID NO: 230264 - DNA, 25 bp, SARS Virus
cagttatttccgcgaacatcttcgt

SEQ ID NO: 230265 - DNA, 25 bp, SARS Virus
agttatttccgtcaacatcttcgtc

SEQ ID NO: 230266 - DNA, 25 bp, SARS Virus
gttatttccgtgcacatcttcgtct

SEQ ID NO: 230267 - DNA, 25 bp, SARS Virus
ttatttccgtgaccatcttcgtctc

SEQ ID NO: 230268 - DNA, 25 bp, SARS Virus
tatttccgtgaacatcttcgtctct

SEQ ID NO: 230269 - DNA, 25 bp, SARS Virus
atttccgtgaacctcttcgtctctt

SEQ ID NO: 230270 - DNA, 25 bp, SARS Virus
tttccgtgaacaccttcgtctcttt

SEQ ID NO: 230271 - DNA, 25 bp, SARS Virus
ttccgtgaacatcttcgtctctttc

SEQ ID NO: 230272 - DNA, 25 bp, SARS Virus
tccgtgaacatcctcgtctctttct

SEQ ID NO: 230273 - DNA, 25 bp, SARS Virus
ccgtgaacatctccgtctctttcta

SEQ ID NO: 230274 - DNA, 25 bp, SARS Virus
cgtgaacatcttcgtctctttctac

SEQ ID NO: 230275 - DNA, 25 bp, SARS Virus
gtgaacatcttcctctctttctacg

SEQ ID NO: 230276 - DNA, 25 bp, SARS Virus
tgaacatcttcgcctctttctacgg

SEQ ID NO: 230277 - DNA, 25 bp, SARS Virus
gaacatcttcgtctctttctacggt

SEQ ID NO: 230278 - DNA, 25 bp, SARS Virus
aacatcttcgtccctttctacggtt

SEQ ID NO: 230279 - DNA, 25 bp, SARS Virus
acatcttcgtctctttctacggttt

SEQ ID NO: 230280 - DNA, 25 bp, SARS Virus
catcttcgtctccttctacggtttt

SEQ ID NO: 230281 - DNA, 25 bp, SARS Virus
atcttcgtctctctctacggtttta

SEQ ID NO: 230282 - DNA, 25 bp, SARS Virus
tcttcgtctcttcctacggttttac

SEQ ID NO: 230283 - DNA, 25 bp, SARS Virus
cttcgtctctttctacggttttact

SEQ ID NO: 230284 - DNA, 25 bp, SARS Virus
ttcgtctctttccacggttttacta

SEQ ID NO: 230285 - DNA, 25 bp, SARS Virus
tcgtctctttctccggttttactac

SEQ ID NO: 230286 - DNA, 25 bp, SARS Virus
cgtctctttctacggttttactacc

SEQ ID NO: 230287 - DNA, 25 bp, SARS Virus
gtctctttctaccgttttactaccg

SEQ ID NO: 230288 - DNA, 25 bp, SARS Virus
tctctttctacgcttttactaccgt

SEQ ID NO: 230289 - DNA, 25 bp, SARS Virus
ctctttctacggctttactaccgtt

SEQ ID NO: 230290 - DNA, 25 bp, SARS Virus
tctttctacggtcttactaccgttg

SEQ ID NO: 230291 - DNA, 25 bp, SARS Virus
ctttctacggttctactaccgttgg

SEQ ID NO: 230292 - DNA, 25 bp, SARS Virus
tttctacggtttcactaccgttgga

SEQ ID NO: 230293 - DNA, 25 bp, SARS Virus
ttctacggttttcctaccgttggag

SEQ ID NO: 230294 - DNA, 25 bp, SARS Virus
tctacggttttactaccgttggaga

SEQ ID NO: 230295 - DNA, 25 bp, SARS Virus
ctacggttttaccaccgttggagaa

SEQ ID NO: 230296 - DNA, 25 bp, SARS Virus
tacggttttactcccgttggagaag

SEQ ID NO: 230297 - DNA, 25 bp, SARS Virus
acggttttactaccgttggagaagt

SEQ ID NO: 230298 - DNA, 25 bp, SARS Virus
cggttttactaccgttggagaagta

SEQ ID NO: 230299 - DNA, 25 bp, SARS Virus
ggttttactacccttggagaagtaa

SEQ ID NO: 230300 - DNA, 25 bp, SARS Virus
gttttactaccgctggagaagtaag

SEQ ID NO: 230301 - DNA, 25 bp, SARS Virus
ttttactaccgtcggagaagtaagt

SEQ ID NO: 230302 - DNA, 25 bp, SARS Virus
tttactaccgttcgagaagtaagtt

SEQ ID NO: 230303 - DNA, 25 bp, SARS Virus
ttactaccgttgcagaagtaagttt

SEQ ID NO: 230304 - DNA, 25 bp, SARS Virus
tactaccgttggcgaagtaagttta

SEQ ID NO: 230305 - DNA, 25 bp, SARS Virus
actaccgttggacaagtaagtttac

SEQ ID NO: 230306 - DNA, 25 bp, SARS Virus
ctaccgttggagcagtaagtttact

SEQ ID NO: 230307 - DNA, 25 bp, SARS Virus
taccgttggagacgtaagtttactt

SEQ ID NO: 230308 - DNA, 25 bp, SARS Virus
accgttggagaactaagtttacttt

SEQ ID NO: 230309 - DNA, 25 bp, SARS Virus
ccgttggagaagcaagtttactttt

SEQ ID NO: 230310 - DNA, 25 bp, SARS Virus
cgttggagaagtcagtttactttta

SEQ ID NO: 230311 - DNA, 25 bp, SARS Virus
gttggagaagtacgtttacttttag

SEQ ID NO: 230312 - DNA, 25 bp, SARS Virus
ttggagaagtaactttacttttagc

SEQ ID NO: 230313 - DNA, 25 bp, SARS Virus
tggagaagtaagcttacttttagcg

SEQ ID NO: 230314 - DNA, 25 bp, SARS Virus
ggagaagtaagtctacttttagcgg

SEQ ID NO: 230315 - DNA, 25 bp, SARS Virus
gagaagtaagttcacttttagcggt

SEQ ID NO: 230316 - DNA, 25 bp, SARS Virus
agaagtaagtttccttttagcggtt

SEQ ID NO: 230317 - DNA, 25 bp, SARS Virus
gaagtaagtttacttttagcggttg

SEQ ID NO: 230318 - DNA, 25 bp, SARS Virus
aagtaagtttacctttagcggttgt

SEQ ID NO: 230319 - DNA, 25 bp, SARS Virus
agtaagtttactcttagcggttgtt

SEQ ID NO: 230320 - DNA, 25 bp, SARS Virus
gtaagtttacttctagcggttgtta

SEQ ID NO: 230321 - DNA, 25 bp, SARS Virus
taagtttactttcagcggttgttac

SEQ ID NO: 230322 - DNA, 25 bp, SARS Virus
aagtttacttttcgcggttgttaca

SEQ ID NO: 230323 - DNA, 25 bp, SARS Virus
agtttacttttaccggttgttacaa

SEQ ID NO: 230324 - DNA, 25 bp, SARS Virus
gtttacttttagcggttgttacaat

SEQ ID NO: 230325 - DNA, 25 bp, SARS Virus
tttacttttagccgttgttacaatt

SEQ ID NO: 230326 - DNA, 25 bp, SARS Virus
ttacttttagcgcttgttacaatta

SEQ ID NO: 230327 - DNA, 25 bp, SARS Virus
tacttttagcggctgttacaattac

SEQ ID NO: 230328 - DNA, 25 bp, SARS Virus
acttttagcggtcgttacaattaca

SEQ ID NO: 230329 - DNA, 25 bp, SARS Virus
cttttagcggttcttacaattacaa

SEQ ID NO: 230330 - DNA, 25 bp, SARS Virus
ttttagcggttgctacaattacaat

SEQ ID NO: 230331 - DNA, 25 bp, SARS Virus
tttagcggttgtcacaattacaatt

SEQ ID NO: 230332 - DNA, 25 bp, SARS Virus
ttagcggttgttccaattacaattg

SEQ ID NO: 230333 - DNA, 25 bp, SARS Virus
tagcggttgttacaattacaattgt

SEQ ID NO: 230334 - DNA, 25 bp, SARS Virus
agcggttgttaccattacaattgtg

SEQ ID NO: 230335 - DNA, 25 bp, SARS Virus
gcggttgttacacttacaattgtgc

SEQ ID NO: 230336 - DNA, 25 bp, SARS Virus
cggttgttacaactacaattgtgca

SEQ ID NO: 230337 - DNA, 25 bp, SARS Virus
ggttgttacaatcacaattgtgcaa

SEQ ID NO: 230338 - DNA, 25 bp, SARS Virus
gttgttacaattccaattgtgcaag

SEQ ID NO: 230339 - DNA, 25 bp, SARS Virus
ttgttacaattacaattgtgcaagt

SEQ ID NO: 230340 - DNA, 25 bp, SARS Virus
tgttacaattaccattgtgcaagtg

SEQ ID NO: 230341 - DNA, 25 bp, SARS Virus
gttacaattacacttgtgcaagtgc

SEQ ID NO: 230342 - DNA, 25 bp, SARS Virus
ttacaattacaactgtgcaagtgct

SEQ ID NO: 230343 - DNA, 25 bp, SARS Virus
tacaattacaatcgtgcaagtgctg

SEQ ID NO: 230344 - DNA, 25 bp, SARS Virus
acaattacaattctgcaagtgctga

SEQ ID NO: 230345 - DNA, 25 bp, SARS Virus
caattacaattgcgcaagtgctgag

SEQ ID NO: 230346 - DNA, 25 bp, SARS Virus
aattacaattgtccaagtgctgagt

SEQ ID NO: 230347 - DNA, 25 bp, SARS Virus
attacaattgtgcaagtgctgagtc

SEQ ID NO: 230348 - DNA, 25 bp, SARS Virus
ttacaattgtgccagtgctgagtca

SEQ ID NO: 230349 - DNA, 25 bp, SARS Virus
tacaattgtgcacgtgctgagtcat

SEQ ID NO: 230350 - DNA, 25 bp, SARS Virus
acaattgtgcaactgctgagtcata

SEQ ID NO: 230351 - DNA, 25 bp, SARS Virus
caattgtgcaagcgctgagtcatag

SEQ ID NO: 230352 - DNA, 25 bp, SARS Virus
aattgtgcaagtcctgagtcataga

SEQ ID NO: 230353 - DNA, 25 bp, SARS Virus
attgtgcaagtgctgagtcatagag

SEQ ID NO: 230354 - DNA, 25 bp, SARS Virus
ttgtgcaagtgccgagtcatagagt

SEQ ID NO: 230355 - DNA, 25 bp, SARS Virus
tgtgcaagtgctcagtcatagagtt

SEQ ID NO: 230356 - DNA, 25 bp, SARS Virus
gtgcaagtgctgcgtcatagagttc

SEQ ID NO: 230357 - DNA, 25 bp, SARS Virus
tgcaagtgctgactcatagagttcc

SEQ ID NO: 230358 - DNA, 25 bp, SARS Virus
gcaagtgctgagccatagagttcct

SEQ ID NO: 230359 - DNA, 25 bp, SARS Virus
caagtgctgagtcatagagttcctc

SEQ ID NO: 230360 - DNA, 25 bp, SARS Virus
aagtgctgagtcctagagttcctct

SEQ ID NO: 230361 - DNA, 25 bp, SARS Virus
agtgctgagtcacagagttcctcta

SEQ ID NO: 230362 - DNA, 25 bp, SARS Virus
gtgctgagtcatcgagttcctctag

SEQ ID NO: 230363 - DNA, 25 bp, SARS Virus
tgctgagtcatacagttcctctagg

SEQ ID NO: 230364 - DNA, 25 bp, SARS Virus
gctgagtcatagcgttcctctagga

SEQ ID NO: 230365 - DNA, 25 bp, SARS Virus
ctgagtcatagacttcctctaggag

SEQ ID NO: 230366 - DNA, 25 bp, SARS Virus
tgagtcatagagctcctctaggagt

SEQ ID NO: 230367 - DNA, 25 bp, SARS Virus
gagtcatagagtccctctaggagta

SEQ ID NO: 230368 - DNA, 25 bp, SARS Virus
agtcatagagttcctctaggagtaa

SEQ ID NO: 230369 - DNA, 25 bp, SARS Virus
ttttctaatctggtggtgactcttc

SEQ ID NO: 230370 - DNA, 25 bp, SARS Virus
tttctaatctgtgggtgactcttca

SEQ ID NO: 230371 - DNA, 25 bp, SARS Virus
ttctaatctgttggtgactcttcag

SEQ ID NO: 230372 - DNA, 25 bp, SARS Virus
tctaatctgttggtgactcttcaga

SEQ ID NO: 230373 - DNA, 25 bp, SARS Virus
ctaatctgttggggactcttcagac

SEQ ID NO: 230374 - DNA, 25 bp, SARS Virus
taatctgttggtgactcttcagaca

SEQ ID NO: 230375 - DNA, 25 bp, SARS Virus
aatctgttggtggctcttcagacaa

SEQ ID NO: 230376 - DNA, 25 bp, SARS Virus
atctgttggtgagtcttcagacaac

SEQ ID NO: 230377 - DNA, 25 bp, SARS Virus
tctgttggtgacgcttcagacaaca

SEQ ID NO: 230378 - DNA, 25 bp, SARS Virus
ctgttggtgactgttcagacaacat

SEQ ID NO: 230379 - DNA, 25 bp, SARS Virus
tgttggtgactcgtcagacaacatg

SEQ ID NO: 230380 - DNA, 25 bp, SARS Virus
gttggtgactctgcagacaacatgt

SEQ ID NO: 230381 - DNA, 25 bp, SARS Virus
ttggtgactcttgagacaacatgtt

SEQ ID NO: 230382 - DNA, 25 bp, SARS Virus
tggtgactcttcggacaacatgttc

SEQ ID NO: 230383 - DNA, 25 bp, SARS Virus
ggtgactcttcagacaacatgttct

SEQ ID NO: 230384 - DNA, 25 bp, SARS Virus
gtgactcttcaggcaacatgttctg

SEQ ID NO: 230385 - DNA, 25 bp, SARS Virus
tgactcttcagagaacatgttctgg

SEQ ID NO: 230386 - DNA, 25 bp, SARS Virus
gactcttcagacgacatgttctggt

SEQ ID NO: 230387 - DNA, 25 bp, SARS Virus
actcttcagacagcatgttctggtg

SEQ ID NO: 230388 - DNA, 25 bp, SARS Virus
ctcttcagacaagatgttctggtgg

SEQ ID NO: 230389 - DNA, 25 bp, SARS Virus
tcttcagacaacgtgttctggtggt

SEQ ID NO: 230390 - DNA, 25 bp, SARS Virus
cttcagacaacaggttctggtggtc

SEQ ID NO: 230391 - DNA, 25 bp, SARS Virus
ttcagacaacatgttctggtggtca

SEQ ID NO: 230392 - DNA, 25 bp, SARS Virus
tcagacaacatggtctggtggtcaa

SEQ ID NO: 230393 - DNA, 25 bp, SARS Virus
cagacaacatgtgctggtggtcaat

SEQ ID NO: 230394 - DNA, 25 bp, SARS Virus
agacaacatgttgtggtggtcaatg

SEQ ID NO: 230395 - DNA, 25 bp, SARS Virus
gacaacatgttcgggtggtcaatgt

SEQ ID NO: 230396 - DNA, 25 bp, SARS Virus
acaacatgttctggtggtcaatgta

SEQ ID NO: 230397 - DNA, 25 bp, SARS Virus
caacatgttctggtggtcaatgtat

SEQ ID NO: 230398 - DNA, 25 bp, SARS Virus
aacatgttctgggggtcaatgtata

SEQ ID NO: 230399 - DNA, 25 bp, SARS Virus
acatgttctggtggtcaatgtatac

SEQ ID NO: 230400 - DNA, 25 bp, SARS Virus
catgttctggtggtcaatgtatacg

SEQ ID NO: 230401 - DNA, 25 bp, SARS Virus
atgttctggtgggcaatgtatacgg

SEQ ID NO: 230402 - DNA, 25 bp, SARS Virus
tgttctggtggtgaatgtatacggt

SEQ ID NO: 230403 - DNA, 25 bp, SARS Virus
gttctggtggtcgatgtatacggta

SEQ ID NO: 230404 - DNA, 25 bp, SARS Virus
ttctggtggtcagtgtatacggtat

SEQ ID NO: 230405 - DNA, 25 bp, SARS Virus
tctggtggtcaaggtatacggtatt

SEQ ID NO: 230406 - DNA, 25 bp, SARS Virus
ctggtggtcaatgtatacggtatta

SEQ ID NO: 230407 - DNA, 25 bp, SARS Virus
tggtggtcaatggatacggtattat

SEQ ID NO: 230408 - DNA, 25 bp, SARS Virus
ggtggtcaatgtgtacggtattatt

SEQ ID NO: 230409 - DNA, 25 bp, SARS Virus
gtggtcaatgtagacggtattatta

SEQ ID NO: 230410 - DNA, 25 bp, SARS Virus
tggtcaatgtatgcggtattattac

SEQ ID NO: 230411 - DNA, 25 bp, SARS Virus
ggtcaatgtatagggtattattact

SEQ ID NO: 230412 - DNA, 25 bp, SARS Virus
gtcaatgtatacggtattattactg

SEQ ID NO: 230413 - DNA, 25 bp, SARS Virus
tcaatgtatacggtattattactgt

SEQ ID NO: 230414 - DNA, 25 bp, SARS Virus
caatgtatacgggattattactgtg

SEQ ID NO: 230415 - DNA, 25 bp, SARS Virus
aatgtatacggtgttattactgtga

SEQ ID NO: 230416 - DNA, 25 bp, SARS Virus
atgtatacggtagtattactgtgac

SEQ ID NO: 230417 - DNA, 25 bp, SARS Virus
tgtatacggtatgattactgtgaca

SEQ ID NO: 230418 - DNA, 25 bp, SARS Virus
gtatacggtattgttactgtgacaa

SEQ ID NO: 230419 - DNA, 25 bp, SARS Virus
tatacggtattagtactgtgacaac

SEQ ID NO: 230420 - DNA, 25 bp, SARS Virus
atacggtattatgactgtgacaacc

SEQ ID NO: 230421 - DNA, 25 bp, SARS Virus
tacggtattattgctgtgacaacca

SEQ ID NO: 230422 - DNA, 25 bp, SARS Virus
acggtattattagtgtgacaaccac

SEQ ID NO: 230423 - DNA, 25 bp, SARS Virus
cggtattattacggtgacaaccact

SEQ ID NO: 230424 - DNA, 25 bp, SARS Virus
ggtattattactgtgacaaccactc

SEQ ID NO: 230425 - DNA, 25 bp, SARS Virus
gtattattactgggacaaccactcg

SEQ ID NO: 230426 - DNA, 25 bp, SARS Virus
tattattactgtgacaaccactcgt

SEQ ID NO: 230427 - DNA, 25 bp, SARS Virus
attattactgtggcaaccactcgtc

SEQ ID NO: 230428 - DNA, 25 bp, SARS Virus
ttattactgtgagaaccactcgtcc

SEQ ID NO: 230429 - DNA, 25 bp, SARS Virus
tattactgtgacgaccactcgtcca

SEQ ID NO: 230430 - DNA, 25 bp, SARS Virus
attactgtgacagccactcgtccag

SEQ ID NO: 230431 - DNA, 25 bp, SARS Virus
ttactgtgacaagcactcgtccaga

SEQ ID NO: 230432 - DNA, 25 bp, SARS Virus
tactgtgacaacgactcgtccagac

SEQ ID NO: 230433 - DNA, 25 bp, SARS Virus
actgtgacaaccgctcgtccagact

SEQ ID NO: 230434 - DNA, 25 bp, SARS Virus
ctgtgacaaccagtcgtccagactt

SEQ ID NO: 230435 - DNA, 25 bp, SARS Virus
tgtgacaaccacgcgtccagacttc

SEQ ID NO: 230436 - DNA, 25 bp, SARS Virus
gtgacaaccactggtccagacttca

SEQ ID NO: 230437 - DNA, 25 bp, SARS Virus
tgacaaccactcgtccagacttcat

SEQ ID NO: 230438 - DNA, 25 bp, SARS Virus
gacaaccactcggccagacttcata

SEQ ID NO: 230439 - DNA, 25 bp, SARS Virus
acaaccactcgtgcagacttcatat

SEQ ID NO: 230440 - DNA, 25 bp, SARS Virus
caaccactcgtcgagacttcatatt

SEQ ID NO: 230441 - DNA, 25 bp, SARS Virus
aaccactcgtccggacttcatattt

SEQ ID NO: 230442 - DNA, 25 bp, SARS Virus
accactcgtccagacttcatatttg

SEQ ID NO: 230443 - DNA, 25 bp, SARS Virus
ccactcgtccaggcttcatatttgg

SEQ ID NO: 230444 - DNA, 25 bp, SARS Virus
cactcgtccagagttcatatttggt

SEQ ID NO: 230445 - DNA, 25 bp, SARS Virus
actcgtccagacgtcatatttggta

SEQ ID NO: 230446 - DNA, 25 bp, SARS Virus
ctcgtccagactgcatatttggtac

SEQ ID NO: 230447 - DNA, 25 bp, SARS Virus
tcgtccagacttgatatttggtacc

SEQ ID NO: 230448 - DNA, 25 bp, SARS Virus
cgtccagacttcgtatttggtaccg

SEQ ID NO: 230449 - DNA, 25 bp, SARS Virus
gtccagacttcagatttggtaccgc

SEQ ID NO: 230450 - DNA, 25 bp, SARS Virus
tccagacttcatgtttggtaccgca

SEQ ID NO: 230451 - DNA, 25 bp, SARS Virus
ccagacttcatagttggtaccgcag

SEQ ID NO: 230452 - DNA, 25 bp, SARS Virus
cagacttcatatgtggtaccgcagc

SEQ ID NO: 230453 - DNA, 25 bp, SARS Virus
agacttcatattgggtaccgcagct

SEQ ID NO: 230454 - DNA, 25 bp, SARS Virus
gacttcatatttggtaccgcagctg

SEQ ID NO: 230455 - DNA, 25 bp, SARS Virus
acttcatatttggtaccgcagctgt

SEQ ID NO: 230456 - DNA, 25 bp, SARS Virus
cttcatatttgggaccgcagctgtt

SEQ ID NO: 230457 - DNA, 25 bp, SARS Virus
ttcatatttggtgccgcagctgttc

SEQ ID NO: 230458 - DNA, 25 bp, SARS Virus
tcatatttggtagcgcagctgttct

SEQ ID NO: 230459 - DNA, 25 bp, SARS Virus
catatttggtacggcagctgttctg

SEQ ID NO: 230460 - DNA, 25 bp, SARS Virus
atatttggtaccgcagctgttctgc

SEQ ID NO: 230461 - DNA, 25 bp, SARS Virus
tatttggtaccggagctgttctgca

SEQ ID NO: 230462 - DNA, 25 bp, SARS Virus
atttggtaccgcggctgttctgcat

SEQ ID NO: 230463 - DNA, 25 bp, SARS Virus
tttggtaccgcagctgttctgcatt

SEQ ID NO: 230464 - DNA, 25 bp, SARS Virus
ttggtaccgcaggtgttctgcatta

SEQ ID NO: 230465 - DNA, 25 bp, SARS Virus
tggtaccgcagcggttctgcattac

SEQ ID NO: 230466 - DNA, 25 bp, SARS Virus
ggtaccgcagctgttctgcattact

SEQ ID NO: 230467 - DNA, 25 bp, SARS Virus
gtaccgcagctggtctgcattactg

SEQ ID NO: 230468 - DNA, 25 bp, SARS Virus
taccgcagctgtgctgcattactga

SEQ ID NO: 230469 - DNA, 25 bp, SARS Virus
accgcagctgttgtgcattactgac

SEQ ID NO: 230470 - DNA, 25 bp, SARS Virus
ccgcagctgttcggcattactgaca

SEQ ID NO: 230471 - DNA, 25 bp, SARS Virus
cgcagctgttctgcattactgacaa

SEQ ID NO: 230472 - DNA, 25 bp, SARS Virus
gcagctgttctggattactgacaag

SEQ ID NO: 230473 - DNA, 25 bp, SARS Virus
cagctgttctgcgttactgacaagt

SEQ ID NO: 230474 - DNA, 25 bp, SARS Virus
agctgttctgcagtactgacaagtc

SEQ ID NO: 230475 - DNA, 25 bp, SARS Virus
gctgttctgcatgactgacaagtct

SEQ ID NO: 230476 - DNA, 25 bp, SARS Virus
ctgttctgcattgctgacaagtctt

SEQ ID NO: 230477 - DNA, 25 bp, SARS Virus
tgttctgcattagtgacaagtcttt

SEQ ID NO: 230478 - DNA, 25 bp, SARS Virus
gttctgcattacggacaagtcttta

SEQ ID NO: 230479 - DNA, 25 bp, SARS Virus
ttctgcattactgacaagtctttat

SEQ ID NO: 230480 - DNA, 25 bp, SARS Virus
tctgcattactggcaagtctttatg

SEQ ID NO: 230481 - DNA, 25 bp, SARS Virus
ctgcattactgagaagtctttatgg

SEQ ID NO: 230482 - DNA, 25 bp, SARS Virus
tgcattactgacgagtctttatggt

SEQ ID NO: 230483 - DNA, 25 bp, SARS Virus
gcattactgacaggtctttatggta

SEQ ID NO: 230484 - DNA, 25 bp, SARS Virus
cattactgacaagtctttatggtag

SEQ ID NO: 230485 - DNA, 25 bp, SARS Virus
attactgacaaggctttatggtagt

SEQ ID NO: 230486 - DNA, 25 bp, SARS Virus
ttactgacaagtgtttatggtagtt

SEQ ID NO: 230487 - DNA, 25 bp, SARS Virus
tactgacaagtcgttatggtagttc

SEQ ID NO: 230488 - DNA, 25 bp, SARS Virus
actgacaagtctgtatggtagttca

SEQ ID NO: 230489 - DNA, 25 bp, SARS Virus
ctgacaagtcttgatggtagttcat

SEQ ID NO: 230490 - DNA, 25 bp, SARS Virus
tgacaagtctttgtggtagttcata

SEQ ID NO: 230491 - DNA, 25 bp, SARS Virus
gacaagtctttagggtagttcatac

SEQ ID NO: 230492 - DNA, 25 bp, SARS Virus
acaagtctttatggtagttcatacc

SEQ ID NO: 230493 - DNA, 25 bp, SARS Virus
caagtctttatggtagttcatacca

SEQ ID NO: 230494 - DNA, 25 bp, SARS Virus
aagtctttatgggagttcataccac

SEQ ID NO: 230495 - DNA, 25 bp, SARS Virus
agtctttatggtggttcataccact

SEQ ID NO: 230496 - DNA, 25 bp, SARS Virus
gtctttatggtagttcataccactg

SEQ ID NO: 230497 - DNA, 25 bp, SARS Virus
tctttatggtaggtcataccactgt

SEQ ID NO: 230498 - DNA, 25 bp, SARS Virus
ctttatggtagtgcataccactgtc

SEQ ID NO: 230499 - DNA, 25 bp, SARS Virus
tttatggtagttgataccactgtcg

SEQ ID NO: 230500 - DNA, 25 bp, SARS Virus
ttatggtagttcgtaccactgtcga

SEQ ID NO: 230501 - DNA, 25 bp, SARS Virus
tatggtagttcagaccactgtcgac

SEQ ID NO: 230502 - DNA, 25 bp, SARS Virus
atggtagttcatgccactgtcgacg

SEQ ID NO: 230503 - DNA, 25 bp, SARS Virus
tggtagttcatagcactgtcgacga

SEQ ID NO: 230504 - DNA, 25 bp, SARS Virus
ggtagttcatacgactgtcgacgag

SEQ ID NO: 230505 - DNA, 25 bp, SARS Virus
gtagttcataccgctgtcgacgaga

SEQ ID NO: 230506 - DNA, 25 bp, SARS Virus
tagttcataccagtgtcgacgagaa

SEQ ID NO: 230507 - DNA, 25 bp, SARS Virus
agttcataccacggtcgacgagaaa

SEQ ID NO: 230508 - DNA, 25 bp, SARS Virus
gttcataccactgtcgacgagaaac

SEQ ID NO: 230509 - DNA, 25 bp, SARS Virus
ttcataccactggcgacgagaaacg

SEQ ID NO: 230510 - DNA, 25 bp, SARS Virus
tcataccactgtggacgagaaacgt

SEQ ID NO: 230511 - DNA, 25 bp, SARS Virus
cataccactgtcgacgagaaacgtt

SEQ ID NO: 230512 - DNA, 25 bp, SARS Virus
ataccactgtcggcgagaaacgttt

SEQ ID NO: 230513 - DNA, 25 bp, SARS Virus
taccactgtcgaggagaaacgttta

SEQ ID NO: 230514 - DNA, 25 bp, SARS Virus
accactgtcgacgagaaacgtttag

SEQ ID NO: 230515 - DNA, 25 bp, SARS Virus
ccactgtcgacgggaaacgtttagt

SEQ ID NO: 230516 - DNA, 25 bp, SARS Virus
cactgtcgacgagaaacgtttagtc

SEQ ID NO: 230517 - DNA, 25 bp, SARS Virus
actgtcgacgaggaacgtttagtcc

SEQ ID NO: 230518 - DNA, 25 bp, SARS Virus
ctgtcgacgagagacgtttagtcct

SEQ ID NO: 230519 - DNA, 25 bp, SARS Virus
tgtcgacgagaagcgtttagtcctt

SEQ ID NO: 230520 - DNA, 25 bp, SARS Virus
gtcgacgagaaaggtttagtcctta

SEQ ID NO: 230521 - DNA, 25 bp, SARS Virus
tcgacgagaaacgtttagtccttaa

SEQ ID NO: 230522 - DNA, 25 bp, SARS Virus
cgacgagaaacggttagtccttaac

SEQ ID NO: 230523 - DNA, 25 bp, SARS Virus
gacgagaaacgtgtagtccttaact

SEQ ID NO: 230524 - DNA, 25 bp, SARS Virus
acgagaaacgttgagtccttaactc

SEQ ID NO: 230525 - DNA, 25 bp, SARS Virus
cgagaaacgtttggtccttaactca

SEQ ID NO: 230526 - DNA, 25 bp, SARS Virus
gagaaacgtttagtccttaactcac

SEQ ID NO: 230527 - DNA, 25 bp, SARS Virus
agaaacgtttaggccttaactcacc

SEQ ID NO: 230528 - DNA, 25 bp, SARS Virus
gaaacgtttagtgcttaactcacca

SEQ ID NO: 230529 - DNA, 25 bp, SARS Virus
aaacgtttagtcgttaactcaccaa

SEQ ID NO: 230530 - DNA, 25 bp, SARS Virus
aacgtttagtccgtaactcaccaaa

SEQ ID NO: 230531 - DNA, 25 bp, SARS Virus
acgtttagtcctgaactcaccaaac

SEQ ID NO: 230532 - DNA, 25 bp, SARS Virus
cgtttagtccttgactcaccaaacg

SEQ ID NO: 230533 - DNA, 25 bp, SARS Virus
gtttagtccttagctcaccaaacga

SEQ ID NO: 230534 - DNA, 25 bp, SARS Virus
tttagtccttaagtcaccaaacgac

SEQ ID NO: 230535 - DNA, 25 bp, SARS Virus
ttagtccttaacgcaccaaacgacg

SEQ ID NO: 230536 - DNA, 25 bp, SARS Virus
tagtccttaactgaccaaacgacgt

SEQ ID NO: 230537 - DNA, 25 bp, SARS Virus
agtccttaactcgccaaacgacgta

SEQ ID NO: 230538 - DNA, 25 bp, SARS Virus
gtccttaactcagcaaacgacgtag

SEQ ID NO: 230539 - DNA, 25 bp, SARS Virus
tccttaactcacgaaacgacgtagt

SEQ ID NO: 230540 - DNA, 25 bp, SARS Virus
ccttaactcaccgaacgacgtagtt

SEQ ID NO: 230541 - DNA, 25 bp, SARS Virus
cttaactcaccagacgacgtagttc

SEQ ID NO: 230542 - DNA, 25 bp, SARS Virus
ttaactcaccaagcgacgtagttca

SEQ ID NO: 230543 - DNA, 25 bp, SARS Virus
taactcaccaaaggacgtagttcac

SEQ ID NO: 230544 - DNA, 25 bp, SARS Virus
aactcaccaaacgacgtagttcaca

SEQ ID NO: 230545 - DNA, 25 bp, SARS Virus
actcaccaaacggcgtagttcacac

SEQ ID NO: 230546 - DNA, 25 bp, SARS Virus
ctcaccaaacgaggtagttcacacg

SEQ ID NO: 230547 - DNA, 25 bp, SARS Virus
tcaccaaacgacgtagttcacacgc

SEQ ID NO: 230548 - DNA, 25 bp, SARS Virus
caccaaacgacggagttcacacgcg

SEQ ID NO: 230549 - DNA, 25 bp, SARS Virus
accaaacgacgtggttcacacgcgc

SEQ ID NO: 230550 - DNA, 25 bp, SARS Virus
ccaaacgacgtagttcacacgcgcg

SEQ ID NO: 230551 - DNA, 25 bp, SARS Virus
caaacgacgtaggtcacacgcgcgt

SEQ ID NO: 230552 - DNA, 25 bp, SARS Virus
aaacgacgtagtgcacacgcgcgtt

SEQ ID NO: 230553 - DNA, 25 bp, SARS Virus
aacgacgtagttgacacgcgcgttt

SEQ ID NO: 230554 - DNA, 25 bp, SARS Virus
acgacgtagttcgcacgcgcgtttt

SEQ ID NO: 230555 - DNA, 25 bp, SARS Virus
cgacgtagttcagacgcgcgttttt

SEQ ID NO: 230556 - DNA, 25 bp, SARS Virus
gacgtagttcacgcgcgcgttttta

SEQ ID NO: 230557 - DNA, 25 bp, SARS Virus
acgtagttcacaggcgcgtttttaa

SEQ ID NO: 230558 - DNA, 25 bp, SARS Virus
cgtagttcacacgcgcgtttttaac

SEQ ID NO: 230559 - DNA, 25 bp, SARS Virus
gtagttcacacgggcgtttttaact

SEQ ID NO: 230560 - DNA, 25 bp, SARS Virus
tagttcacacgcgcgtttttaacta

SEQ ID NO: 230561 - DNA, 25 bp, SARS Virus
agttcacacgcgggtttttaactag

SEQ ID NO: 230562 - DNA, 25 bp, SARS Virus
gttcacacgcgcgtttttaactaga

SEQ ID NO: 230563 - DNA, 25 bp, SARS Virus
ttcacacgcgcggttttaactagac

SEQ ID NO: 230564 - DNA, 25 bp, SARS Virus
tcacacgcgcgtgtttaactagact

SEQ ID NO: 230565 - DNA, 25 bp, SARS Virus
cacacgcgcgttgttaactagacta

SEQ ID NO: 230566 - DNA, 25 bp, SARS Virus
acacgcgcgtttgtaactagactat

SEQ ID NO: 230567 - DNA, 25 bp, SARS Virus
cacgcgcgttttgaactagactatt

SEQ ID NO: 230568 - DNA, 25 bp, SARS Virus
acgcgcgtttttgactagactattg

SEQ ID NO: 230569 - DNA, 25 bp, SARS Virus
cgcgcgtttttagctagactattgt

SEQ ID NO: 230570 - DNA, 25 bp, SARS Virus
gcgcgtttttaagtagactattgtg

SEQ ID NO: 230571 - DNA, 25 bp, SARS Virus
cgcgtttttaacgagactattgtgg

SEQ ID NO: 230572 - DNA, 25 bp, SARS Virus
gcgtttttaactggactattgtggt

SEQ ID NO: 230573 - DNA, 25 bp, SARS Virus
cgtttttaactagactattgtggtc

SEQ ID NO: 230574 - DNA, 25 bp, SARS Virus
gtttttaactaggctattgtggtcg

SEQ ID NO: 230575 - DNA, 25 bp, SARS Virus
tttttaactagagtattgtggtcgt

SEQ ID NO: 230576 - DNA, 25 bp, SARS Virus
ttttaactagacgattgtggtcgtc

SEQ ID NO: 230577 - DNA, 25 bp, SARS Virus
tttaactagactgttgtggtcgtcg

SEQ ID NO: 230578 - DNA, 25 bp, SARS Virus
ttaactagactagtgtggtcgtcgg

SEQ ID NO: 230579 - DNA, 25 bp, SARS Virus
taactagactatggtggtcgtcgga

SEQ ID NO: 230580 - DNA, 25 bp, SARS Virus
aactagactattgtggtcgtcggac

SEQ ID NO: 230581 - DNA, 25 bp, SARS Virus
actagactattggggtcgtcggaca

SEQ ID NO: 230582 - DNA, 25 bp, SARS Virus
ctagactattgtggtcgtcggacac

SEQ ID NO: 230583 - DNA, 25 bp, SARS Virus
tagactattgtggtcgtcggacact

SEQ ID NO: 230584 - DNA, 25 bp, SARS Virus
agactattgtgggcgtcggacactc

SEQ ID NO: 230585 - DNA, 25 bp, SARS Virus
gactattgtggtggtcggacactcc

SEQ ID NO: 230586 - DNA, 25 bp, SARS Virus
actattgtggtcgtcggacactccc

SEQ ID NO: 230587 - DNA, 25 bp, SARS Virus
ctattgtggtcggcggacactccct

SEQ ID NO: 230588 - DNA, 25 bp, SARS Virus
tattgtggtcgtgggacactccctt

SEQ ID NO: 230589 - DNA, 25 bp, SARS Virus
attgtggtcgtcggacactcccttt

SEQ ID NO: 230590 - DNA, 25 bp, SARS Virus
ttgtggtcgtcggacactccctttt

SEQ ID NO: 230591 - DNA, 25 bp, SARS Virus
tgtggtcgtcgggcactcccttttg

SEQ ID NO: 230592 - DNA, 25 bp, SARS Virus
gtggtcgtcggagactcccttttgg

SEQ ID NO: 230593 - DNA, 25 bp, SARS Virus
tggtcgtcggacgctcccttttggt

SEQ ID NO: 230594 - DNA, 25 bp, SARS Virus
ggtcgtcggacagtcccttttggtg

SEQ ID NO: 230595 - DNA, 25 bp, SARS Virus
gtcgtcggacacgcccttttggtgt

SEQ ID NO: 230596 - DNA, 25 bp, SARS Virus
tcgtcggacactgccttttggtgtg

SEQ ID NO: 230597 - DNA, 25 bp, SARS Virus
cgtcggacactcgcttttggtgtgt

SEQ ID NO: 230598 - DNA, 25 bp, SARS Virus
gtcggacactccgttttggtgtgtc

SEQ ID NO: 230599 - DNA, 25 bp, SARS Virus
tcggacactcccgtttggtgtgtca

SEQ ID NO: 230600 - DNA, 25 bp, SARS Virus
cggacactccctgttggtgtgtcac

SEQ ID NO: 230601 - DNA, 25 bp, SARS Virus
ggacactcccttgtggtgtgtcacc

SEQ ID NO: 230602 - DNA, 25 bp, SARS Virus
gacactccctttgggtgtgtcacca

SEQ ID NO: 230603 - DNA, 25 bp, SARS Virus
acactcccttttggtgtgtcaccac

SEQ ID NO: 230604 - DNA, 25 bp, SARS Virus
cactcccttttggtgtgtcaccaca

SEQ ID NO: 230605 - DNA, 25 bp, SARS Virus
actcccttttggggtgtcaccacaa

SEQ ID NO: 230606 - DNA, 25 bp, SARS Virus
ctcccttttggtgtgtcaccacaat

SEQ ID NO: 230607 - DNA, 25 bp, SARS Virus
tcccttttggtgggtcaccacaatt

SEQ ID NO: 230608 - DNA, 25 bp, SARS Virus
cccttttggtgtgtcaccacaattt

SEQ ID NO: 230609 - DNA, 25 bp, SARS Virus
ccttttggtgtggcaccacaatttt

SEQ ID NO: 230610 - DNA, 25 bp, SARS Virus
cttttggtgtgtgaccacaattttg

SEQ ID NO: 230611 - DNA, 25 bp, SARS Virus
ttttggtgtgtcgccacaattttga

SEQ ID NO: 230612 - DNA, 25 bp, SARS Virus
tttggtgtgtcagcacaattttgac

SEQ ID NO: 230613 - DNA, 25 bp, SARS Virus
ttggtgtgtcacgacaattttgact

SEQ ID NO: 230614 - DNA, 25 bp, SARS Virus
tggtgtgtcaccgcaattttgacta

SEQ ID NO: 230615 - DNA, 25 bp, SARS Virus
ggtgtgtcaccagaattttgactag

SEQ ID NO: 230616 - DNA, 25 bp, SARS Virus
gtgtgtcaccacgattttgactaga

SEQ ID NO: 230617 - DNA, 25 bp, SARS Virus
tgtgtcaccacagttttgactagag

SEQ ID NO: 230618 - DNA, 25 bp, SARS Virus
gtgtcaccacaagtttgactagaga

SEQ ID NO: 230619 - DNA, 25 bp, SARS Virus
tgtcaccacaatgttgactagagac

SEQ ID NO: 230620 - DNA, 25 bp, SARS Virus
gtcaccacaattgtgactagagaca

SEQ ID NO: 230621 - DNA, 25 bp, SARS Virus
tcaccacaatttggactagagacaa

SEQ ID NO: 230622 - DNA, 25 bp, SARS Virus
caccacaattttgactagagacaac

SEQ ID NO: 230623 - DNA, 25 bp, SARS Virus
accacaattttggctagagacaaca

SEQ ID NO: 230624 - DNA, 25 bp, SARS Virus
ccacaattttgagtagagacaacag

SEQ ID NO: 230625 - DNA, 25 bp, SARS Virus
cacaattttgacgagagacaacagg

SEQ ID NO: 230626 - DNA, 25 bp, SARS Virus
acaattttgactggagacaacaggt

SEQ ID NO: 230627 - DNA, 25 bp, SARS Virus
caattttgactagagacaacaggtt

SEQ ID NO: 230628 - DNA, 25 bp, SARS Virus
aattttgactagggacaacaggtta

SEQ ID NO: 230629 - DNA, 25 bp, SARS Virus
attttgactagagacaacaggttac

SEQ ID NO: 230630 - DNA, 25 bp, SARS Virus
ttttgactagaggcaacaggttaca

SEQ ID NO: 230631 - DNA, 25 bp, SARS Virus
tttgactagagagaacaggttacaa

SEQ ID NO: 230632 - DNA, 25 bp, SARS Virus
ttgactagagacgacaggttacaag

SEQ ID NO: 230633 - DNA, 25 bp, SARS Virus
tgactagagacagcaggttacaagg

SEQ ID NO: 230634 - DNA, 25 bp, SARS Virus
gactagagacaagaggttacaaggt

SEQ ID NO: 230635 - DNA, 25 bp, SARS Virus
actagagacaacgggttacaaggtt

SEQ ID NO: 230636 - DNA, 25 bp, SARS Virus
ctagagacaacaggttacaaggttc

SEQ ID NO: 230637 - DNA, 25 bp, SARS Virus
tagagacaacaggttacaaggttcg

SEQ ID NO: 230638 - DNA, 25 bp, SARS Virus
agagacaacagggtacaaggttcgt

SEQ ID NO: 230639 - DNA, 25 bp, SARS Virus
gagacaacaggtgacaaggttcgtg

SEQ ID NO: 230640 - DNA, 25 bp, SARS Virus
agacaacaggttgcaaggttcgtgg

SEQ ID NO: 230641 - DNA, 25 bp, SARS Virus
gacaacaggttagaaggttcgtgga

SEQ ID NO: 230642 - DNA, 25 bp, SARS Virus
acaacaggttacgaggttcgtggaa

SEQ ID NO: 230643 - DNA, 25 bp, SARS Virus
caacaggttacagggttcgtggaaa

SEQ ID NO: 230644 - DNA, 25 bp, SARS Virus
aacaggttacaaggttcgtggaaaa

SEQ ID NO: 230645 - DNA, 25 bp, SARS Virus
acaggttacaaggttcgtggaaaat

SEQ ID NO: 230646 - DNA, 25 bp, SARS Virus
caggttacaagggtcgtggaaaatg

SEQ ID NO: 230647 - DNA, 25 bp, SARS Virus
aggttacaaggtgcgtggaaaatgc

SEQ ID NO: 230648 - DNA, 25 bp, SARS Virus
ggttacaaggttggtggaaaatgcc

SEQ ID NO: 230649 - DNA, 25 bp, SARS Virus
gttacaaggttcgtggaaaatgccc

SEQ ID NO: 230650 - DNA, 25 bp, SARS Virus
ttacaaggttcggggaaaatgcccg

SEQ ID NO: 230651 - DNA, 25 bp, SARS Virus
tacaaggttcgtggaaaatgcccga

SEQ ID NO: 230652 - DNA, 25 bp, SARS Virus
acaaggttcgtggaaaatgcccgaa

SEQ ID NO: 230653 - DNA, 25 bp, SARS Virus
caaggttcgtgggaaatgcccgaaa

SEQ ID NO: 230654 - DNA, 25 bp, SARS Virus
aaggttcgtggagaatgcccgaaag

SEQ ID NO: 230655 - DNA, 25 bp, SARS Virus
aggttcgtggaagatgcccgaaagg

SEQ ID NO: 230656 - DNA, 25 bp, SARS Virus
ggttcgtggaaagtgcccgaaaggg

SEQ ID NO: 230657 - DNA, 25 bp, SARS Virus
gttcgtggaaaaggcccgaaaggga

SEQ ID NO: 230658 - DNA, 25 bp, SARS Virus
ttcgtggaaaatgcccgaaagggaa

SEQ ID NO: 230659 - DNA, 25 bp, SARS Virus
tcgtggaaaatggccgaaagggaac

SEQ ID NO: 230660 - DNA, 25 bp, SARS Virus
cgtggaaaatgcgcgaaagggaacc

SEQ ID NO: 230661 - DNA, 25 bp, SARS Virus
gtggaaaatgccggaaagggaacca

SEQ ID NO: 230662 - DNA, 25 bp, SARS Virus
tggaaaatgcccgaaagggaaccat

SEQ ID NO: 230663 - DNA, 25 bp, SARS Virus
ggaaaatgcccggaagggaaccatt

SEQ ID NO: 230664 - DNA, 25 bp, SARS Virus
gaaaatgcccgagagggaaccattg

SEQ ID NO: 230665 - DNA, 25 bp, SARS Virus
aaaatgcccgaaggggaaccattga

SEQ ID NO: 230666 - DNA, 25 bp, SARS Virus
aaatgcccgaaagggaaccattgaa

SEQ ID NO: 230667 - DNA, 25 bp, SARS Virus
aatgcccgaaagggaaccattgaaa

SEQ ID NO: 230668 - DNA, 25 bp, SARS Virus
atgcccgaaagggaaccattgaaat

SEQ ID NO: 230669 - DNA, 25 bp, SARS Virus
tgcccgaaaggggaccattgaaata

SEQ ID NO: 230670 - DNA, 25 bp, SARS Virus
gcccgaaagggagccattgaaatat

SEQ ID NO: 230671 - DNA, 25 bp, SARS Virus
cccgaaagggaagcattgaaatatc

SEQ ID NO: 230672 - DNA, 25 bp, SARS Virus
ccgaaagggaacgattgaaatatca

SEQ ID NO: 230673 - DNA, 25 bp, SARS Virus
cgaaagggaaccgttgaaatatcaa

SEQ ID NO: 230674 - DNA, 25 bp, SARS Virus
gaaagggaaccagtgaaatatcaat

SEQ ID NO: 230675 - DNA, 25 bp, SARS Virus
aaagggaaccatggaaatatcaatg

SEQ ID NO: 230676 - DNA, 25 bp, SARS Virus
aagggaaccattgaaatatcaatgg

SEQ ID NO: 230677 - DNA, 25 bp, SARS Virus
agggaaccattggaatatcaatggc

SEQ ID NO: 230678 - DNA, 25 bp, SARS Virus
gggaaccattgagatatcaatggcg

SEQ ID NO: 230679 - DNA, 25 bp, SARS Virus
ggaaccattgaagtatcaatggcgt

SEQ ID NO: 230680 - DNA, 25 bp, SARS Virus
gaaccattgaaagatcaatggcgtc

SEQ ID NO: 230681 - DNA, 25 bp, SARS Virus
aaccattgaaatgtcaatggcgtcc

SEQ ID NO: 230682 - DNA, 25 bp, SARS Virus
accattgaaatagcaatggcgtcct

SEQ ID NO: 230683 - DNA, 25 bp, SARS Virus
ccattgaaatatgaatggcgtcctg

SEQ ID NO: 230684 - DNA, 25 bp, SARS Virus
cattgaaatatcgatggcgtcctga

SEQ ID NO: 230685 - DNA, 25 bp, SARS Virus
attgaaatatcagtggcgtcctgag

SEQ ID NO: 230686 - DNA, 25 bp, SARS Virus
ttgaaatatcaagggcgtcctgagt

SEQ ID NO: 230687 - DNA, 25 bp, SARS Virus
tgaaatatcaatggcgtcctgagtt

SEQ ID NO: 230688 - DNA, 25 bp, SARS Virus
gaaatatcaatggcgtcctgagttg

SEQ ID NO: 230689 - DNA, 25 bp, SARS Virus
aaatatcaatggggtcctgagttgt

SEQ ID NO: 230690 - DNA, 25 bp, SARS Virus
aatatcaatggcgtcctgagttgtt

SEQ ID NO: 230691 - DNA, 25 bp, SARS Virus
atatcaatggcggcctgagttgtta

SEQ ID NO: 230692 - DNA, 25 bp, SARS Virus
tatcaatggcgtgctgagttgttac

SEQ ID NO: 230693 - DNA, 25 bp, SARS Virus
atcaatggcgtcgtgagttgttacc

SEQ ID NO: 230694 - DNA, 25 bp, SARS Virus
tcaatggcgtccggagttgttacca

SEQ ID NO: 230695 - DNA, 25 bp, SARS Virus
caatggcgtcctgagttgttaccaa

SEQ ID NO: 230696 - DNA, 25 bp, SARS Virus
aatggcgtcctgggttgttaccaaa

SEQ ID NO: 230697 - DNA, 25 bp, SARS Virus
atggcgtcctgagttgttaccaaaa

SEQ ID NO: 230698 - DNA, 25 bp, SARS Virus
tggcgtcctgaggtgttaccaaaac

SEQ ID NO: 230699 - DNA, 25 bp, SARS Virus
ggcgtcctgagtggttaccaaaact

SEQ ID NO: 230700 - DNA, 25 bp, SARS Virus
gcgtcctgagttgttaccaaaactt

SEQ ID NO: 230701 - DNA, 25 bp, SARS Virus
cgtcctgagttggtaccaaaacttt

SEQ ID NO: 230702 - DNA, 25 bp, SARS Virus
gtcctgagttgtgaccaaaactttc

SEQ ID NO: 230703 - DNA, 25 bp, SARS Virus
tcctgagttgttgccaaaactttct

SEQ ID NO: 230704 - DNA, 25 bp, SARS Virus
cctgagttgttagcaaaactttctg

SEQ ID NO: 230705 - DNA, 25 bp, SARS Virus
ctgagttgttacgaaaactttctga

SEQ ID NO: 230706 - DNA, 25 bp, SARS Virus
tgagttgttaccgaaactttctgaa

SEQ ID NO: 230707 - DNA, 25 bp, SARS Virus
gagttgttaccagaactttctgaac

SEQ ID NO: 230708 - DNA, 25 bp, SARS Virus
agttgttaccaagactttctgaaca

SEQ ID NO: 230709 - DNA, 25 bp, SARS Virus
gttgttaccaaagctttctgaacat

SEQ ID NO: 230710 - DNA, 25 bp, SARS Virus
ttgttaccaaaagtttctgaacatt

SEQ ID NO: 230711 - DNA, 25 bp, SARS Virus
tgttaccaaaacgttctgaacatta

SEQ ID NO: 230712 - DNA, 25 bp, SARS Virus
gttaccaaaactgtctgaacattag

SEQ ID NO: 230713 - DNA, 25 bp, SARS Virus
ttaccaaaacttgctgaacattagt

SEQ ID NO: 230714 - DNA, 25 bp, SARS Virus
taccaaaactttgtgaacattagtt

SEQ ID NO: 230715 - DNA, 25 bp, SARS Virus
accaaaactttcggaacattagttc

SEQ ID NO: 230716 - DNA, 25 bp, SARS Virus
ccaaaactttctgaacattagttct

SEQ ID NO: 230717 - DNA, 25 bp, SARS Virus
caaaactttctggacattagttctg

SEQ ID NO: 230718 - DNA, 25 bp, SARS Virus
aaaactttctgagcattagttctga

SEQ ID NO: 230719 - DNA, 25 bp, SARS Virus
aaactttctgaagattagttctgag

SEQ ID NO: 230720 - DNA, 25 bp, SARS Virus
aactttctgaacgttagttctgaga

SEQ ID NO: 230721 - DNA, 25 bp, SARS Virus
actttctgaacagtagttctgagaa

SEQ ID NO: 230722 - DNA, 25 bp, SARS Virus
ctttctgaacatgagttctgagaaa

SEQ ID NO: 230723 - DNA, 25 bp, SARS Virus
tttctgaacattggttctgagaaat

SEQ ID NO: 230724 - DNA, 25 bp, SARS Virus
ttctgaacattagttctgagaaata

SEQ ID NO: 230725 - DNA, 25 bp, SARS Virus
tctgaacattaggtctgagaaatat

SEQ ID NO: 230726 - DNA, 25 bp, SARS Virus
ctgaacattagtgctgagaaatatc

SEQ ID NO: 230727 - DNA, 25 bp, SARS Virus
tgaacattagttgtgagaaatatca

SEQ ID NO: 230728 - DNA, 25 bp, SARS Virus
gaacattagttcggagaaatatcac

SEQ ID NO: 230729 - DNA, 25 bp, SARS Virus
aacattagttctgagaaatatcaca

SEQ ID NO: 230730 - DNA, 25 bp, SARS Virus
acattagttctgggaaatatcacag

SEQ ID NO: 230731 - DNA, 25 bp, SARS Virus
cattagttctgagaaatatcacagt

SEQ ID NO: 230732 - DNA, 25 bp, SARS Virus
attagttctgaggaatatcacagtt

SEQ ID NO: 230733 - DNA, 25 bp, SARS Virus
ttagttctgagagatatcacagtta

SEQ ID NO: 230734 - DNA, 25 bp, SARS Virus
tagttctgagaagtatcacagttat

SEQ ID NO: 230735 - DNA, 25 bp, SARS Virus
agttctgagaaagatcacagttatt

SEQ ID NO: 230736 - DNA, 25 bp, SARS Virus
gttctgagaaatgtcacagttattt

SEQ ID NO: 230737 - DNA, 25 bp, SARS Virus
ttctgagaaatagcacagttatttc

SEQ ID NO: 230738 - DNA, 25 bp, SARS Virus
tctgagaaatatgacagttatttcc

SEQ ID NO: 230739 - DNA, 25 bp, SARS Virus
ctgagaaatatcgcagttatttccg

SEQ ID NO: 230740 - DNA, 25 bp, SARS Virus
tgagaaatatcagagttatttccgt

SEQ ID NO: 230741 - DNA, 25 bp, SARS Virus
gagaaatatcacggttatttccgtg

SEQ ID NO: 230742 - DNA, 25 bp, SARS Virus
agaaatatcacagttatttccgtga

SEQ ID NO: 230743 - DNA, 25 bp, SARS Virus
gaaatatcacaggtatttccgtgaa

SEQ ID NO: 230744 - DNA, 25 bp, SARS Virus
aaatatcacagtgatttccgtgaac

SEQ ID NO: 230745 - DNA, 25 bp, SARS Virus
aatatcacagttgtttccgtgaaca

SEQ ID NO: 230746 - DNA, 25 bp, SARS Virus
atatcacagttagttccgtgaacat

SEQ ID NO: 230747 - DNA, 25 bp, SARS Virus
tatcacagttatgtccgtgaacatc

SEQ ID NO: 230748 - DNA, 25 bp, SARS Virus
atcacagttattgccgtgaacatct

SEQ ID NO: 230749 - DNA, 25 bp, SARS Virus
tcacagttatttgcgtgaacatctt

SEQ ID NO: 230750 - DNA, 25 bp, SARS Virus
cacagttatttcggtgaacatcttc

SEQ ID NO: 230751 - DNA, 25 bp, SARS Virus
acagttatttccgtgaacatcttcg

SEQ ID NO: 230752 - DNA, 25 bp, SARS Virus
cagttatttccgggaacatcttcgt

SEQ ID NO: 230753 - DNA, 25 bp, SARS Virus
agttatttccgtgaacatcttcgtc

SEQ ID NO: 230754 - DNA, 25 bp, SARS Virus
gttatttccgtggacatcttcgtct

SEQ ID NO: 230755 - DNA, 25 bp, SARS Virus
ttatttccgtgagcatcttcgtctc

SEQ ID NO: 230756 - DNA, 25 bp, SARS Virus
tatttccgtgaagatcttcgtctct

SEQ ID NO: 230757 - DNA, 25 bp, SARS Virus
atttccgtgaacgtcttcgtctctt

SEQ ID NO: 230758 - DNA, 25 bp, SARS Virus
tttccgtgaacagcttcgtctcttt

SEQ ID NO: 230759 - DNA, 25 bp, SARS Virus
ttccgtgaacatgttcgtctctttc

SEQ ID NO: 230760 - DNA, 25 bp, SARS Virus
tccgtgaacatcgtcgtctctttct

SEQ ID NO: 230761 - DNA, 25 bp, SARS Virus
ccgtgaacatctgcgtctctttcta

SEQ ID NO: 230762 - DNA, 25 bp, SARS Virus
cgtgaacatcttggtctctttctac

SEQ ID NO: 230763 - DNA, 25 bp, SARS Virus
gtgaacatcttcgtctctttctacg

SEQ ID NO: 230764 - DNA, 25 bp, SARS Virus
tgaacatcttcggctctttctacgg

SEQ ID NO: 230765 - DNA, 25 bp, SARS Virus
gaacatcttcgtgtctttctacggt

SEQ ID NO: 230766 - DNA, 25 bp, SARS Virus
aacatcttcgtcgctttctacggtt

SEQ ID NO: 230767 - DNA, 25 bp, SARS Virus
acatcttcgtctgtttctacggttt

SEQ ID NO: 230768 - DNA, 25 bp, SARS Virus
catcttcgtctcgttctacggtttt

SEQ ID NO: 230769 - DNA, 25 bp, SARS Virus
atcttcgtctctgtctacggtttta

SEQ ID NO: 230770 - DNA, 25 bp, SARS Virus
tcttcgtctcttgctacggttttac

SEQ ID NO: 230771 - DNA, 25 bp, SARS Virus
cttcgtctctttgtacggttttact

SEQ ID NO: 230772 - DNA, 25 bp, SARS Virus
ttcgtctctttcgacggttttacta

SEQ ID NO: 230773 - DNA, 25 bp, SARS Virus
tcgtctctttctgcggttttactac

SEQ ID NO: 230774 - DNA, 25 bp, SARS Virus
cgtctctttctagggttttactacc

SEQ ID NO: 230775 - DNA, 25 bp, SARS Virus
gtctctttctacggttttactaccg

SEQ ID NO: 230776 - DNA, 25 bp, SARS Virus
tctctttctacggttttactaccgt

SEQ ID NO: 230777 - DNA, 25 bp, SARS Virus
ctctttctacgggtttactaccgtt

SEQ ID NO: 230778 - DNA, 25 bp, SARS Virus
tctttctacggtgttactaccgttg

SEQ ID NO: 230779 - DNA, 25 bp, SARS Virus
ctttctacggttgtactaccgttgg

SEQ ID NO: 230780 - DNA, 25 bp, SARS Virus
tttctacggtttgactaccgttgga

SEQ ID NO: 230781 - DNA, 25 bp, SARS Virus
ttctacggttttgctaccgttggag

SEQ ID NO: 230782 - DNA, 25 bp, SARS Virus
tctacggttttagtaccgttggaga

SEQ ID NO: 230783 - DNA, 25 bp, SARS Virus
ctacggttttacgaccgttggagaa

SEQ ID NO: 230784 - DNA, 25 bp, SARS Virus
tacggttttactgccgttggagaag

SEQ ID NO: 230785 - DNA, 25 bp, SARS Virus
acggttttactagcgttggagaagt

SEQ ID NO: 230786 - DNA, 25 bp, SARS Virus
cggttttactacggttggagaagta

SEQ ID NO: 230787 - DNA, 25 bp, SARS Virus
ggttttactaccgttggagaagtaa

SEQ ID NO: 230788 - DNA, 25 bp, SARS Virus
gttttactaccggtggagaagtaag

SEQ ID NO: 230789 - DNA, 25 bp, SARS Virus
ttttactaccgtgggagaagtaagt

SEQ ID NO: 230790 - DNA, 25 bp, SARS Virus
tttactaccgttggagaagtaagtt

SEQ ID NO: 230791 - DNA, 25 bp, SARS Virus
ttactaccgttggagaagtaagttt

SEQ ID NO: 230792 - DNA, 25 bp, SARS Virus
tactaccgttggggaagtaagttta

SEQ ID NO: 230793 - DNA, 25 bp, SARS Virus
actaccgttggagaagtaagtttac

SEQ ID NO: 230794 - DNA, 25 bp, SARS Virus
ctaccgttggaggagtaagtttact

SEQ ID NO: 230795 - DNA, 25 bp, SARS Virus
taccgttggagaggtaagtttactt

SEQ ID NO: 230796 - DNA, 25 bp, SARS Virus
accgttggagaagtaagtttacttt

SEQ ID NO: 230797 - DNA, 25 bp, SARS Virus
ccgttggagaaggaagtttactttt

SEQ ID NO: 230798 - DNA, 25 bp, SARS Virus
cgttggagaagtgagtttactttta

SEQ ID NO: 230799 - DNA, 25 bp, SARS Virus
gttggagaagtaggtttacttttag

SEQ ID NO: 230800 - DNA, 25 bp, SARS Virus
ttggagaagtaagtttacttttagc

SEQ ID NO: 230801 - DNA, 25 bp, SARS Virus
tggagaagtaaggttacttttagcg

SEQ ID NO: 230802 - DNA, 25 bp, SARS Virus
ggagaagtaagtgtacttttagcgg

SEQ ID NO: 230803 - DNA, 25 bp, SARS Virus
gagaagtaagttgacttttagcggt

SEQ ID NO: 230804 - DNA, 25 bp, SARS Virus
agaagtaagtttgcttttagcggtt

SEQ ID NO: 230805 - DNA, 25 bp, SARS Virus
gaagtaagtttagttttagcggttg

SEQ ID NO: 230806 - DNA, 25 bp, SARS Virus
aagtaagtttacgtttagcggttgt

SEQ ID NO: 230807 - DNA, 25 bp, SARS Virus
agtaagtttactgttagcggttgtt

SEQ ID NO: 230808 - DNA, 25 bp, SARS Virus
gtaagtttacttgtagcggttgtta

SEQ ID NO: 230809 - DNA, 25 bp, SARS Virus
taagtttactttgagcggttgttac

SEQ ID NO: 230810 - DNA, 25 bp, SARS Virus
aagtttacttttggcggttgttaca

SEQ ID NO: 230811 - DNA, 25 bp, SARS Virus
agtttacttttagcggttgttacaa

SEQ ID NO: 230812 - DNA, 25 bp, SARS Virus
gtttacttttaggggttgttacaat

SEQ ID NO: 230813 - DNA, 25 bp, SARS Virus
tttacttttagcggttgttacaatt

SEQ ID NO: 230814 - DNA, 25 bp, SARS Virus
ttacttttagcggttgttacaatta

SEQ ID NO: 230815 - DNA, 25 bp, SARS Virus
tacttttagcgggtgttacaattac

SEQ ID NO: 230816 - DNA, 25 bp, SARS Virus
acttttagcggtggttacaattaca

SEQ ID NO: 230817 - DNA, 25 bp, SARS Virus
cttttagcggttgttacaattacaa

SEQ ID NO: 230818 - DNA, 25 bp, SARS Virus
ttttagcggttggtacaattacaat

SEQ ID NO: 230819 - DNA, 25 bp, SARS Virus
tttagcggttgtgacaattacaatt

SEQ ID NO: 230820 - DNA, 25 bp, SARS Virus
ttagcggttgttgcaattacaattg

SEQ ID NO: 230821 - DNA, 25 bp, SARS Virus
tagcggttgttagaattacaattgt

SEQ ID NO: 230822 - DNA, 25 bp, SARS Virus
agcggttgttacgattacaattgtg

SEQ ID NO: 230823 - DNA, 25 bp, SARS Virus
gcggttgttacagttacaattgtgc

SEQ ID NO: 230824 - DNA, 25 bp, SARS Virus
cggttgttacaagtacaattgtgca

SEQ ID NO: 230825 - DNA, 25 bp, SARS Virus
ggttgttacaatgacaattgtgcaa

SEQ ID NO: 230826 - DNA, 25 bp, SARS Virus
gttgttacaattgcaattgtgcaag

SEQ ID NO: 230827 - DNA, 25 bp, SARS Virus
ttgttacaattagaattgtgcaagt

SEQ ID NO: 230828 - DNA, 25 bp, SARS Virus
tgttacaattacgattgtgcaagtg

SEQ ID NO: 230829 - DNA, 25 bp, SARS Virus
gttacaattacagttgtgcaagtgc

SEQ ID NO: 230830 - DNA, 25 bp, SARS Virus
ttacaattacaagtgtgcaagtgct

SEQ ID NO: 230831 - DNA, 25 bp, SARS Virus
tacaattacaatggtgcaagtgctg

SEQ ID NO: 230832 - DNA, 25 bp, SARS Virus
acaattacaattgtgcaagtgctga

SEQ ID NO: 230833 - DNA, 25 bp, SARS Virus
caattacaattgggcaagtgctgag

SEQ ID NO: 230834 - DNA, 25 bp, SARS Virus
aattacaattgtgcaagtgctgagt

SEQ ID NO: 230835 - DNA, 25 bp, SARS Virus
attacaattgtggaagtgctgagtc

SEQ ID NO: 230836 - DNA, 25 bp, SARS Virus
ttacaattgtgcgagtgctgagtca

SEQ ID NO: 230837 - DNA, 25 bp, SARS Virus
tacaattgtgcaggtgctgagtcat

SEQ ID NO: 230838 - DNA, 25 bp, SARS Virus
acaattgtgcaagtgctgagtcata

SEQ ID NO: 230839 - DNA, 25 bp, SARS Virus
caattgtgcaagggctgagtcatag

SEQ ID NO: 230840 - DNA, 25 bp, SARS Virus
aattgtgcaagtgctgagtcataga

SEQ ID NO: 230841 - DNA, 25 bp, SARS Virus
attgtgcaagtggtgagtcatagag

SEQ ID NO: 230842 - DNA, 25 bp, SARS Virus
ttgtgcaagtgcggagtcatagagt

SEQ ID NO: 230843 - DNA, 25 bp, SARS Virus
tgtgcaagtgctgagtcatagagtt

SEQ ID NO: 230844 - DNA, 25 bp, SARS Virus
gtgcaagtgctgggtcatagagttc

SEQ ID NO: 230845 - DNA, 25 bp, SARS Virus
tgcaagtgctgagtcatagagttcc

SEQ ID NO: 230846 - DNA, 25 bp, SARS Virus
gcaagtgctgaggcatagagttcct

SEQ ID NO: 230847 - DNA, 25 bp, SARS Virus
caagtgctgagtgatagagttcctc

SEQ ID NO: 230848 - DNA, 25 bp, SARS Virus
aagtgctgagtcgtagagttcctct

SEQ ID NO: 230849 - DNA, 25 bp, SARS Virus
agtgctgagtcagagagttcctcta

SEQ ID NO: 230850 - DNA, 25 bp, SARS Virus
gtgctgagtcatggagttcctctag

SEQ ID NO: 230851 - DNA, 25 bp, SARS Virus
tgctgagtcatagagttcctctagg

SEQ ID NO: 230852 - DNA, 25 bp, SARS Virus
gctgagtcatagggttcctctagga

SEQ ID NO: 230853 - DNA, 25 bp, SARS Virus
ctgagtcatagagttcctctaggag

SEQ ID NO: 230854 - DNA, 25 bp, SARS Virus
tgagtcatagaggtcctctaggagt

SEQ ID NO: 230855 - DNA, 25 bp, SARS Virus
gagtcatagagtgcctctaggagta

SEQ ID NO: 230856 - DNA, 25 bp, SARS Virus
agtcatagagttgctctaggagtaa

SEQ ID NO: 230857 - DNA, 25 bp, SARS Virus
ttttctaatctgttggtgactcttc

SEQ ID NO: 230858 - DNA, 25 bp, SARS Virus
tttctaatctgttggtgactcttca

SEQ ID NO: 230859 - DNA, 25 bp, SARS Virus
ttctaatctgtttgtgactcttcag

SEQ ID NO: 230860 - DNA, 25 bp, SARS Virus
tctaatctgttgttgactcttcaga

SEQ ID NO: 230861 - DNA, 25 bp, SARS Virus
ctaatctgttggtgactcttcagac

SEQ ID NO: 230862 - DNA, 25 bp, SARS Virus
taatctgttggttactcttcagaca

SEQ ID NO: 230863 - DNA, 25 bp, SARS Virus
aatctgttggtgtctcttcagacaa

SEQ ID NO: 230864 - DNA, 25 bp, SARS Virus
atctgttggtgattcttcagacaac

SEQ ID NO: 230865 - DNA, 25 bp, SARS Virus
tctgttggtgactcttcagacaaca

SEQ ID NO: 230866 - DNA, 25 bp, SARS Virus
ctgttggtgacttttcagacaacat

SEQ ID NO: 230867 - DNA, 25 bp, SARS Virus
tgttggtgactcttcagacaacatg

SEQ ID NO: 230868 - DNA, 25 bp, SARS Virus
gttggtgactcttcagacaacatgt

SEQ ID NO: 230869 - DNA, 25 bp, SARS Virus
ttggtgactctttagacaacatgtt

SEQ ID NO: 230870 - DNA, 25 bp, SARS Virus
tggtgactcttctgacaacatgttc

SEQ ID NO: 230871 - DNA, 25 bp, SARS Virus
ggtgactcttcatacaacatgttct

SEQ ID NO: 230872 - DNA, 25 bp, SARS Virus
gtgactcttcagtcaacatgttctg

SEQ ID NO: 230873 - DNA, 25 bp, SARS Virus
tgactcttcagataacatgttctgg

SEQ ID NO: 230874 - DNA, 25 bp, SARS Virus
gactcttcagactacatgttctggt

SEQ ID NO: 230875 - DNA, 25 bp, SARS Virus
actcttcagacatcatgttctggtg

SEQ ID NO: 230876 - DNA, 25 bp, SARS Virus
ctcttcagacaatatgttctggtgg

SEQ ID NO: 230877 - DNA, 25 bp, SARS Virus
tcttcagacaacttgttctggtggt

SEQ ID NO: 230878 - DNA, 25 bp, SARS Virus
cttcagacaacatgttctggtggtc

SEQ ID NO: 230879 - DNA, 25 bp, SARS Virus
ttcagacaacattttctggtggtca

SEQ ID NO: 230880 - DNA, 25 bp, SARS Virus
tcagacaacatgttctggtggtcaa

SEQ ID NO: 230881 - DNA, 25 bp, SARS Virus
cagacaacatgttctggtggtcaat

SEQ ID NO: 230882 - DNA, 25 bp, SARS Virus
agacaacatgttttggtggtcaatg

SEQ ID NO: 230883 - DNA, 25 bp, SARS Virus
gacaacatgttctggtggtcaatgt

SEQ ID NO: 230884 - DNA, 25 bp, SARS Virus
acaacatgttcttgtggtcaatgta

SEQ ID NO: 230885 - DNA, 25 bp, SARS Virus
caacatgttctgttggtcaatgtat

SEQ ID NO: 230886 - DNA, 25 bp, SARS Virus
aacatgttctggtggtcaatgtata

SEQ ID NO: 230887 - DNA, 25 bp, SARS Virus
acatgttctggttgtcaatgtatac

SEQ ID NO: 230888 - DNA, 25 bp, SARS Virus
catgttctggtgttcaatgtatacg

SEQ ID NO: 230889 - DNA, 25 bp, SARS Virus
atgttctggtggtcaatgtatacgg

SEQ ID NO: 230890 - DNA, 25 bp, SARS Virus
tgttctggtggttaatgtatacggt

SEQ ID NO: 230891 - DNA, 25 bp, SARS Virus
gttctggtggtctatgtatacggta

SEQ ID NO: 230892 - DNA, 25 bp, SARS Virus
ttctggtggtcattgtatacggtat

SEQ ID NO: 230893 - DNA, 25 bp, SARS Virus
tctggtggtcaatgtatacggtatt

SEQ ID NO: 230894 - DNA, 25 bp, SARS Virus
ctggtggtcaatttatacggtatta

SEQ ID NO: 230895 - DNA, 25 bp, SARS Virus
tggtggtcaatgtatacggtattat

SEQ ID NO: 230896 - DNA, 25 bp, SARS Virus
ggtggtcaatgtttacggtattatt

SEQ ID NO: 230897 - DNA, 25 bp, SARS Virus
gtggtcaatgtatacggtattatta

SEQ ID NO: 230898 - DNA, 25 bp, SARS Virus
tggtcaatgtattcggtattattac

SEQ ID NO: 230899 - DNA, 25 bp, SARS Virus
ggtcaatgtatatggtattattact

SEQ ID NO: 230900 - DNA, 25 bp, SARS Virus
gtcaatgtatactgtattattactg

SEQ ID NO: 230901 - DNA, 25 bp, SARS Virus
tcaatgtatacgttattattactgt

SEQ ID NO: 230902 - DNA, 25 bp, SARS Virus
caatgtatacggtattattactgtg

SEQ ID NO: 230903 - DNA, 25 bp, SARS Virus
aatgtatacggttttattactgtga

SEQ ID NO: 230904 - DNA, 25 bp, SARS Virus
atgtatacggtattattactgtgac

SEQ ID NO: 230905 - DNA, 25 bp, SARS Virus
tgtatacggtattattactgtgaca

SEQ ID NO: 230906 - DNA, 25 bp, SARS Virus
gtatacggtatttttactgtgacaa

SEQ ID NO: 230907 - DNA, 25 bp, SARS Virus
tatacggtattattactgtgacaac

SEQ ID NO: 230908 - DNA, 25 bp, SARS Virus
atacggtattattactgtgacaacc

SEQ ID NO: 230909 - DNA, 25 bp, SARS Virus
tacggtattatttctgtgacaacca

SEQ ID NO: 230910 - DNA, 25 bp, SARS Virus
acggtattattattgtgacaaccac

SEQ ID NO: 230911 - DNA, 25 bp, SARS Virus
cggtattattactgtgacaaccact

SEQ ID NO: 230912 - DNA, 25 bp, SARS Virus
ggtattattactttgacaaccactc

SEQ ID NO: 230913 - DNA, 25 bp, SARS Virus
gtattattactgtgacaaccactcg

SEQ ID NO: 230914 - DNA, 25 bp, SARS Virus
tattattactgttacaaccactcgt

SEQ ID NO: 230915 - DNA, 25 bp, SARS Virus
attattactgtgtcaaccactcgtc

SEQ ID NO: 230916 - DNA, 25 bp, SARS Virus
ttattactgtgataaccactcgtcc

SEQ ID NO: 230917 - DNA, 25 bp, SARS Virus
tattactgtgactaccactcgtcca

SEQ ID NO: 230918 - DNA, 25 bp, SARS Virus
attactgtgacatccactcgtccag

SEQ ID NO: 230919 - DNA, 25 bp, SARS Virus
ttactgtgacaatcactcgtccaga

SEQ ID NO: 230920 - DNA, 25 bp, SARS Virus
tactgtgacaactactcgtccagac

SEQ ID NO: 230921 - DNA, 25 bp, SARS Virus
actgtgacaacctctcgtccagact

SEQ ID NO: 230922 - DNA, 25 bp, SARS Virus
ctgtgacaaccattcgtccagactt

SEQ ID NO: 230923 - DNA, 25 bp, SARS Virus
tgtgacaaccactcgtccagacttc

SEQ ID NO: 230924 - DNA, 25 bp, SARS Virus
gtgacaaccacttgtccagacttca

SEQ ID NO: 230925 - DNA, 25 bp, SARS Virus
tgacaaccactcttccagacttcat

SEQ ID NO: 230926 - DNA, 25 bp, SARS Virus
gacaaccactcgtccagacttcata

SEQ ID NO: 230927 - DNA, 25 bp, SARS Virus
acaaccactcgttcagacttcatat

SEQ ID NO: 230928 - DNA, 25 bp, SARS Virus
caaccactcgtctagacttcatatt

SEQ ID NO: 230929 - DNA, 25 bp, SARS Virus
aaccactcgtcctgacttcatattt

SEQ ID NO: 230930 - DNA, 25 bp, SARS Virus
accactcgtccatacttcatatttg

SEQ ID NO: 230931 - DNA, 25 bp, SARS Virus
ccactcgtccagtcttcatatttgg

SEQ ID NO: 230932 - DNA, 25 bp, SARS Virus
cactcgtccagatttcatatttggt

SEQ ID NO: 230933 - DNA, 25 bp, SARS Virus
actcgtccagacttcatatttggta

SEQ ID NO: 230934 - DNA, 25 bp, SARS Virus
ctcgtccagacttcatatttggtac

SEQ ID NO: 230935 - DNA, 25 bp, SARS Virus
tcgtccagactttatatttggtacc

SEQ ID NO: 230936 - DNA, 25 bp, SARS Virus
cgtccagacttcttatttggtaccg

SEQ ID NO: 230937 - DNA, 25 bp, SARS Virus
gtccagacttcatatttggtaccgc

SEQ ID NO: 230938 - DNA, 25 bp, SARS Virus
tccagacttcatttttggtaccgca

SEQ ID NO: 230939 - DNA, 25 bp, SARS Virus
ccagacttcatatttggtaccgcag

SEQ ID NO: 230940 - DNA, 25 bp, SARS Virus
cagacttcatatttggtaccgcagc

SEQ ID NO: 230941 - DNA, 25 bp, SARS Virus
agacttcatatttggtaccgcagct

SEQ ID NO: 230942 - DNA, 25 bp, SARS Virus
gacttcatattttgtaccgcagctg

SEQ ID NO: 230943 - DNA, 25 bp, SARS Virus
acttcatatttgttaccgcagctgt

SEQ ID NO: 230944 - DNA, 25 bp, SARS Virus
cttcatatttggtaccgcagctgtt

SEQ ID NO: 230945 - DNA, 25 bp, SARS Virus
ttcatatttggttccgcagctgttc

SEQ ID NO: 230946 - DNA, 25 bp, SARS Virus
tcatatttggtatcgcagctgttct

SEQ ID NO: 230947 - DNA, 25 bp, SARS Virus
catatttggtactgcagctgttctg

SEQ ID NO: 230948 - DNA, 25 bp, SARS Virus
atatttggtacctcagctgttctgc

SEQ ID NO: 230949 - DNA, 25 bp, SARS Virus
tatttggtaccgtagctgttctgca

SEQ ID NO: 230950 - DNA, 25 bp, SARS Virus
atttggtaccgctgctgttctgcat

SEQ ID NO: 230951 - DNA, 25 bp, SARS Virus
tttggtaccgcatctgttctgcatt

SEQ ID NO: 230952 - DNA, 25 bp, SARS Virus
ttggtaccgcagttgttctgcatta

SEQ ID NO: 230953 - DNA, 25 bp, SARS Virus
tggtaccgcagctgttctgcattac

SEQ ID NO: 230954 - DNA, 25 bp, SARS Virus
ggtaccgcagcttttctgcattact

SEQ ID NO: 230955 - DNA, 25 bp, SARS Virus
gtaccgcagctgttctgcattactg

SEQ ID NO: 230956 - DNA, 25 bp, SARS Virus
taccgcagctgttctgcattactga

SEQ ID NO: 230957 - DNA, 25 bp, SARS Virus
accgcagctgttttgcattactgac

SEQ ID NO: 230958 - DNA, 25 bp, SARS Virus
ccgcagctgttctgcattactgaca

SEQ ID NO: 230959 - DNA, 25 bp, SARS Virus
cgcagctgttcttcattactgacaa

SEQ ID NO: 230960 - DNA, 25 bp, SARS Virus
gcagctgttctgtattactgacaag

SEQ ID NO: 230961 - DNA, 25 bp, SARS Virus
cagctgttctgctttactgacaagt

SEQ ID NO: 230962 - DNA, 25 bp, SARS Virus
agctgttctgcattactgacaagtc

SEQ ID NO: 230963 - DNA, 25 bp, SARS Virus
gctgttctgcattactgacaagtct

SEQ ID NO: 230964 - DNA, 25 bp, SARS Virus
ctgttctgcatttctgacaagtctt

SEQ ID NO: 230965 - DNA, 25 bp, SARS Virus
tgttctgcattattgacaagtcttt

SEQ ID NO: 230966 - DNA, 25 bp, SARS Virus
gttctgcattactgacaagtcttta

SEQ ID NO: 230967 - DNA, 25 bp, SARS Virus
ttctgcattacttacaagtctttat

SEQ ID NO: 230968 - DNA, 25 bp, SARS Virus
tctgcattactgtcaagtctttatg

SEQ ID NO: 230969 - DNA, 25 bp, SARS Virus
ctgcattactgataagtctttatgg

SEQ ID NO: 230970 - DNA, 25 bp, SARS Virus
tgcattactgactagtctttatggt

SEQ ID NO: 230971 - DNA, 25 bp, SARS Virus
gcattactgacatgtctttatggta

SEQ ID NO: 230972 - DNA, 25 bp, SARS Virus
cattactgacaattctttatggtag

SEQ ID NO: 230973 - DNA, 25 bp, SARS Virus
attactgacaagtctttatggtagt

SEQ ID NO: 230974 - DNA, 25 bp, SARS Virus
ttactgacaagtttttatggtagtt

SEQ ID NO: 230975 - DNA, 25 bp, SARS Virus
tactgacaagtctttatggtagttc

SEQ ID NO: 230976 - DNA, 25 bp, SARS Virus
actgacaagtctttatggtagttca

SEQ ID NO: 230977 - DNA, 25 bp, SARS Virus
ctgacaagtctttatggtagttcat

SEQ ID NO: 230978 - DNA, 25 bp, SARS Virus
tgacaagtctttttggtagttcata

SEQ ID NO: 230979 - DNA, 25 bp, SARS Virus
gacaagtctttatggtagttcatac

SEQ ID NO: 230980 - DNA, 25 bp, SARS Virus
acaagtctttattgtagttcatacc

SEQ ID NO: 230981 - DNA, 25 bp, SARS Virus
caagtctttatgttagttcatacca

SEQ ID NO: 230982 - DNA, 25 bp, SARS Virus
aagtctttatggtagttcataccac

SEQ ID NO: 230983 - DNA, 25 bp, SARS Virus
agtctttatggttgttcataccact

SEQ ID NO: 230984 - DNA, 25 bp, SARS Virus
gtctttatggtatttcataccactg

SEQ ID NO: 230985 - DNA, 25 bp, SARS Virus
tctttatggtagttcataccactgt

SEQ ID NO: 230986 - DNA, 25 bp, SARS Virus
ctttatggtagttcataccactgtc

SEQ ID NO: 230987 - DNA, 25 bp, SARS Virus
tttatggtagtttataccactgtcg

SEQ ID NO: 230988 - DNA, 25 bp, SARS Virus
ttatggtagttcttaccactgtcga

SEQ ID NO: 230989 - DNA, 25 bp, SARS Virus
tatggtagttcataccactgtcgac

SEQ ID NO: 230990 - DNA, 25 bp, SARS Virus
atggtagttcattccactgtcgacg

SEQ ID NO: 230991 - DNA, 25 bp, SARS Virus
tggtagttcatatcactgtcgacga

SEQ ID NO: 230992 - DNA, 25 bp, SARS Virus
ggtagttcatactactgtcgacgag

SEQ ID NO: 230993 - DNA, 25 bp, SARS Virus
gtagttcatacctctgtcgacgaga

SEQ ID NO: 230994 - DNA, 25 bp, SARS Virus
tagttcataccattgtcgacgagaa

SEQ ID NO: 230995 - DNA, 25 bp, SARS Virus
agttcataccactgtcgacgagaaa

SEQ ID NO: 230996 - DNA, 25 bp, SARS Virus
gttcataccactttcgacgagaaac

SEQ ID NO: 230997 - DNA, 25 bp, SARS Virus
ttcataccactgtcgacgagaaacg

SEQ ID NO: 230998 - DNA, 25 bp, SARS Virus
tcataccactgttgacgagaaacgt

SEQ ID NO: 230999 - DNA, 25 bp, SARS Virus
cataccactgtctacgagaaacgtt

SEQ ID NO: 231000 - DNA, 25 bp, SARS Virus
ataccactgtcgtcgagaaacgttt

SEQ ID NO: 231001 - DNA, 25 bp, SARS Virus
taccactgtcgatgagaaacgttta

SEQ ID NO: 231002 - DNA, 25 bp, SARS Virus
accactgtcgactagaaacgtttag

SEQ ID NO: 231003 - DNA, 25 bp, SARS Virus
ccactgtcgacgtgaaacgtttagt

SEQ ID NO: 231004 - DNA, 25 bp, SARS Virus
cactgtcgacgataaacgtttagtc

SEQ ID NO: 231005 - DNA, 25 bp, SARS Virus
actgtcgacgagtaacgtttagtcc

SEQ ID NO: 231006 - DNA, 25 bp, SARS Virus
ctgtcgacgagatacgtttagtcct

SEQ ID NO: 231007 - DNA, 25 bp, SARS Virus
tgtcgacgagaatcgtttagtcctt

SEQ ID NO: 231008 - DNA, 25 bp, SARS Virus
gtcgacgagaaatgtttagtcctta

SEQ ID NO: 231009 - DNA, 25 bp, SARS Virus
tcgacgagaaacttttagtccttaa

SEQ ID NO: 231010 - DNA, 25 bp, SARS Virus
cgacgagaaacgtttagtccttaac

SEQ ID NO: 231011 - DNA, 25 bp, SARS Virus
gacgagaaacgtttagtccttaact

SEQ ID NO: 231012 - DNA, 25 bp, SARS Virus
acgagaaacgtttagtccttaactc

SEQ ID NO: 231013 - DNA, 25 bp, SARS Virus
cgagaaacgttttgtccttaactca

SEQ ID NO: 231014 - DNA, 25 bp, SARS Virus
gagaaacgtttattccttaactcac

SEQ ID NO: 231015 - DNA, 25 bp, SARS Virus
agaaacgtttagtccttaactcacc

SEQ ID NO: 231016 - DNA, 25 bp, SARS Virus
gaaacgtttagttcttaactcacca

SEQ ID NO: 231017 - DNA, 25 bp, SARS Virus
aaacgtttagtctttaactcaccaa

SEQ ID NO: 231018 - DNA, 25 bp, SARS Virus
aacgtttagtccttaactcaccaaa

SEQ ID NO: 231019 - DNA, 25 bp, SARS Virus
acgtttagtccttaactcaccaaac

SEQ ID NO: 231020 - DNA, 25 bp, SARS Virus
cgtttagtcctttactcaccaaacg

SEQ ID NO: 231021 - DNA, 25 bp, SARS Virus
gtttagtccttatctcaccaaacga

SEQ ID NO: 231022 - DNA, 25 bp, SARS Virus
tttagtccttaattcaccaaacgac

SEQ ID NO: 231023 - DNA, 25 bp, SARS Virus
ttagtccttaactcaccaaacgacg

SEQ ID NO: 231024 - DNA, 25 bp, SARS Virus
tagtccttaacttaccaaacgacgt

SEQ ID NO: 231025 - DNA, 25 bp, SARS Virus
agtccttaactctccaaacgacgta

SEQ ID NO: 231026 - DNA, 25 bp, SARS Virus
gtccttaactcatcaaacgacgtag

SEQ ID NO: 231027 - DNA, 25 bp, SARS Virus
tccttaactcactaaacgacgtagt

SEQ ID NO: 231028 - DNA, 25 bp, SARS Virus
ccttaactcacctaacgacgtagtt

SEQ ID NO: 231029 - DNA, 25 bp, SARS Virus
cttaactcaccatacgacgtagttc

SEQ ID NO: 231030 - DNA, 25 bp, SARS Virus
ttaactcaccaatcgacgtagttca

SEQ ID NO: 231031 - DNA, 25 bp, SARS Virus
taactcaccaaatgacgtagttcac

SEQ ID NO: 231032 - DNA, 25 bp, SARS Virus
aactcaccaaactacgtagttcaca

SEQ ID NO: 231033 - DNA, 25 bp, SARS Virus
actcaccaaacgtcgtagttcacac

SEQ ID NO: 231034 - DNA, 25 bp, SARS Virus
ctcaccaaacgatgtagttcacacg

SEQ ID NO: 231035 - DNA, 25 bp, SARS Virus
tcaccaaacgacttagttcacacgc

SEQ ID NO: 231036 - DNA, 25 bp, SARS Virus
caccaaacgacgtagttcacacgcg

SEQ ID NO: 231037 - DNA, 25 bp, SARS Virus
accaaacgacgttgttcacacgcgc

SEQ ID NO: 231038 - DNA, 25 bp, SARS Virus
ccaaacgacgtatttcacacgcgcg

SEQ ID NO: 231039 - DNA, 25 bp, SARS Virus
caaacgacgtagttcacacgcgcgt

SEQ ID NO: 231040 - DNA, 25 bp, SARS Virus
aaacgacgtagttcacacgcgcgtt

SEQ ID NO: 231041 - DNA, 25 bp, SARS Virus
aacgacgtagtttacacgcgcgttt

SEQ ID NO: 231042 - DNA, 25 bp, SARS Virus
acgacgtagttctcacgcgcgtttt

SEQ ID NO: 231043 - DNA, 25 bp, SARS Virus
cgacgtagttcatacgcgcgttttt

SEQ ID NO: 231044 - DNA, 25 bp, SARS Virus
gacgtagttcactcgcgcgttttta

SEQ ID NO: 231045 - DNA, 25 bp, SARS Virus
acgtagttcacatgcgcgtttttaa

SEQ ID NO: 231046 - DNA, 25 bp, SARS Virus
cgtagttcacactcgcgtttttaac

SEQ ID NO: 231047 - DNA, 25 bp, SARS Virus
gtagttcacacgtgcgtttttaact

SEQ ID NO: 231048 - DNA, 25 bp, SARS Virus
tagttcacacgctcgtttttaacta

SEQ ID NO: 231049 - DNA, 25 bp, SARS Virus
agttcacacgcgtgtttttaactag

SEQ ID NO: 231050 - DNA, 25 bp, SARS Virus
gttcacacgcgcttttttaactaga

SEQ ID NO: 231051 - DNA, 25 bp, SARS Virus
ttcacacgcgcgtttttaactagac

SEQ ID NO: 231052 - DNA, 25 bp, SARS Virus
tcacacgcgcgtttttaactagact

SEQ ID NO: 231053 - DNA, 25 bp, SARS Virus
cacacgcgcgtttttaactagacta

SEQ ID NO: 231054 - DNA, 25 bp, SARS Virus
acacgcgcgtttttaactagactat

SEQ ID NO: 231055 - DNA, 25 bp, SARS Virus
cacgcgcgtttttaactagactatt

SEQ ID NO: 231056 - DNA, 25 bp, SARS Virus
acgcgcgttttttactagactattg

SEQ ID NO: 231057 - DNA, 25 bp, SARS Virus
cgcgcgtttttatctagactattgt

SEQ ID NO: 231058 - DNA, 25 bp, SARS Virus
gcgcgtttttaattagactattgtg

SEQ ID NO: 231059 - DNA, 25 bp, SARS Virus
cgcgtttttaactagactattgtgg

SEQ ID NO: 231060 - DNA, 25 bp, SARS Virus
gcgtttttaacttgactattgtggt

SEQ ID NO: 231061 - DNA, 25 bp, SARS Virus
cgtttttaactatactattgtggtc

SEQ ID NO: 231062 - DNA, 25 bp, SARS Virus
gtttttaactagtctattgtggtcg

SEQ ID NO: 231063 - DNA, 25 bp, SARS Virus
tttttaactagattattgtggtcgt

SEQ ID NO: 231064 - DNA, 25 bp, SARS Virus
ttttaactagactattgtggtcgtc

SEQ ID NO: 231065 - DNA, 25 bp, SARS Virus
tttaactagacttttgtggtcgtcg

SEQ ID NO: 231066 - DNA, 25 bp, SARS Virus
ttaactagactattgtggtcgtcgg

SEQ ID NO: 231067 - DNA, 25 bp, SARS Virus
taactagactattgtggtcgtcgga

SEQ ID NO: 231068 - DNA, 25 bp, SARS Virus
aactagactattttggtcgtcggac

SEQ ID NO: 231069 - DNA, 25 bp, SARS Virus
actagactattgtggtcgtcggaca

SEQ ID NO: 231070 - DNA, 25 bp, SARS Virus
ctagactattgttgtcgtcggacac

SEQ ID NO: 231071 - DNA, 25 bp, SARS Virus
tagactattgtgttcgtcggacact

SEQ ID NO: 231072 - DNA, 25 bp, SARS Virus
agactattgtggtcgtcggacactc

SEQ ID NO: 231073 - DNA, 25 bp, SARS Virus
gactattgtggttgtcggacactcc

SEQ ID NO: 231074 - DNA, 25 bp, SARS Virus
actattgtggtcttcggacactccc

SEQ ID NO: 231075 - DNA, 25 bp, SARS Virus
ctattgtggtcgtcggacactccct

SEQ ID NO: 231076 - DNA, 25 bp, SARS Virus
tattgtggtcgttggacactccctt

SEQ ID NO: 231077 - DNA, 25 bp, SARS Virus
attgtggtcgtctgacactcccttt

SEQ ID NO: 231078 - DNA, 25 bp, SARS Virus
ttgtggtcgtcgtacactccctttt

SEQ ID NO: 231079 - DNA, 25 bp, SARS Virus
tgtggtcgtcggtcactcccttttg

SEQ ID NO: 231080 - DNA, 25 bp, SARS Virus
gtggtcgtcggatactcccttttgg

SEQ ID NO: 231081 - DNA, 25 bp, SARS Virus
tggtcgtcggactctcccttttggt

SEQ ID NO: 231082 - DNA, 25 bp, SARS Virus
ggtcgtcggacattcccttttggtg

SEQ ID NO: 231083 - DNA, 25 bp, SARS Virus
gtcgtcggacactcccttttggtgt

SEQ ID NO: 231084 - DNA, 25 bp, SARS Virus
tcgtcggacacttccttttggtgtg

SEQ ID NO: 231085 - DNA, 25 bp, SARS Virus
cgtcggacactctcttttggtgtgt

SEQ ID NO: 231086 - DNA, 25 bp, SARS Virus
gtcggacactcctttttggtgtgtc

SEQ ID NO: 231087 - DNA, 25 bp, SARS Virus
tcggacactcccttttggtgtgtca

SEQ ID NO: 231088 - DNA, 25 bp, SARS Virus
cggacactcccttttggtgtgtcac

SEQ ID NO: 231089 - DNA, 25 bp, SARS Virus
ggacactcccttttggtgtgtcacc

SEQ ID NO: 231090 - DNA, 25 bp, SARS Virus
gacactcccttttggtgtgtcacca

SEQ ID NO: 231091 - DNA, 25 bp, SARS Virus
acactccctttttgtgtgtcaccac

SEQ ID NO: 231092 - DNA, 25 bp, SARS Virus
cactcccttttgttgtgtcaccaca

SEQ ID NO: 231093 - DNA, 25 bp, SARS Virus
actcccttttggtgtgtcaccacaa

SEQ ID NO: 231094 - DNA, 25 bp, SARS Virus
ctcccttttggtttgtcaccacaat

SEQ ID NO: 231095 - DNA, 25 bp, SARS Virus
tcccttttggtgtgtcaccacaatt

SEQ ID NO: 231096 - DNA, 25 bp, SARS Virus
cccttttggtgtttcaccacaattt

SEQ ID NO: 231097 - DNA, 25 bp, SARS Virus
ccttttggtgtgtcaccacaatttt

SEQ ID NO: 231098 - DNA, 25 bp, SARS Virus
cttttggtgtgttaccacaattttg

SEQ ID NO: 231099 - DNA, 25 bp, SARS Virus
ttttggtgtgtctccacaattttga

SEQ ID NO: 231100 - DNA, 25 bp, SARS Virus
tttggtgtgtcatcacaattttgac

SEQ ID NO: 231101 - DNA, 25 bp, SARS Virus
ttggtgtgtcactacaattttgact

SEQ ID NO: 231102 - DNA, 25 bp, SARS Virus
tggtgtgtcacctcaattttgacta

SEQ ID NO: 231103 - DNA, 25 bp, SARS Virus
ggtgtgtcaccataattttgactag

SEQ ID NO: 231104 - DNA, 25 bp, SARS Virus
gtgtgtcaccactattttgactaga

SEQ ID NO: 231105 - DNA, 25 bp, SARS Virus
tgtgtcaccacatttttgactagag

SEQ ID NO: 231106 - DNA, 25 bp, SARS Virus
gtgtcaccacaattttgactagaga

SEQ ID NO: 231107 - DNA, 25 bp, SARS Virus
tgtcaccacaattttgactagagac

SEQ ID NO: 231108 - DNA, 25 bp, SARS Virus
gtcaccacaattttgactagagaca

SEQ ID NO: 231109 - DNA, 25 bp, SARS Virus
tcaccacaattttgactagagacaa

SEQ ID NO: 231110 - DNA, 25 bp, SARS Virus
caccacaatttttactagagacaac

SEQ ID NO: 231111 - DNA, 25 bp, SARS Virus
accacaattttgtctagagacaaca

SEQ ID NO: 231112 - DNA, 25 bp, SARS Virus
ccacaattttgattagagacaacag

SEQ ID NO: 231113 - DNA, 25 bp, SARS Virus
cacaattttgactagagacaacagg

SEQ ID NO: 231114 - DNA, 25 bp, SARS Virus
acaattttgacttgagacaacaggt

SEQ ID NO: 231115 - DNA, 25 bp, SARS Virus
caattttgactatagacaacaggtt

SEQ ID NO: 231116 - DNA, 25 bp, SARS Virus
aattttgactagtgacaacaggtta

SEQ ID NO: 231117 - DNA, 25 bp, SARS Virus
attttgactagatacaacaggttac

SEQ ID NO: 231118 - DNA, 25 bp, SARS Virus
ttttgactagagtcaacaggttaca

SEQ ID NO: 231119 - DNA, 25 bp, SARS Virus
tttgactagagataacaggttacaa

SEQ ID NO: 231120 - DNA, 25 bp, SARS Virus
ttgactagagactacaggttacaag

SEQ ID NO: 231121 - DNA, 25 bp, SARS Virus
tgactagagacatcaggttacaagg

SEQ ID NO: 231122 - DNA, 25 bp, SARS Virus
gactagagacaataggttacaaggt

SEQ ID NO: 231123 - DNA, 25 bp, SARS Virus
actagagacaactggttacaaggtt

SEQ ID NO: 231124 - DNA, 25 bp, SARS Virus
ctagagacaacatgttacaaggttc

SEQ ID NO: 231125 - DNA, 25 bp, SARS Virus
tagagacaacagtttacaaggttcg

SEQ ID NO: 231126 - DNA, 25 bp, SARS Virus
agagacaacaggttacaaggttcgt

SEQ ID NO: 231127 - DNA, 25 bp, SARS Virus
gagacaacaggttacaaggttcgtg

SEQ ID NO: 231128 - DNA, 25 bp, SARS Virus
agacaacaggtttcaaggttcgtgg

SEQ ID NO: 231129 - DNA, 25 bp, SARS Virus
gacaacaggttataaggttcgtgga

SEQ ID NO: 231130 - DNA, 25 bp, SARS Virus
acaacaggttactaggttcgtggaa

SEQ ID NO: 231131 - DNA, 25 bp, SARS Virus
caacaggttacatggttcgtggaaa

SEQ ID NO: 231132 - DNA, 25 bp, SARS Virus
aacaggttacaatgttcgtggaaaa

SEQ ID NO: 231133 - DNA, 25 bp, SARS Virus
acaggttacaagtttcgtggaaaat

SEQ ID NO: 231134 - DNA, 25 bp, SARS Virus
caggttacaaggttcgtggaaaatg

SEQ ID NO: 231135 - DNA, 25 bp, SARS Virus
aggttacaaggttcgtggaaaatgc

SEQ ID NO: 231136 - DNA, 25 bp, SARS Virus
ggttacaaggtttgtggaaaatgcc

SEQ ID NO: 231137 - DNA, 25 bp, SARS Virus
gttacaaggttcttggaaaatgccc

SEQ ID NO: 231138 - DNA, 25 bp, SARS Virus
ttacaaggttcgtggaaaatgcccg

SEQ ID NO: 231139 - DNA, 25 bp, SARS Virus
tacaaggttcgttgaaaatgcccga

SEQ ID NO: 231140 - DNA, 25 bp, SARS Virus
acaaggttcgtgtaaaatgcccgaa

SEQ ID NO: 231141 - DNA, 25 bp, SARS Virus
caaggttcgtggtaaatgcccgaaa

SEQ ID NO: 231142 - DNA, 25 bp, SARS Virus
aaggttcgtggataatgcccgaaag

SEQ ID NO: 231143 - DNA, 25 bp, SARS Virus
aggttcgtggaatatgcccgaaagg

SEQ ID NO: 231144 - DNA, 25 bp, SARS Virus
ggttcgtggaaattgcccgaaaggg

SEQ ID NO: 231145 - DNA, 25 bp, SARS Virus
gttcgtggaaaatgcccgaaaggga

SEQ ID NO: 231146 - DNA, 25 bp, SARS Virus
ttcgtggaaaattcccgaaagggaa

SEQ ID NO: 231147 - DNA, 25 bp, SARS Virus
tcgtggaaaatgtccgaaagggaac

SEQ ID NO: 231148 - DNA, 25 bp, SARS Virus
cgtggaaaatgctcgaaagggaacc

SEQ ID NO: 231149 - DNA, 25 bp, SARS Virus
gtggaaaatgcctgaaagggaacca

SEQ ID NO: 231150 - DNA, 25 bp, SARS Virus
tggaaaatgccctaaagggaaccat

SEQ ID NO: 231151 - DNA, 25 bp, SARS Virus
ggaaaatgcccgtaagggaaccatt

SEQ ID NO: 231152 - DNA, 25 bp, SARS Virus
gaaaatgcccgatagggaaccattg

SEQ ID NO: 231153 - DNA, 25 bp, SARS Virus
aaaatgcccgaatgggaaccattga

SEQ ID NO: 231154 - DNA, 25 bp, SARS Virus
aaatgcccgaaatggaaccattgaa

SEQ ID NO: 231155 - DNA, 25 bp, SARS Virus
aatgcccgaaagtgaaccattgaaa

SEQ ID NO: 231156 - DNA, 25 bp, SARS Virus
atgcccgaaaggtaaccattgaaat

SEQ ID NO: 231157 - DNA, 25 bp, SARS Virus
tgcccgaaagggtaccattgaaata

SEQ ID NO: 231158 - DNA, 25 bp, SARS Virus
gcccgaaagggatccattgaaatat

SEQ ID NO: 231159 - DNA, 25 bp, SARS Virus
cccgaaagggaatcattgaaatatc

SEQ ID NO: 231160 - DNA, 25 bp, SARS Virus
ccgaaagggaactattgaaatatca

SEQ ID NO: 231161 - DNA, 25 bp, SARS Virus
cgaaagggaacctttgaaatatcaa

SEQ ID NO: 231162 - DNA, 25 bp, SARS Virus
gaaagggaaccattgaaatatcaat

SEQ ID NO: 231163 - DNA, 25 bp, SARS Virus
aaagggaaccattgaaatatcaatg

SEQ ID NO: 231164 - DNA, 25 bp, SARS Virus
aagggaaccatttaaatatcaatgg

SEQ ID NO: 231165 - DNA, 25 bp, SARS Virus
agggaaccattgtaatatcaatggc

SEQ ID NO: 231166 - DNA, 25 bp, SARS Virus
gggaaccattgatatatcaatggcg

SEQ ID NO: 231167 - DNA, 25 bp, SARS Virus
ggaaccattgaattatcaatggcgt

SEQ ID NO: 231168 - DNA, 25 bp, SARS Virus
gaaccattgaaatatcaatggcgtc

SEQ ID NO: 231169 - DNA, 25 bp, SARS Virus
aaccattgaaatttcaatggcgtcc

SEQ ID NO: 231170 - DNA, 25 bp, SARS Virus
accattgaaatatcaatggcgtcct

SEQ ID NO: 231171 - DNA, 25 bp, SARS Virus
ccattgaaatattaatggcgtcctg

SEQ ID NO: 231172 - DNA, 25 bp, SARS Virus
cattgaaatatctatggcgtcctga

SEQ ID NO: 231173 - DNA, 25 bp, SARS Virus
attgaaatatcattggcgtcctgag

SEQ ID NO: 231174 - DNA, 25 bp, SARS Virus
ttgaaatatcaatggcgtcctgagt

SEQ ID NO: 231175 - DNA, 25 bp, SARS Virus
tgaaatatcaattgcgtcctgagtt

SEQ ID NO: 231176 - DNA, 25 bp, SARS Virus
gaaatatcaatgtcgtcctgagttg

SEQ ID NO: 231177 - DNA, 25 bp, SARS Virus
aaatatcaatggtgtcctgagttgt

SEQ ID NO: 231178 - DNA, 25 bp, SARS Virus
aatatcaatggcttcctgagttgtt

SEQ ID NO: 231179 - DNA, 25 bp, SARS Virus
atatcaatggcgtcctgagttgtta

SEQ ID NO: 231180 - DNA, 25 bp, SARS Virus
tatcaatggcgttctgagttgttac

SEQ ID NO: 231181 - DNA, 25 bp, SARS Virus
atcaatggcgtcttgagttgttacc

SEQ ID NO: 231182 - DNA, 25 bp, SARS Virus
tcaatggcgtcctgagttgttacca

SEQ ID NO: 231183 - DNA, 25 bp, SARS Virus
caatggcgtccttagttgttaccaa

SEQ ID NO: 231184 - DNA, 25 bp, SARS Virus
aatggcgtcctgtgttgttaccaaa

SEQ ID NO: 231185 - DNA, 25 bp, SARS Virus
atggcgtcctgatttgttaccaaaa

SEQ ID NO: 231186 - DNA, 25 bp, SARS Virus
tggcgtcctgagttgttaccaaaac

SEQ ID NO: 231187 - DNA, 25 bp, SARS Virus
ggcgtcctgagttgttaccaaaact

SEQ ID NO: 231188 - DNA, 25 bp, SARS Virus
gcgtcctgagtttttaccaaaactt

SEQ ID NO: 231189 - DNA, 25 bp, SARS Virus
cgtcctgagttgttaccaaaacttt

SEQ ID NO: 231190 - DNA, 25 bp, SARS Virus
gtcctgagttgttaccaaaactttc

SEQ ID NO: 231191 - DNA, 25 bp, SARS Virus
tcctgagttgtttccaaaactttct

SEQ ID NO: 231192 - DNA, 25 bp, SARS Virus
cctgagttgttatcaaaactttctg

SEQ ID NO: 231193 - DNA, 25 bp, SARS Virus
ctgagttgttactaaaactttctga

SEQ ID NO: 231194 - DNA, 25 bp, SARS Virus
tgagttgttacctaaactttctgaa

SEQ ID NO: 231195 - DNA, 25 bp, SARS Virus
gagttgttaccataactttctgaac

SEQ ID NO: 231196 - DNA, 25 bp, SARS Virus
agttgttaccaatactttctgaaca

SEQ ID NO: 231197 - DNA, 25 bp, SARS Virus
gttgttaccaaatctttctgaacat

SEQ ID NO: 231198 - DNA, 25 bp, SARS Virus
ttgttaccaaaattttctgaacatt

SEQ ID NO: 231199 - DNA, 25 bp, SARS Virus
tgttaccaaaactttctgaacatta

SEQ ID NO: 231200 - DNA, 25 bp, SARS Virus
gttaccaaaactttctgaacattag

SEQ ID NO: 231201 - DNA, 25 bp, SARS Virus
ttaccaaaactttctgaacattagt

SEQ ID NO: 231202 - DNA, 25 bp, SARS Virus
taccaaaactttttgaacattagtt

SEQ ID NO: 231203 - DNA, 25 bp, SARS Virus
accaaaactttctgaacattagttc

SEQ ID NO: 231204 - DNA, 25 bp, SARS Virus
ccaaaactttcttaacattagttct

SEQ ID NO: 231205 - DNA, 25 bp, SARS Virus
caaaactttctgtacattagttctg

SEQ ID NO: 231206 - DNA, 25 bp, SARS Virus
aaaactttctgatcattagttctga

SEQ ID NO: 231207 - DNA, 25 bp, SARS Virus
aaactttctgaatattagttctgag

SEQ ID NO: 231208 - DNA, 25 bp, SARS Virus
aactttctgaactttagttctgaga

SEQ ID NO: 231209 - DNA, 25 bp, SARS Virus
actttctgaacattagttctgagaa

SEQ ID NO: 231210 - DNA, 25 bp, SARS Virus
ctttctgaacattagttctgagaaa

SEQ ID NO: 231211 - DNA, 25 bp, SARS Virus
tttctgaacatttgttctgagaaat

SEQ ID NO: 231212 - DNA, 25 bp, SARS Virus
ttctgaacattatttctgagaaata

SEQ ID NO: 231213 - DNA, 25 bp, SARS Virus
tctgaacattagttctgagaaatat

SEQ ID NO: 231214 - DNA, 25 bp, SARS Virus
ctgaacattagttctgagaaatatc

SEQ ID NO: 231215 - DNA, 25 bp, SARS Virus
tgaacattagttttgagaaatatca

SEQ ID NO: 231216 - DNA, 25 bp, SARS Virus
gaacattagttctgagaaatatcac

SEQ ID NO: 231217 - DNA, 25 bp, SARS Virus
aacattagttcttagaaatatcaca

SEQ ID NO: 231218 - DNA, 25 bp, SARS Virus
acattagttctgtgaaatatcacag

SEQ ID NO: 231219 - DNA, 25 bp, SARS Virus
cattagttctgataaatatcacagt

SEQ ID NO: 231220 - DNA, 25 bp, SARS Virus
attagttctgagtaatatcacagtt

SEQ ID NO: 231221 - DNA, 25 bp, SARS Virus
ttagttctgagatatatcacagtta

SEQ ID NO: 231222 - DNA, 25 bp, SARS Virus
tagttctgagaattatcacagttat

SEQ ID NO: 231223 - DNA, 25 bp, SARS Virus
agttctgagaaatatcacagttatt

SEQ ID NO: 231224 - DNA, 25 bp, SARS Virus
gttctgagaaatttcacagttattt

SEQ ID NO: 231225 - DNA, 25 bp, SARS Virus
ttctgagaaatatcacagttatttc

SEQ ID NO: 231226 - DNA, 25 bp, SARS Virus
tctgagaaatattacagttatttcc

SEQ ID NO: 231227 - DNA, 25 bp, SARS Virus
ctgagaaatatctcagttatttccg

SEQ ID NO: 231228 - DNA, 25 bp, SARS Virus
tgagaaatatcatagttatttccgt

SEQ ID NO: 231229 - DNA, 25 bp, SARS Virus
gagaaatatcactgttatttccgtg

SEQ ID NO: 231230 - DNA, 25 bp, SARS Virus
agaaatatcacatttatttccgtga

SEQ ID NO: 231231 - DNA, 25 bp, SARS Virus
gaaatatcacagttatttccgtgaa

SEQ ID NO: 231232 - DNA, 25 bp, SARS Virus
aaatatcacagttatttccgtgaac

SEQ ID NO: 231233 - DNA, 25 bp, SARS Virus
aatatcacagttttttccgtgaaca

SEQ ID NO: 231234 - DNA, 25 bp, SARS Virus
atatcacagttatttccgtgaacat

SEQ ID NO: 231235 - DNA, 25 bp, SARS Virus
tatcacagttatttccgtgaacatc

SEQ ID NO: 231236 - DNA, 25 bp, SARS Virus
atcacagttatttccgtgaacatct

SEQ ID NO: 231237 - DNA, 25 bp, SARS Virus
tcacagttattttcgtgaacatctt

SEQ ID NO: 231238 - DNA, 25 bp, SARS Virus
cacagttatttctgtgaacatcttc

SEQ ID NO: 231239 - DNA, 25 bp, SARS Virus
acagttatttccttgaacatcttcg

SEQ ID NO: 231240 - DNA, 25 bp, SARS Virus
cagttatttccgtgaacatcttcgt

SEQ ID NO: 231241 - DNA, 25 bp, SARS Virus
agttatttccgttaacatcttcgtc

SEQ ID NO: 231242 - DNA, 25 bp, SARS Virus
gttatttccgtgtacatcttcgtct

SEQ ID NO: 231243 - DNA, 25 bp, SARS Virus
ttatttccgtgatcatcttcgtctc

SEQ ID NO: 231244 - DNA, 25 bp, SARS Virus
tatttccgtgaatatcttcgtctct

SEQ ID NO: 231245 - DNA, 25 bp, SARS Virus
atttccgtgaacttcttcgtctctt

SEQ ID NO: 231246 - DNA, 25 bp, SARS Virus
tttccgtgaacatcttcgtctcttt

SEQ ID NO: 231247 - DNA, 25 bp, SARS Virus
ttccgtgaacattttcgtctctttc

SEQ ID NO: 231248 - DNA, 25 bp, SARS Virus
tccgtgaacatcttcgtctctttct

SEQ ID NO: 231249 - DNA, 25 bp, SARS Virus
ccgtgaacatcttcgtctctttcta

SEQ ID NO: 231250 - DNA, 25 bp, SARS Virus
cgtgaacatctttgtctctttctac

SEQ ID NO: 231251 - DNA, 25 bp, SARS Virus
gtgaacatcttcttctctttctacg

SEQ ID NO: 231252 - DNA, 25 bp, SARS Virus
tgaacatcttcgtctctttctacgg

SEQ ID NO: 231253 - DNA, 25 bp, SARS Virus
gaacatcttcgtttctttctacggt

SEQ ID NO: 231254 - DNA, 25 bp, SARS Virus
aacatcttcgtctctttctacggtt

SEQ ID NO: 231255 - DNA, 25 bp, SARS Virus
acatcttcgtctttttctacggttt

SEQ ID NO: 231256 - DNA, 25 bp, SARS Virus
catcttcgtctctttctacggtttt

SEQ ID NO: 231257 - DNA, 25 bp, SARS Virus
atcttcgtctctttctacggtttta

SEQ ID NO: 231258 - DNA, 25 bp, SARS Virus
tcttcgtctctttctacggttttac

SEQ ID NO: 231259 - DNA, 25 bp, SARS Virus
cttcgtctctttttacggttttact

SEQ ID NO: 231260 - DNA, 25 bp, SARS Virus
ttcgtctctttctacggttttacta

SEQ ID NO: 231261 - DNA, 25 bp, SARS Virus
tcgtctctttcttcggttttactac

SEQ ID NO: 231262 - DNA, 25 bp, SARS Virus
cgtctctttctatggttttactacc

SEQ ID NO: 231263 - DNA, 25 bp, SARS Virus
gtctctttctactgttttactaccg

SEQ ID NO: 231264 - DNA, 25 bp, SARS Virus
tctctttctacgtttttactaccgt

SEQ ID NO: 231265 - DNA, 25 bp, SARS Virus
ctctttctacggttttactaccgtt

SEQ ID NO: 231266 - DNA, 25 bp, SARS Virus
tctttctacggttttactaccgttg

SEQ ID NO: 231267 - DNA, 25 bp, SARS Virus
ctttctacggttttactaccgttgg

SEQ ID NO: 231268 - DNA, 25 bp, SARS Virus
tttctacggttttactaccgttgga

SEQ ID NO: 231269 - DNA, 25 bp, SARS Virus
ttctacggtttttctaccgttggag

SEQ ID NO: 231270 - DNA, 25 bp, SARS Virus
tctacggttttattaccgttggaga

SEQ ID NO: 231271 - DNA, 25 bp, SARS Virus
ctacggttttactaccgttggagaa

SEQ ID NO: 231272 - DNA, 25 bp, SARS Virus
tacggttttacttccgttggagaag

SEQ ID NO: 231273 - DNA, 25 bp, SARS Virus
acggttttactatcgttggagaagt

SEQ ID NO: 231274 - DNA, 25 bp, SARS Virus
cggttttactactgttggagaagta

SEQ ID NO: 231275 - DNA, 25 bp, SARS Virus
ggttttactacctttggagaagtaa

SEQ ID NO: 231276 - DNA, 25 bp, SARS Virus
gttttactaccgttggagaagtaag

SEQ ID NO: 231277 - DNA, 25 bp, SARS Virus
ttttactaccgttggagaagtaagt

SEQ ID NO: 231278 - DNA, 25 bp, SARS Virus
tttactaccgtttgagaagtaagtt

SEQ ID NO: 231279 - DNA, 25 bp, SARS Virus
ttactaccgttgtagaagtaagttt

SEQ ID NO: 231280 - DNA, 25 bp, SARS Virus
tactaccgttggtgaagtaagttta

SEQ ID NO: 231281 - DNA, 25 bp, SARS Virus
actaccgttggataagtaagtttac

SEQ ID NO: 231282 - DNA, 25 bp, SARS Virus
ctaccgttggagtagtaagtttact

SEQ ID NO: 231283 - DNA, 25 bp, SARS Virus
taccgttggagatgtaagtttactt

SEQ ID NO: 231284 - DNA, 25 bp, SARS Virus
accgttggagaattaagtttacttt

SEQ ID NO: 231285 - DNA, 25 bp, SARS Virus
ccgttggagaagtaagtttactttt

SEQ ID NO: 231286 - DNA, 25 bp, SARS Virus
cgttggagaagttagtttactttta

SEQ ID NO: 231287 - DNA, 25 bp, SARS Virus
gttggagaagtatgtttacttttag

SEQ ID NO: 231288 - DNA, 25 bp, SARS Virus
ttggagaagtaattttacttttagc

SEQ ID NO: 231289 - DNA, 25 bp, SARS Virus
tggagaagtaagtttacttttagcg

SEQ ID NO: 231290 - DNA, 25 bp, SARS Virus
ggagaagtaagtttacttttagcgg

SEQ ID NO: 231291 - DNA, 25 bp, SARS Virus
gagaagtaagtttacttttagcggt

SEQ ID NO: 231292 - DNA, 25 bp, SARS Virus
agaagtaagttttcttttagcggtt

SEQ ID NO: 231293 - DNA, 25 bp, SARS Virus
gaagtaagtttatttttagcggttg

SEQ ID NO: 231294 - DNA, 25 bp, SARS Virus
aagtaagtttacttttagcggttgt

SEQ ID NO: 231295 - DNA, 25 bp, SARS Virus
agtaagtttacttttagcggttgtt

SEQ ID NO: 231296 - DNA, 25 bp, SARS Virus
gtaagtttacttttagcggttgtta

SEQ ID NO: 231297 - DNA, 25 bp, SARS Virus
taagtttacttttagcggttgttac

SEQ ID NO: 231298 - DNA, 25 bp, SARS Virus
aagtttactttttgcggttgttaca

SEQ ID NO: 231299 - DNA, 25 bp, SARS Virus
agtttacttttatcggttgttacaa

SEQ ID NO: 231300 - DNA, 25 bp, SARS Virus
gtttacttttagtggttgttacaat

SEQ ID NO: 231301 - DNA, 25 bp, SARS Virus
tttacttttagctgttgttacaatt

SEQ ID NO: 231302 - DNA, 25 bp, SARS Virus
ttacttttagcgtttgttacaatta

SEQ ID NO: 231303 - DNA, 25 bp, SARS Virus
tacttttagcggttgttacaattac

SEQ ID NO: 231304 - DNA, 25 bp, SARS Virus
acttttagcggttgttacaattaca

SEQ ID NO: 231305 - DNA, 25 bp, SARS Virus
cttttagcggtttttacaattacaa

SEQ ID NO: 231306 - DNA, 25 bp, SARS Virus
ttttagcggttgttacaattacaat

SEQ ID NO: 231307 - DNA, 25 bp, SARS Virus
tttagcggttgttacaattacaatt

SEQ ID NO: 231308 - DNA, 25 bp, SARS Virus
ttagcggttgtttcaattacaattg

SEQ ID NO: 231309 - DNA, 25 bp, SARS Virus
tagcggttgttataattacaattgt

SEQ ID NO: 231310 - DNA, 25 bp, SARS Virus
agcggttgttactattacaattgtg

SEQ ID NO: 231311 - DNA, 25 bp, SARS Virus
gcggttgttacatttacaattgtgc

SEQ ID NO: 231312 - DNA, 25 bp, SARS Virus
cggttgttacaattacaattgtgca

SEQ ID NO: 231313 - DNA, 25 bp, SARS Virus
ggttgttacaattacaattgtgcaa

SEQ ID NO: 231314 - DNA, 25 bp, SARS Virus
gttgttacaatttcaattgtgcaag

SEQ ID NO: 231315 - DNA, 25 bp, SARS Virus
ttgttacaattataattgtgcaagt

SEQ ID NO: 231316 - DNA, 25 bp, SARS Virus
tgttacaattactattgtgcaagtg

SEQ ID NO: 231317 - DNA, 25 bp, SARS Virus
gttacaattacatttgtgcaagtgc

SEQ ID NO: 231318 - DNA, 25 bp, SARS Virus
ttacaattacaattgtgcaagtgct

SEQ ID NO: 231319 - DNA, 25 bp, SARS Virus
tacaattacaattgtgcaagtgctg

SEQ ID NO: 231320 - DNA, 25 bp, SARS Virus
acaattacaattttgcaagtgctga

SEQ ID NO: 231321 - DNA, 25 bp, SARS Virus
caattacaattgtgcaagtgctgag

SEQ ID NO: 231322 - DNA, 25 bp, SARS Virus
aattacaattgttcaagtgctgagt

SEQ ID NO: 231323 - DNA, 25 bp, SARS Virus
attacaattgtgtaagtgctgagtc

SEQ ID NO: 231324 - DNA, 25 bp, SARS Virus
ttacaattgtgctagtgctgagtca

SEQ ID NO: 231325 - DNA, 25 bp, SARS Virus
tacaattgtgcatgtgctgagtcat

SEQ ID NO: 231326 - DNA, 25 bp, SARS Virus
acaattgtgcaattgctgagtcata

SEQ ID NO: 231327 - DNA, 25 bp, SARS Virus
caattgtgcaagtgctgagtcatag

SEQ ID NO: 231328 - DNA, 25 bp, SARS Virus
aattgtgcaagttctgagtcataga

SEQ ID NO: 231329 - DNA, 25 bp, SARS Virus
attgtgcaagtgttgagtcatagag

SEQ ID NO: 231330 - DNA, 25 bp, SARS Virus
ttgtgcaagtgctgagtcatagagt

SEQ ID NO: 231331 - DNA, 25 bp, SARS Virus
tgtgcaagtgcttagtcatagagtt

SEQ ID NO: 231332 - DNA, 25 bp, SARS Virus
gtgcaagtgctgtgtcatagagttc

SEQ ID NO: 231333 - DNA, 25 bp, SARS Virus
tgcaagtgctgattcatagagttcc

SEQ ID NO: 231334 - DNA, 25 bp, SARS Virus
gcaagtgctgagtcatagagttcct

SEQ ID NO: 231335 - DNA, 25 bp, SARS Virus
caagtgctgagttatagagttcctc

SEQ ID NO: 231336 - DNA, 25 bp, SARS Virus
aagtgctgagtcttagagttcctct

SEQ ID NO: 231337 - DNA, 25 bp, SARS Virus
agtgctgagtcatagagttcctcta

SEQ ID NO: 231338 - DNA, 25 bp, SARS Virus
gtgctgagtcattgagttcctctag

SEQ ID NO: 231339 - DNA, 25 bp, SARS Virus
tgctgagtcatatagttcctctagg

SEQ ID NO: 231340 - DNA, 25 bp, SARS Virus
gctgagtcatagtgttcctctagga

SEQ ID NO: 231341 - DNA, 25 bp, SARS Virus
ctgagtcatagatttcctctaggag

SEQ ID NO: 231342 - DNA, 25 bp, SARS Virus
tgagtcatagagttcctctaggagt

SEQ ID NO: 231343 - DNA, 25 bp, SARS Virus
gagtcatagagttcctctaggagta

SEQ ID NO: 231344 - DNA, 25 bp, SARS Virus
agtcatagagtttctctaggagtaa

SEQ ID NO: 231345 - DNA, 25 bp, SARS Virus
gtcatagagttcatctaggagtaag

SEQ ID NO: 231346 - DNA, 25 bp, SARS Virus
tcatagagttccactaggagtaagt

SEQ ID NO: 231347 - DNA, 25 bp, SARS Virus
catagagttcctataggagtaagtt

SEQ ID NO: 231348 - DNA, 25 bp, SARS Virus
atagagttcctcaaggagtaagttc

SEQ ID NO: 231349 - DNA, 25 bp, SARS Virus
tagagttcctctaggagtaagttcc

SEQ ID NO: 231350 - DNA, 25 bp, SARS Virus
agagttcctctaagagtaagttcca

SEQ ID NO: 231351 - DNA, 25 bp, SARS Virus
gagttcctctagaagtaagttccag

SEQ ID NO: 231352 - DNA, 25 bp, SARS Virus
agttcctctaggagtaagttccaga

SEQ ID NO: 231353 - DNA, 25 bp, SARS Virus
gttcctctaggaataagttccagag

SEQ ID NO: 231354 - DNA, 25 bp, SARS Virus
ttcctctaggagaaagttccagagg

SEQ ID NO: 231355 - DNA, 25 bp, SARS Virus
tcctctaggagtaagttccagaggt

SEQ ID NO: 231356 - DNA, 25 bp, SARS Virus
cctctaggagtaagttccagaggtg

SEQ ID NO: 231357 - DNA, 25 bp, SARS Virus
ctctaggagtaaattccagaggtgt

SEQ ID NO: 231358 - DNA, 25 bp, SARS Virus
tctaggagtaagatccagaggtgta

SEQ ID NO: 231359 - DNA, 25 bp, SARS Virus
ctaggagtaagtaccagaggtgtaa

SEQ ID NO: 231360 - DNA, 25 bp, SARS Virus
taggagtaagttacagaggtgtaac

SEQ ID NO: 231361 - DNA, 25 bp, SARS Virus
aggagtaagttcaagaggtgtaaca

SEQ ID NO: 231362 - DNA, 25 bp, SARS Virus
ggagtaagttccagaggtgtaacag

SEQ ID NO: 231363 - DNA, 25 bp, SARS Virus
gagtaagttccaaaggtgtaacagt

SEQ ID NO: 231364 - DNA, 25 bp, SARS Virus
agtaagttccagaggtgtaacagtg

SEQ ID NO: 231365 - DNA, 25 bp, SARS Virus
gtaagttccagaagtgtaacagtgg

SEQ ID NO: 231366 - DNA, 25 bp, SARS Virus
taagttccagagatgtaacagtggt

SEQ ID NO: 231367 - DNA, 25 bp, SARS Virus
aagttccagaggagtaacagtggtc

SEQ ID NO: 231368 - DNA, 25 bp, SARS Virus
agttccagaggtataacagtggtca

SEQ ID NO: 231369 - DNA, 25 bp, SARS Virus
gttccagaggtgaaacagtggtcat

SEQ ID NO: 231370 - DNA, 25 bp, SARS Virus
ttccagaggtgtaacagtggtcatt

SEQ ID NO: 231371 - DNA, 25 bp, SARS Virus
tccagaggtgtaacagtggtcatta

SEQ ID NO: 231372 - DNA, 25 bp, SARS Virus
ccagaggtgtaaaagtggtcattac

SEQ ID NO: 231373 - DNA, 25 bp, SARS Virus
cagaggtgtaacagtggtcattacg

SEQ ID NO: 231374 - DNA, 25 bp, SARS Virus
agaggtgtaacaatggtcattacgg

SEQ ID NO: 231375 - DNA, 25 bp, SARS Virus
gaggtgtaacagaggtcattacggt

SEQ ID NO: 231376 - DNA, 25 bp, SARS Virus
aggtgtaacagtagtcattacggtc

SEQ ID NO: 231377 - DNA, 25 bp, SARS Virus
ggtgtaacagtgatcattacggtca

SEQ ID NO: 231378 - DNA, 25 bp, SARS Virus
gtgtaacagtggacattacggtcat

SEQ ID NO: 231379 - DNA, 25 bp, SARS Virus
tgtaacagtggtaattacggtcata

SEQ ID NO: 231380 - DNA, 25 bp, SARS Virus
gtaacagtggtcattacggtcatac

SEQ ID NO: 231381 - DNA, 25 bp, SARS Virus
taacagtggtcaatacggtcatacc

SEQ ID NO: 231382 - DNA, 25 bp, SARS Virus
aacagtggtcataacggtcataccg

SEQ ID NO: 231383 - DNA, 25 bp, SARS Virus
acagtggtcattacggtcataccgg

SEQ ID NO: 231384 - DNA, 25 bp, SARS Virus
cagtggtcattaaggtcataccgga

SEQ ID NO: 231385 - DNA, 25 bp, SARS Virus
agtggtcattacagtcataccggac

SEQ ID NO: 231386 - DNA, 25 bp, SARS Virus
gtggtcattacgatcataccggact

SEQ ID NO: 231387 - DNA, 25 bp, SARS Virus
tggtcattacggacataccggactc

SEQ ID NO: 231388 - DNA, 25 bp, SARS Virus
ggtcattacggtaataccggactcg

SEQ ID NO: 231389 - DNA, 25 bp, SARS Virus
gtcattacggtcataccggactcgg

SEQ ID NO: 231390 - DNA, 25 bp, SARS Virus
tcattacggtcaaaccggactcggt

SEQ ID NO: 231391 - DNA, 25 bp, SARS Virus
cattacggtcataccggactcggtt

SEQ ID NO: 231392 - DNA, 25 bp, SARS Virus
attacggtcataacggactcggtta

SEQ ID NO: 231393 - DNA, 25 bp, SARS Virus
ttacggtcatacaggactcggttat

SEQ ID NO: 231394 - DNA, 25 bp, SARS Virus
tacggtcataccagactcggttata

SEQ ID NO: 231395 - DNA, 25 bp, SARS Virus
acggtcataccgaactcggttatag

SEQ ID NO: 231396 - DNA, 25 bp, SARS Virus
cggtcataccggactcggttatagt

SEQ ID NO: 231397 - DNA, 25 bp, SARS Virus
ggtcataccggaatcggttatagtc

SEQ ID NO: 231398 - DNA, 25 bp, SARS Virus
gtcataccggacacggttatagtcg

SEQ ID NO: 231399 - DNA, 25 bp, SARS Virus
tcataccggactaggttatagtcgt

SEQ ID NO: 231400 - DNA, 25 bp, SARS Virus
cataccggactcagttatagtcgtg

SEQ ID NO: 231401 - DNA, 25 bp, SARS Virus
ataccggactcgattatagtcgtga

SEQ ID NO: 231402 - DNA, 25 bp, SARS Virus
taccggactcggatatagtcgtgat

SEQ ID NO: 231403 - DNA, 25 bp, SARS Virus
accggactcggtaatagtcgtgatc

SEQ ID NO: 231404 - DNA, 25 bp, SARS Virus
ccggactcggttatagtcgtgatcg

SEQ ID NO: 231405 - DNA, 25 bp, SARS Virus
cggactcggttaaagtcgtgatcgt

SEQ ID NO: 231406 - DNA, 25 bp, SARS Virus
ggactcggttatagtcgtgatcgtg

SEQ ID NO: 231407 - DNA, 25 bp, SARS Virus
gactcggttataatcgtgatcgtgc

SEQ ID NO: 231408 - DNA, 25 bp, SARS Virus
actcggttatagacgtgatcgtgct

SEQ ID NO: 231409 - DNA, 25 bp, SARS Virus
ctcggttatagtagtgatcgtgctc

SEQ ID NO: 231410 - DNA, 25 bp, SARS Virus
tcggttatagtcatgatcgtgctcc

SEQ ID NO: 231411 - DNA, 25 bp, SARS Virus
cggttatagtcgagatcgtgctcct

SEQ ID NO: 231412 - DNA, 25 bp, SARS Virus
ggttatagtcgtaatcgtgctcctt

SEQ ID NO: 231413 - DNA, 25 bp, SARS Virus
gttatagtcgtgatcgtgctccttg

SEQ ID NO: 231414 - DNA, 25 bp, SARS Virus
ttatagtcgtgaacgtgctccttgg

SEQ ID NO: 231415 - DNA, 25 bp, SARS Virus
tatagtcgtgatagtgctccttggg

SEQ ID NO: 231416 - DNA, 25 bp, SARS Virus
atagtcgtgatcatgctccttgggt

SEQ ID NO: 231417 - DNA, 25 bp, SARS Virus
tagtcgtgatcgagctccttgggtc

SEQ ID NO: 231418 - DNA, 25 bp, SARS Virus
agtcgtgatcgtactccttgggtca

SEQ ID NO: 231419 - DNA, 25 bp, SARS Virus
gtcgtgatcgtgatccttgggtcat

SEQ ID NO: 231420 - DNA, 25 bp, SARS Virus
tcgtgatcgtgcaccttgggtcatc

SEQ ID NO: 231421 - DNA, 25 bp, SARS Virus
cgtgatcgtgctacttgggtcatcc

SEQ ID NO: 231422 - DNA, 25 bp, SARS Virus
gtgatcgtgctcattgggtcatccg

SEQ ID NO: 231423 - DNA, 25 bp, SARS Virus
tgatcgtgctccatgggtcatccgt

SEQ ID NO: 231424 - DNA, 25 bp, SARS Virus
gatcgtgctcctagggtcatccgtg

SEQ ID NO: 231425 - DNA, 25 bp, SARS Virus
atcgtgctccttaggtcatccgtgc

SEQ ID NO: 231426 - DNA, 25 bp, SARS Virus
tcgtgctccttgagtcatccgtgcg

SEQ ID NO: 231427 - DNA, 25 bp, SARS Virus
cgtgctccttggatcatccgtgcga

SEQ ID NO: 231428 - DNA, 25 bp, SARS Virus
gtgctccttgggacatccgtgcgaa

SEQ ID NO: 231429 - DNA, 25 bp, SARS Virus
tgctccttgggtaatccgtgcgaat

SEQ ID NO: 231430 - DNA, 25 bp, SARS Virus
gctccttgggtcatccgtgcgaata

SEQ ID NO: 231431 - DNA, 25 bp, SARS Virus
ctccttgggtcaaccgtgcgaataa

SEQ ID NO: 231432 - DNA, 25 bp, SARS Virus
tccttgggtcatacgtgcgaataat

SEQ ID NO: 231433 - DNA, 25 bp, SARS Virus
ccttgggtcatcagtgcgaataata

SEQ ID NO: 231434 - DNA, 25 bp, SARS Virus
cttgggtcatccatgcgaataatat

SEQ ID NO: 231435 - DNA, 25 bp, SARS Virus
ttgggtcatccgagcgaataatatc

SEQ ID NO: 231436 - DNA, 25 bp, SARS Virus
tgggtcatccgtacgaataatatcg

SEQ ID NO: 231437 - DNA, 25 bp, SARS Virus
gggtcatccgtgagaataatatcgt

SEQ ID NO: 231438 - DNA, 25 bp, SARS Virus
ggtcatccgtgcaaataatatcgtc

SEQ ID NO: 231439 - DNA, 25 bp, SARS Virus
gtcatccgtgcgaataatatcgtcg

SEQ ID NO: 231440 - DNA, 25 bp, SARS Virus
tcatccgtgcgaataatatcgtcgg

SEQ ID NO: 231441 - DNA, 25 bp, SARS Virus
catccgtgcgaaaaatatcgtcggt

SEQ ID NO: 231442 - DNA, 25 bp, SARS Virus
atccgtgcgaataatatcgtcggtt

SEQ ID NO: 231443 - DNA, 25 bp, SARS Virus
tccgtgcgaataatatcgtcggttg

SEQ ID NO: 231444 - DNA, 25 bp, SARS Virus
ccgtgcgaataaaatcgtcggttgt

SEQ ID NO: 231445 - DNA, 25 bp, SARS Virus
cgtgcgaataatatcgtcggttgta

SEQ ID NO: 231446 - DNA, 25 bp, SARS Virus
gtgcgaataataacgtcggttgtat

SEQ ID NO: 231447 - DNA, 25 bp, SARS Virus
tgcgaataatatagtcggttgtatc

SEQ ID NO: 231448 - DNA, 25 bp, SARS Virus
gcgaataatatcatcggttgtatcc

SEQ ID NO: 231449 - DNA, 25 bp, SARS Virus
cgaataatatcgacggttgtatccg

SEQ ID NO: 231450 - DNA, 25 bp, SARS Virus
gaataatatcgtaggttgtatccgt

SEQ ID NO: 231451 - DNA, 25 bp, SARS Virus
aataatatcgtcagttgtatccgtt

SEQ ID NO: 231452 - DNA, 25 bp, SARS Virus
ataatatcgtcgattgtatccgttt

SEQ ID NO: 231453 - DNA, 25 bp, SARS Virus
taatatcgtcggatgtatccgtttg

SEQ ID NO: 231454 - DNA, 25 bp, SARS Virus
aatatcgtcggtagtatccgtttgt

SEQ ID NO: 231455 - DNA, 25 bp, SARS Virus
atatcgtcggttatatccgtttgtg

SEQ ID NO: 231456 - DNA, 25 bp, SARS Virus
tatcgtcggttgaatccgtttgtgt

SEQ ID NO: 231457 - DNA, 25 bp, SARS Virus
atcgtcggttgtatccgtttgtgtg

SEQ ID NO: 231458 - DNA, 25 bp, SARS Virus
tcgtcggttgtaaccgtttgtgtgt

SEQ ID NO: 231459 - DNA, 25 bp, SARS Virus
cgtcggttgtatacgtttgtgtgtc

SEQ ID NO: 231460 - DNA, 25 bp, SARS Virus
gtcggttgtatcagtttgtgtgtcg

SEQ ID NO: 231461 - DNA, 25 bp, SARS Virus
tcggttgtatccatttgtgtgtcgg

SEQ ID NO: 231462 - DNA, 25 bp, SARS Virus
cggttgtatccgattgtgtgtcgga

SEQ ID NO: 231463 - DNA, 25 bp, SARS Virus
ggttgtatccgtatgtgtgtcggag

SEQ ID NO: 231464 - DNA, 25 bp, SARS Virus
gttgtatccgttagtgtgtcggagg

SEQ ID NO: 231465 - DNA, 25 bp, SARS Virus
ttgtatccgtttatgtgtcggaggt

SEQ ID NO: 231466 - DNA, 25 bp, SARS Virus
tgtatccgtttgagtgtcggaggtt

SEQ ID NO: 231467 - DNA, 25 bp, SARS Virus
gtatccgtttgtatgtcggaggttt

SEQ ID NO: 231468 - DNA, 25 bp, SARS Virus
tatccgtttgtgagtcggaggtttt

SEQ ID NO: 231469 - DNA, 25 bp, SARS Virus
atccgtttgtgtatcggaggttttg

SEQ ID NO: 231470 - DNA, 25 bp, SARS Virus
tccgtttgtgtgacggaggttttgt

SEQ ID NO: 231471 - DNA, 25 bp, SARS Virus
ccgtttgtgtgtaggaggttttgta

SEQ ID NO: 231472 - DNA, 25 bp, SARS Virus
cgtttgtgtgtcagaggttttgtag

SEQ ID NO: 231473 - DNA, 25 bp, SARS Virus
gtttgtgtgtcgaaggttttgtaga

SEQ ID NO: 231474 - DNA, 25 bp, SARS Virus
tttgtgtgtcggaggttttgtagat

SEQ ID NO: 231475 - DNA, 25 bp, SARS Virus
ttgtgtgtcggaagttttgtagatc

SEQ ID NO: 231476 - DNA, 25 bp, SARS Virus
tgtgtgtcggagattttgtagatca

SEQ ID NO: 231477 - DNA, 25 bp, SARS Virus
gtgtgtcggaggatttgtagatcag

SEQ ID NO: 231478 - DNA, 25 bp, SARS Virus
tgtgtcggaggtattgtagatcagg

SEQ ID NO: 231479 - DNA, 25 bp, SARS Virus
gtgtcggaggttatgtagatcagga

SEQ ID NO: 231480 - DNA, 25 bp, SARS Virus
tgtcggaggtttagtagatcaggat

SEQ ID NO: 231481 - DNA, 25 bp, SARS Virus
gtcggaggttttatagatcaggatg

SEQ ID NO: 231482 - DNA, 25 bp, SARS Virus
tcggaggttttgaagatcaggatgg

SEQ ID NO: 231483 - DNA, 25 bp, SARS Virus
cggaggttttgtagatcaggatgga

SEQ ID NO: 231484 - DNA, 25 bp, SARS Virus
ggaggttttgtaaatcaggatggag

SEQ ID NO: 231485 - DNA, 25 bp, SARS Virus
gaggttttgtagatcaggatggagg

SEQ ID NO: 231486 - DNA, 25 bp, SARS Virus
aggttttgtagaacaggatggaggg

SEQ ID NO: 231487 - DNA, 25 bp, SARS Virus
ggttttgtagataaggatggaggga

SEQ ID NO: 231488 - DNA, 25 bp, SARS Virus
gttttgtagatcaggatggagggaa

SEQ ID NO: 231489 - DNA, 25 bp, SARS Virus
ttttgtagatcaagatggagggaac

SEQ ID NO: 231490 - DNA, 25 bp, SARS Virus
tttgtagatcagaatggagggaacg

SEQ ID NO: 231491 - DNA, 25 bp, SARS Virus
ttgtagatcaggatggagggaacgc

SEQ ID NO: 231492 - DNA, 25 bp, SARS Virus
tgtagatcaggaaggagggaacgcc

SEQ ID NO: 231493 - DNA, 25 bp, SARS Virus
gtagatcaggatagagggaacgcct

SEQ ID NO: 231494 - DNA, 25 bp, SARS Virus
tagatcaggatgaagggaacgcctc

SEQ ID NO: 231495 - DNA, 25 bp, SARS Virus
agatcaggatggagggaacgcctca

SEQ ID NO: 231496 - DNA, 25 bp, SARS Virus
gatcaggatggaaggaacgcctcag

SEQ ID NO: 231497 - DNA, 25 bp, SARS Virus
atcaggatggagagaacgcctcagc

SEQ ID NO: 231498 - DNA, 25 bp, SARS Virus
tcaggatggaggaaacgcctcagct

SEQ ID NO: 231499 - DNA, 25 bp, SARS Virus
caggatggagggaacgcctcagctc

SEQ ID NO: 231500 - DNA, 25 bp, SARS Virus
aggatggagggaacgcctcagctca

SEQ ID NO: 231501 - DNA, 25 bp, SARS Virus
ggatggagggaaagcctcagctcaa

SEQ ID NO: 231502 - DNA, 25 bp, SARS Virus
gatggagggaacacctcagctcaaa

SEQ ID NO: 231503 - DNA, 25 bp, SARS Virus
atggagggaacgactcagctcaaag

SEQ ID NO: 231504 - DNA, 25 bp, SARS Virus
tggagggaacgcatcagctcaaagt

SEQ ID NO: 231505 - DNA, 25 bp, SARS Virus
ggagggaacgccacagctcaaagtt

SEQ ID NO: 231506 - DNA, 25 bp, SARS Virus
gagggaacgcctaagctcaaagtta

SEQ ID NO: 231507 - DNA, 25 bp, SARS Virus
agggaacgcctcagctcaaagttac

SEQ ID NO: 231508 - DNA, 25 bp, SARS Virus
gggaacgcctcaactcaaagttaca

SEQ ID NO: 231509 - DNA, 25 bp, SARS Virus
ggaacgcctcagatcaaagttacaa

SEQ ID NO: 231510 - DNA, 25 bp, SARS Virus
gaacgcctcagcacaaagttacaaa

SEQ ID NO: 231511 - DNA, 25 bp, SARS Virus
aacgcctcagctaaaagttacaaac

SEQ ID NO: 231512 - DNA, 25 bp, SARS Virus
acgcctcagctcaaagttacaaact

SEQ ID NO: 231513 - DNA, 25 bp, SARS Virus
cgcctcagctcaaagttacaaactc

SEQ ID NO: 231514 - DNA, 25 bp, SARS Virus
gcctcagctcaaagttacaaactca

SEQ ID NO: 231515 - DNA, 25 bp, SARS Virus
cctcagctcaaaattacaaactcac

SEQ ID NO: 231516 - DNA, 25 bp, SARS Virus
ctcagctcaaagatacaaactcacc

SEQ ID NO: 231517 - DNA, 25 bp, SARS Virus
tcagctcaaagtaacaaactcacca

SEQ ID NO: 231518 - DNA, 25 bp, SARS Virus
cagctcaaagttacaaactcaccaa

SEQ ID NO: 231519 - DNA, 25 bp, SARS Virus
agctcaaagttaaaaactcaccaac

SEQ ID NO: 231520 - DNA, 25 bp, SARS Virus
gctcaaagttacaaactcaccaaca

SEQ ID NO: 231521 - DNA, 25 bp, SARS Virus
ctcaaagttacaaactcaccaacac

SEQ ID NO: 231522 - DNA, 25 bp, SARS Virus
tcaaagttacaaactcaccaacact

SEQ ID NO: 231523 - DNA, 25 bp, SARS Virus
caaagttacaaaatcaccaacacta

SEQ ID NO: 231524 - DNA, 25 bp, SARS Virus
aaagttacaaacacaccaacactat

SEQ ID NO: 231525 - DNA, 25 bp, SARS Virus
aagttacaaactaaccaacactatt

SEQ ID NO: 231526 - DNA, 25 bp, SARS Virus
agttacaaactcaccaacactatta

SEQ ID NO: 231527 - DNA, 25 bp, SARS Virus
gttacaaactcaacaacactattag

SEQ ID NO: 231528 - DNA, 25 bp, SARS Virus
ttacaaactcacaaacactattaga

SEQ ID NO: 231529 - DNA, 25 bp, SARS Virus
tacaaactcaccaacactattagac

SEQ ID NO: 231530 - DNA, 25 bp, SARS Virus
acaaactcaccaacactattagacg

SEQ ID NO: 231531 - DNA, 25 bp, SARS Virus
caaactcaccaaaactattagacgt

SEQ ID NO: 231532 - DNA, 25 bp, SARS Virus
aaactcaccaacactattagacgtt

SEQ ID NO: 231533 - DNA, 25 bp, SARS Virus
aactcaccaacaatattagacgttg

SEQ ID NO: 231534 - DNA, 25 bp, SARS Virus
actcaccaacacaattagacgttgt

SEQ ID NO: 231535 - DNA, 25 bp, SARS Virus
ctcaccaacactattagacgttgtg

SEQ ID NO: 231536 - DNA, 25 bp, SARS Virus
tcaccaacactaatagacgttgtga

SEQ ID NO: 231537 - DNA, 25 bp, SARS Virus
caccaacactataagacgttgtgat

SEQ ID NO: 231538 - DNA, 25 bp, SARS Virus
accaacactattagacgttgtgata

SEQ ID NO: 231539 - DNA, 25 bp, SARS Virus
ccaacactattaaacgttgtgatac

SEQ ID NO: 231540 - DNA, 25 bp, SARS Virus
caacactattagacgttgtgatacg

SEQ ID NO: 231541 - DNA, 25 bp, SARS Virus
aacactattagaagttgtgatacga

SEQ ID NO: 231542 - DNA, 25 bp, SARS Virus
acactattagacattgtgatacgag

SEQ ID NO: 231543 - DNA, 25 bp, SARS Virus
cactattagacgatgtgatacgagt

SEQ ID NO: 231544 - DNA, 25 bp, SARS Virus
actattagacgtagtgatacgagtc

SEQ ID NO: 231545 - DNA, 25 bp, SARS Virus
ctattagacgttatgatacgagtcc

SEQ ID NO: 231546 - DNA, 25 bp, SARS Virus
tattagacgttgagatacgagtcca

SEQ ID NO: 231547 - DNA, 25 bp, SARS Virus
attagacgttgtaatacgagtccag

SEQ ID NO: 231548 - DNA, 25 bp, SARS Virus
ttagacgttgtgatacgagtccagg

SEQ ID NO: 231549 - DNA, 25 bp, SARS Virus
tagacgttgtgaaacgagtccaggt

SEQ ID NO: 231550 - DNA, 25 bp, SARS Virus
agacgttgtgatacgagtccaggtt

SEQ ID NO: 231551 - DNA, 25 bp, SARS Virus
gacgttgtgataagagtccaggtta

SEQ ID NO: 231552 - DNA, 25 bp, SARS Virus
acgttgtgatacaagtccaggttag

SEQ ID NO: 231553 - DNA, 25 bp, SARS Virus
cgttgtgatacgagtccaggttaga

SEQ ID NO: 231554 - DNA, 25 bp, SARS Virus
gttgtgatacgaatccaggttagag

SEQ ID NO: 231555 - DNA, 25 bp, SARS Virus
ttgtgatacgagaccaggttagaga

SEQ ID NO: 231556 - DNA, 25 bp, SARS Virus
tgtgatacgagtacaggttagagac

SEQ ID NO: 231557 - DNA, 25 bp, SARS Virus
gtgatacgagtcaaggttagagacc

SEQ ID NO: 231558 - DNA, 25 bp, SARS Virus
tgatacgagtccaggttagagaccc

SEQ ID NO: 231559 - DNA, 25 bp, SARS Virus
gatacgagtccaagttagagaccca

SEQ ID NO: 231560 - DNA, 25 bp, SARS Virus
atacgagtccagattagagacccag

SEQ ID NO: 231561 - DNA, 25 bp, SARS Virus
tacgagtccaggatagagacccaga

SEQ ID NO: 231562 - DNA, 25 bp, SARS Virus
acgagtccaggtaagagacccagaa

SEQ ID NO: 231563 - DNA, 25 bp, SARS Virus
cgagtccaggttagagacccagaac

SEQ ID NO: 231564 - DNA, 25 bp, SARS Virus
gagtccaggttaaagacccagaact

SEQ ID NO: 231565 - DNA, 25 bp, SARS Virus
agtccaggttagagacccagaactg

SEQ ID NO: 231566 - DNA, 25 bp, SARS Virus
gtccaggttagaaacccagaactgt

SEQ ID NO: 231567 - DNA, 25 bp, SARS Virus
tccaggttagagacccagaactgtc

SEQ ID NO: 231568 - DNA, 25 bp, SARS Virus
ccaggttagagaaccagaactgtcc

SEQ ID NO: 231569 - DNA, 25 bp, SARS Virus
caggttagagacacagaactgtccg

SEQ ID NO: 231570 - DNA, 25 bp, SARS Virus
aggttagagaccaagaactgtccgt

SEQ ID NO: 231571 - DNA, 25 bp, SARS Virus
ggttagagacccagaactgtccgtc

SEQ ID NO: 231572 - DNA, 25 bp, SARS Virus
gttagagacccaaaactgtccgtcc

SEQ ID NO: 231573 - DNA, 25 bp, SARS Virus
ttagagacccagaactgtccgtcct

SEQ ID NO: 231574 - DNA, 25 bp, SARS Virus
tagagacccagaactgtccgtcctg

SEQ ID NO: 231575 - DNA, 25 bp, SARS Virus
agagacccagaaatgtccgtcctgt

SEQ ID NO: 231576 - DNA, 25 bp, SARS Virus
gagacccagaacagtccgtcctgta

SEQ ID NO: 231577 - DNA, 25 bp, SARS Virus
agacccagaactatccgtcctgtac

SEQ ID NO: 231578 - DNA, 25 bp, SARS Virus
gacccagaactgaccgtcctgtacc

SEQ ID NO: 231579 - DNA, 25 bp, SARS Virus
acccagaactgtacgtcctgtaccg

SEQ ID NO: 231580 - DNA, 25 bp, SARS Virus
cccagaactgtcagtcctgtaccgt

SEQ ID NO: 231581 - DNA, 25 bp, SARS Virus
ccagaactgtccatcctgtaccgta

SEQ ID NO: 231582 - DNA, 25 bp, SARS Virus
cagaactgtccgacctgtaccgtaa

SEQ ID NO: 231583 - DNA, 25 bp, SARS Virus
agaactgtccgtactgtaccgtaaa

SEQ ID NO: 231584 - DNA, 25 bp, SARS Virus
gaactgtccgtcatgtaccgtaaaa

SEQ ID NO: 231585 - DNA, 25 bp, SARS Virus
aactgtccgtccagtaccgtaaaag

SEQ ID NO: 231586 - DNA, 25 bp, SARS Virus
actgtccgtcctataccgtaaaagt

SEQ ID NO: 231587 - DNA, 25 bp, SARS Virus
ctgtccgtcctgaaccgtaaaagtg

SEQ ID NO: 231588 - DNA, 25 bp, SARS Virus
tgtccgtcctgtaccgtaaaagtga

SEQ ID NO: 231589 - DNA, 25 bp, SARS Virus
gtccgtcctgtaacgtaaaagtgat

SEQ ID NO: 231590 - DNA, 25 bp, SARS Virus
tccgtcctgtacagtaaaagtgatg

SEQ ID NO: 231591 - DNA, 25 bp, SARS Virus
ccgtcctgtaccataaaagtgatgt

SEQ ID NO: 231592 - DNA, 25 bp, SARS Virus
cgtcctgtaccgaaaaagtgatgtc

SEQ ID NO: 231593 - DNA, 25 bp, SARS Virus
gtcctgtaccgtaaaagtgatgtcg

SEQ ID NO: 231594 - DNA, 25 bp, SARS Virus
tcctgtaccgtaaaagtgatgtcgt

SEQ ID NO: 231595 - DNA, 25 bp, SARS Virus
cctgtaccgtaaaagtgatgtcgta

SEQ ID NO: 231596 - DNA, 25 bp, SARS Virus
ctgtaccgtaaaagtgatgtcgtaa

SEQ ID NO: 231597 - DNA, 25 bp, SARS Virus
tgtaccgtaaaaatgatgtcgtaat

SEQ ID NO: 231598 - DNA, 25 bp, SARS Virus
gtaccgtaaaagagatgtcgtaatc

SEQ ID NO: 231599 - DNA, 25 bp, SARS Virus
taccgtaaaagtaatgtcgtaatca

SEQ ID NO: 231600 - DNA, 25 bp, SARS Virus
accgtaaaagtgatgtcgtaatcat

SEQ ID NO: 231601 - DNA, 25 bp, SARS Virus
ccgtaaaagtgaagtcgtaatcatc

SEQ ID NO: 231602 - DNA, 25 bp, SARS Virus
cgtaaaagtgatatcgtaatcatcc

SEQ ID NO: 231603 - DNA, 25 bp, SARS Virus
gtaaaagtgatgacgtaatcatcca

SEQ ID NO: 231604 - DNA, 25 bp, SARS Virus
taaaagtgatgtagtaatcatccat

SEQ ID NO: 231605 - DNA, 25 bp, SARS Virus
aaaagtgatgtcataatcatccatc

SEQ ID NO: 231606 - DNA, 25 bp, SARS Virus
aaagtgatgtcgaaatcatccatcc

SEQ ID NO: 231607 - DNA, 25 bp, SARS Virus
aagtgatgtcgtaatcatccatcca

SEQ ID NO: 231608 - DNA, 25 bp, SARS Virus
agtgatgtcgtaatcatccatccat

SEQ ID NO: 231609 - DNA, 25 bp, SARS Virus
gtgatgtcgtaaacatccatccatg

SEQ ID NO: 231610 - DNA, 25 bp, SARS Virus
tgatgtcgtaataatccatccatgg

SEQ ID NO: 231611 - DNA, 25 bp, SARS Virus
gatgtcgtaatcatccatccatggg

SEQ ID NO: 231612 - DNA, 25 bp, SARS Virus
atgtcgtaatcaaccatccatgggt

SEQ ID NO: 231613 - DNA, 25 bp, SARS Virus
tgtcgtaatcatacatccatgggtg

SEQ ID NO: 231614 - DNA, 25 bp, SARS Virus
gtcgtaatcatcaatccatgggtgt

SEQ ID NO: 231615 - DNA, 25 bp, SARS Virus
tcgtaatcatccatccatgggtgta

SEQ ID NO: 231616 - DNA, 25 bp, SARS Virus
cgtaatcatccaaccatgggtgtac

SEQ ID NO: 231617 - DNA, 25 bp, SARS Virus
gtaatcatccatacatgggtgtaca

SEQ ID NO: 231618 - DNA, 25 bp, SARS Virus
taatcatccatcaatgggtgtacat

SEQ ID NO: 231619 - DNA, 25 bp, SARS Virus
aatcatccatccatgggtgtacatc

SEQ ID NO: 231620 - DNA, 25 bp, SARS Virus
atcatccatccaagggtgtacatca

SEQ ID NO: 231621 - DNA, 25 bp, SARS Virus
tcatccatccataggtgtacatcat

SEQ ID NO: 231622 - DNA, 25 bp, SARS Virus
catccatccatgagtgtacatcatc

SEQ ID NO: 231623 - DNA, 25 bp, SARS Virus
atccatccatggatgtacatcatcc

SEQ ID NO: 231624 - DNA, 25 bp, SARS Virus
tccatccatgggagtacatcatcca

SEQ ID NO: 231625 - DNA, 25 bp, SARS Virus
ccatccatgggtatacatcatccag

SEQ ID NO: 231626 - DNA, 25 bp, SARS Virus
catccatgggtgaacatcatccagg

SEQ ID NO: 231627 - DNA, 25 bp, SARS Virus
atccatgggtgtacatcatccagga

SEQ ID NO: 231628 - DNA, 25 bp, SARS Virus
tccatgggtgtaaatcatccaggaa

SEQ ID NO: 231629 - DNA, 25 bp, SARS Virus
ccatgggtgtacatcatccaggaag

SEQ ID NO: 231630 - DNA, 25 bp, SARS Virus
catgggtgtacaacatccaggaagt

SEQ ID NO: 231631 - DNA, 25 bp, SARS Virus
atgggtgtacataatccaggaagtt

SEQ ID NO: 231632 - DNA, 25 bp, SARS Virus
tgggtgtacatcatccaggaagtta

SEQ ID NO: 231633 - DNA, 25 bp, SARS Virus
gggtgtacatcaaccaggaagttat

SEQ ID NO: 231634 - DNA, 25 bp, SARS Virus
ggtgtacatcatacaggaagttatt

SEQ ID NO: 231635 - DNA, 25 bp, SARS Virus
gtgtacatcatcaaggaagttattg

SEQ ID NO: 231636 - DNA, 25 bp, SARS Virus
tgtacatcatccaggaagttattga

SEQ ID NO: 231637 - DNA, 25 bp, SARS Virus
gtacatcatccaagaagttattgat

SEQ ID NO: 231638 - DNA, 25 bp, SARS Virus
tacatcatccagaaagttattgatt

SEQ ID NO: 231639 - DNA, 25 bp, SARS Virus
acatcatccaggaagttattgattt

SEQ ID NO: 231640 - DNA, 25 bp, SARS Virus
catcatccaggaagttattgattta

SEQ ID NO: 231641 - DNA, 25 bp, SARS Virus
atcatccaggaaattattgatttaa

SEQ ID NO: 231642 - DNA, 25 bp, SARS Virus
tcatccaggaagatattgatttaaa

SEQ ID NO: 231643 - DNA, 25 bp, SARS Virus
catccaggaagtaattgatttaaaa

SEQ ID NO: 231644 - DNA, 25 bp, SARS Virus
atccaggaagttattgatttaaaag

SEQ ID NO: 231645 - DNA, 25 bp, SARS Virus
tccaggaagttaatgatttaaaagt

SEQ ID NO: 231646 - DNA, 25 bp, SARS Virus
ccaggaagttatagatttaaaagtc

SEQ ID NO: 231647 - DNA, 25 bp, SARS Virus
caggaagttattaatttaaaagtca

SEQ ID NO: 231648 - DNA, 25 bp, SARS Virus
aggaagttattgatttaaaagtcac

SEQ ID NO: 231649 - DNA, 25 bp, SARS Virus
ggaagttattgaattaaaagtcacg

SEQ ID NO: 231650 - DNA, 25 bp, SARS Virus
gaagttattgatataaaagtcacgg

SEQ ID NO: 231651 - DNA, 25 bp, SARS Virus
aagttattgattaaaaagtcacggt

SEQ ID NO: 231652 - DNA, 25 bp, SARS Virus
agttattgatttaaaagtcacggtg

SEQ ID NO: 231653 - DNA, 25 bp, SARS Virus
gttattgatttaaaagtcacggtgt

SEQ ID NO: 231654 - DNA, 25 bp, SARS Virus
ttattgatttaaaagtcacggtgtt

SEQ ID NO: 231655 - DNA, 25 bp, SARS Virus
tattgatttaaaagtcacggtgtta

SEQ ID NO: 231656 - DNA, 25 bp, SARS Virus
attgatttaaaaatcacggtgttac

SEQ ID NO: 231657 - DNA, 25 bp, SARS Virus
ttgatttaaaagacacggtgttaca

SEQ ID NO: 231658 - DNA, 25 bp, SARS Virus
tgatttaaaagtaacggtgttacaa

SEQ ID NO: 231659 - DNA, 25 bp, SARS Virus
gatttaaaagtcacggtgttacaag

SEQ ID NO: 231660 - DNA, 25 bp, SARS Virus
atttaaaagtcaaggtgttacaagt

SEQ ID NO: 231661 - DNA, 25 bp, SARS Virus
tttaaaagtcacagtgttacaagtg

SEQ ID NO: 231662 - DNA, 25 bp, SARS Virus
ttaaaagtcacgatgttacaagtgt

SEQ ID NO: 231663 - DNA, 25 bp, SARS Virus
taaaagtcacggagttacaagtgtt

SEQ ID NO: 231664 - DNA, 25 bp, SARS Virus
aaaagtcacggtattacaagtgttc

SEQ ID NO: 231665 - DNA, 25 bp, SARS Virus
aaagtcacggtgatacaagtgttca

SEQ ID NO: 231666 - DNA, 25 bp, SARS Virus
aagtcacggtgtaacaagtgttcac

SEQ ID NO: 231667 - DNA, 25 bp, SARS Virus
agtcacggtgttacaagtgttcacc

SEQ ID NO: 231668 - DNA, 25 bp, SARS Virus
gtcacggtgttaaaagtgttcaccg

SEQ ID NO: 231669 - DNA, 25 bp, SARS Virus
tcacggtgttacaagtgttcaccga

SEQ ID NO: 231670 - DNA, 25 bp, SARS Virus
cacggtgttacaagtgttcaccgaa

SEQ ID NO: 231671 - DNA, 25 bp, SARS Virus
acggtgttacaaatgttcaccgaaa

SEQ ID NO: 231672 - DNA, 25 bp, SARS Virus
cggtgttacaagagttcaccgaaag

SEQ ID NO: 231673 - DNA, 25 bp, SARS Virus
ggtgttacaagtattcaccgaaagt

SEQ ID NO: 231674 - DNA, 25 bp, SARS Virus
gtgttacaagtgatcaccgaaagtc

SEQ ID NO: 231675 - DNA, 25 bp, SARS Virus
tgttacaagtgtacaccgaaagtct

SEQ ID NO: 231676 - DNA, 25 bp, SARS Virus
gttacaagtgttaaccgaaagtctt

SEQ ID NO: 231677 - DNA, 25 bp, SARS Virus
ttacaagtgttcaccgaaagtcttt

SEQ ID NO: 231678 - DNA, 25 bp, SARS Virus
tacaagtgttcaacgaaagtctttc

SEQ ID NO: 231679 - DNA, 25 bp, SARS Virus
acaagtgttcacagaaagtctttca

SEQ ID NO: 231680 - DNA, 25 bp, SARS Virus
caagtgttcaccaaaagtctttcag

SEQ ID NO: 231681 - DNA, 25 bp, SARS Virus
aagtgttcaccgaaagtctttcagc

SEQ ID NO: 231682 - DNA, 25 bp, SARS Virus
agtgttcaccgaaagtctttcagcg

SEQ ID NO: 231683 - DNA, 25 bp, SARS Virus
gtgttcaccgaaagtctttcagcgt

SEQ ID NO: 231684 - DNA, 25 bp, SARS Virus
tgttcaccgaaaatctttcagcgtg

SEQ ID NO: 231685 - DNA, 25 bp, SARS Virus
gttcaccgaaagactttcagcgtgc

SEQ ID NO: 231686 - DNA, 25 bp, SARS Virus
ttcaccgaaagtatttcagcgtgca

SEQ ID NO: 231687 - DNA, 25 bp, SARS Virus
tcaccgaaagtcattcagcgtgcag

SEQ ID NO: 231688 - DNA, 25 bp, SARS Virus
caccgaaagtctatcagcgtgcaga

SEQ ID NO: 231689 - DNA, 25 bp, SARS Virus
accgaaagtcttacagcgtgcagac

SEQ ID NO: 231690 - DNA, 25 bp, SARS Virus
ccgaaagtctttaagcgtgcagacg

SEQ ID NO: 231691 - DNA, 25 bp, SARS Virus
cgaaagtctttcagcgtgcagacgg

SEQ ID NO: 231692 - DNA, 25 bp, SARS Virus
gaaagtctttcaacgtgcagacggt

SEQ ID NO: 231693 - DNA, 25 bp, SARS Virus
aaagtctttcagagtgcagacggta

SEQ ID NO: 231694 - DNA, 25 bp, SARS Virus
aagtctttcagcatgcagacggtac

SEQ ID NO: 231695 - DNA, 25 bp, SARS Virus
agtctttcagcgagcagacggtact

SEQ ID NO: 231696 - DNA, 25 bp, SARS Virus
gtctttcagcgtacagacggtactt

SEQ ID NO: 231697 - DNA, 25 bp, SARS Virus
tctttcagcgtgaagacggtacttt

SEQ ID NO: 231698 - DNA, 25 bp, SARS Virus
ctttcagcgtgcagacggtactttg

SEQ ID NO: 231699 - DNA, 25 bp, SARS Virus
tttcagcgtgcaaacggtactttga

SEQ ID NO: 231700 - DNA, 25 bp, SARS Virus
ttcagcgtgcagacggtactttgaa

SEQ ID NO: 231701 - DNA, 25 bp, SARS Virus
tcagcgtgcagaaggtactttgaag

SEQ ID NO: 231702 - DNA, 25 bp, SARS Virus
cagcgtgcagacagtactttgaagt

SEQ ID NO: 231703 - DNA, 25 bp, SARS Virus
agcgtgcagacgatactttgaagta

SEQ ID NO: 231704 - DNA, 25 bp, SARS Virus
gcgtgcagacggaactttgaagtag

SEQ ID NO: 231705 - DNA, 25 bp, SARS Virus
cgtgcagacggtactttgaagtagc

SEQ ID NO: 231706 - DNA, 25 bp, SARS Virus
gtgcagacggtaatttgaagtagcg

SEQ ID NO: 231707 - DNA, 25 bp, SARS Virus
tgcagacggtacattgaagtagcgt

SEQ ID NO: 231708 - DNA, 25 bp, SARS Virus
gcagacggtactatgaagtagcgtt

SEQ ID NO: 231709 - DNA, 25 bp, SARS Virus
cagacggtacttagaagtagcgtta

SEQ ID NO: 231710 - DNA, 25 bp, SARS Virus
agacggtactttaaagtagcgttac

SEQ ID NO: 231711 - DNA, 25 bp, SARS Virus
gacggtactttgaagtagcgttact

SEQ ID NO: 231712 - DNA, 25 bp, SARS Virus
acggtactttgaagtagcgttacta

SEQ ID NO: 231713 - DNA, 25 bp, SARS Virus
cggtactttgaaatagcgttactaa

SEQ ID NO: 231714 - DNA, 25 bp, SARS Virus
ggtactttgaagaagcgttactaat

SEQ ID NO: 231715 - DNA, 25 bp, SARS Virus
gtactttgaagtagcgttactaatg

SEQ ID NO: 231716 - DNA, 25 bp, SARS Virus
tactttgaagtaacgttactaatgt

SEQ ID NO: 231717 - DNA, 25 bp, SARS Virus
actttgaagtagagttactaatgta

SEQ ID NO: 231718 - DNA, 25 bp, SARS Virus
ctttgaagtagcattactaatgtaa

SEQ ID NO: 231719 - DNA, 25 bp, SARS Virus
tttgaagtagcgatactaatgtaaa

SEQ ID NO: 231720 - DNA, 25 bp, SARS Virus
ttgaagtagcgtaactaatgtaaag

SEQ ID NO: 231721 - DNA, 25 bp, SARS Virus
tgaagtagcgttactaatgtaaagt

SEQ ID NO: 231722 - DNA, 25 bp, SARS Virus
gaagtagcgttaataatgtaaagta

SEQ ID NO: 231723 - DNA, 25 bp, SARS Virus
aagtagcgttacaaatgtaaagtag

SEQ ID NO: 231724 - DNA, 25 bp, SARS Virus
agtagcgttactaatgtaaagtagt

SEQ ID NO: 231725 - DNA, 25 bp, SARS Virus
gtagcgttactaatgtaaagtagtt

SEQ ID NO: 231726 - DNA, 25 bp, SARS Virus
tagcgttactaaagtaaagtagttc

SEQ ID NO: 231727 - DNA, 25 bp, SARS Virus
agcgttactaatataaagtagttcc

SEQ ID NO: 231728 - DNA, 25 bp, SARS Virus
gcgttactaatgaaaagtagttcca

SEQ ID NO: 231729 - DNA, 25 bp, SARS Virus
cgttactaatgtaaagtagttccat

SEQ ID NO: 231730 - DNA, 25 bp, SARS Virus
gttactaatgtaaagtagttccatc

SEQ ID NO: 231731 - DNA, 25 bp, SARS Virus
ttactaatgtaaagtagttccatct

SEQ ID NO: 231732 - DNA, 25 bp, SARS Virus
tactaatgtaaaatagttccatctg

SEQ ID NO: 231733 - DNA, 25 bp, SARS Virus
actaatgtaaagaagttccatctgt

SEQ ID NO: 231734 - DNA, 25 bp, SARS Virus
ctaatgtaaagtagttccatctgtt

SEQ ID NO: 231735 - DNA, 25 bp, SARS Virus
taatgtaaagtaattccatctgttc

SEQ ID NO: 231736 - DNA, 25 bp, SARS Virus
aatgtaaagtagatccatctgttca

SEQ ID NO: 231737 - DNA, 25 bp, SARS Virus
atgtaaagtagtaccatctgttcac

SEQ ID NO: 231738 - DNA, 25 bp, SARS Virus
tgtaaagtagttacatctgttcacg

SEQ ID NO: 231739 - DNA, 25 bp, SARS Virus
gtaaagtagttcaatctgttcacgt

SEQ ID NO: 231740 - DNA, 25 bp, SARS Virus
taaagtagttccatctgttcacgta

SEQ ID NO: 231741 - DNA, 25 bp, SARS Virus
aaagtagttccaactgttcacgtat

SEQ ID NO: 231742 - DNA, 25 bp, SARS Virus
aagtagttccatatgttcacgtata

SEQ ID NO: 231743 - DNA, 25 bp, SARS Virus
agtagttccatcagttcacgtataa

SEQ ID NO: 231744 - DNA, 25 bp, SARS Virus
gtagttccatctattcacgtataac

SEQ ID NO: 231745 - DNA, 25 bp, SARS Virus
tagttccatctgatcacgtataaca

SEQ ID NO: 231746 - DNA, 25 bp, SARS Virus
agttccatctgtacacgtataacaa

SEQ ID NO: 231747 - DNA, 25 bp, SARS Virus
gttccatctgttaacgtataacaat

SEQ ID NO: 231748 - DNA, 25 bp, SARS Virus
ttccatctgttcacgtataacaatg

SEQ ID NO: 231749 - DNA, 25 bp, SARS Virus
tccatctgttcaagtataacaatgt

SEQ ID NO: 231750 - DNA, 25 bp, SARS Virus
ccatctgttcacatataacaatgtg

SEQ ID NO: 231751 - DNA, 25 bp, SARS Virus
catctgttcacgaataacaatgtga

SEQ ID NO: 231752 - DNA, 25 bp, SARS Virus
atctgttcacgtataacaatgtgag

SEQ ID NO: 231753 - DNA, 25 bp, SARS Virus
tctgttcacgtaaaacaatgtgagg

SEQ ID NO: 231754 - DNA, 25 bp, SARS Virus
ctgttcacgtataacaatgtgagga

SEQ ID NO: 231755 - DNA, 25 bp, SARS Virus
tgttcacgtataacaatgtgaggac

SEQ ID NO: 231756 - DNA, 25 bp, SARS Virus
gttcacgtataaaaatgtgaggaca

SEQ ID NO: 231757 - DNA, 25 bp, SARS Virus
ttcacgtataacaatgtgaggacac

SEQ ID NO: 231758 - DNA, 25 bp, SARS Virus
tcacgtataacaatgtgaggacacc

SEQ ID NO: 231759 - DNA, 25 bp, SARS Virus
cacgtataacaaagtgaggacacct

SEQ ID NO: 231760 - DNA, 25 bp, SARS Virus
acgtataacaatatgaggacacctc

SEQ ID NO: 231761 - DNA, 25 bp, SARS Virus
cgtataacaatgagaggacacctct

SEQ ID NO: 231762 - DNA, 25 bp, SARS Virus
gtataacaatgtaaggacacctcta

SEQ ID NO: 231763 - DNA, 25 bp, SARS Virus
tataacaatgtgaggacacctctac

SEQ ID NO: 231764 - DNA, 25 bp, SARS Virus
ataacaatgtgaagacacctctacg

SEQ ID NO: 231765 - DNA, 25 bp, SARS Virus
taacaatgtgagaacacctctacgt

SEQ ID NO: 231766 - DNA, 25 bp, SARS Virus
aacaatgtgaggacacctctacgtt

SEQ ID NO: 231767 - DNA, 25 bp, SARS Virus
acaatgtgaggaaacctctacgttg

SEQ ID NO: 231768 - DNA, 25 bp, SARS Virus
caatgtgaggacacctctacgttgt

SEQ ID NO: 231769 - DNA, 25 bp, SARS Virus
aatgtgaggacaactctacgttgtc

SEQ ID NO: 231770 - DNA, 25 bp, SARS Virus
atgtgaggacacatctacgttgtcc

SEQ ID NO: 231771 - DNA, 25 bp, SARS Virus
tgtgaggacaccactacgttgtccc

SEQ ID NO: 231772 - DNA, 25 bp, SARS Virus
gtgaggacacctatacgttgtccca

SEQ ID NO: 231773 - DNA, 25 bp, SARS Virus
tgaggacacctcaacgttgtcccat

SEQ ID NO: 231774 - DNA, 25 bp, SARS Virus
gaggacacctctacgttgtcccatg

SEQ ID NO: 231775 - DNA, 25 bp, SARS Virus
aggacacctctaagttgtcccatgt

SEQ ID NO: 231776 - DNA, 25 bp, SARS Virus
ggacacctctacattgtcccatgtg

SEQ ID NO: 231777 - DNA, 25 bp, SARS Virus
gacacctctacgatgtcccatgtgt

SEQ ID NO: 231778 - DNA, 25 bp, SARS Virus
acacctctacgtagtcccatgtgtc

SEQ ID NO: 231779 - DNA, 25 bp, SARS Virus
cacctctacgttatcccatgtgtct

SEQ ID NO: 231780 - DNA, 25 bp, SARS Virus
acctctacgttgacccatgtgtctc

SEQ ID NO: 231781 - DNA, 25 bp, SARS Virus
cctctacgttgtaccatgtgtctcg

SEQ ID NO: 231782 - DNA, 25 bp, SARS Virus
ctctacgttgtcacatgtgtctcgc

SEQ ID NO: 231783 - DNA, 25 bp, SARS Virus
tctacgttgtccaatgtgtctcgca

SEQ ID NO: 231784 - DNA, 25 bp, SARS Virus
ctacgttgtcccatgtgtctcgcat

SEQ ID NO: 231785 - DNA, 25 bp, SARS Virus
tacgttgtcccaagtgtctcgcata

SEQ ID NO: 231786 - DNA, 25 bp, SARS Virus
acgttgtcccatatgtctcgcatat

SEQ ID NO: 231787 - DNA, 25 bp, SARS Virus
cgttgtcccatgagtctcgcatatg

SEQ ID NO: 231788 - DNA, 25 bp, SARS Virus
gttgtcccatgtatctcgcatatgc

SEQ ID NO: 231789 - DNA, 25 bp, SARS Virus
ttgtcccatgtgactcgcatatgcg

SEQ ID NO: 231790 - DNA, 25 bp, SARS Virus
tgtcccatgtgtatcgcatatgcgg

SEQ ID NO: 231791 - DNA, 25 bp, SARS Virus
gtcccatgtgtcacgcatatgcggg

SEQ ID NO: 231792 - DNA, 25 bp, SARS Virus
tcccatgtgtctagcatatgcgggg

SEQ ID NO: 231793 - DNA, 25 bp, SARS Virus
cccatgtgtctcacatatgcggggt

SEQ ID NO: 231794 - DNA, 25 bp, SARS Virus
ccatgtgtctcgaatatgcggggta

SEQ ID NO: 231795 - DNA, 25 bp, SARS Virus
catgtgtctcgcatatgcggggtac

SEQ ID NO: 231796 - DNA, 25 bp, SARS Virus
atgtgtctcgcaaatgcggggtact

SEQ ID NO: 231797 - DNA, 25 bp, SARS Virus
tgtgtctcgcatatgcggggtactt

SEQ ID NO: 231798 - DNA, 25 bp, SARS Virus
gtgtctcgcataagcggggtacttt

SEQ ID NO: 231799 - DNA, 25 bp, SARS Virus
tgtctcgcatatacggggtactttg

SEQ ID NO: 231800 - DNA, 25 bp, SARS Virus
gtctcgcatatgaggggtactttgg

SEQ ID NO: 231801 - DNA, 25 bp, SARS Virus
tctcgcatatgcagggtactttggg

SEQ ID NO: 231802 - DNA, 25 bp, SARS Virus
ctcgcatatgcgaggtactttggga

SEQ ID NO: 231803 - DNA, 25 bp, SARS Virus
tcgcatatgcggagtactttgggag

SEQ ID NO: 231804 - DNA, 25 bp, SARS Virus
cgcatatgcgggatactttgggagt

SEQ ID NO: 231805 - DNA, 25 bp, SARS Virus
gcatatgcggggaactttgggagtc

SEQ ID NO: 231806 - DNA, 25 bp, SARS Virus
catatgcggggtactttgggagtca

SEQ ID NO: 231807 - DNA, 25 bp, SARS Virus
atatgcggggtaatttgggagtcag

SEQ ID NO: 231808 - DNA, 25 bp, SARS Virus
tatgcggggtacattgggagtcaga

SEQ ID NO: 231809 - DNA, 25 bp, SARS Virus
atgcggggtactatgggagtcagaa

SEQ ID NO: 231810 - DNA, 25 bp, SARS Virus
tgcggggtacttagggagtcagaaa

SEQ ID NO: 231811 - DNA, 25 bp, SARS Virus
gcggggtactttaggagtcagaaaa

SEQ ID NO: 231812 - DNA, 25 bp, SARS Virus
cggggtactttgagagtcagaaaaa

SEQ ID NO: 231813 - DNA, 25 bp, SARS Virus
ggggtactttggaagtcagaaaaag

SEQ ID NO: 231814 - DNA, 25 bp, SARS Virus
gggtactttgggagtcagaaaaaga

SEQ ID NO: 231815 - DNA, 25 bp, SARS Virus
ggtactttgggaatcagaaaaagaa

SEQ ID NO: 231816 - DNA, 25 bp, SARS Virus
gtactttgggagacagaaaaagaaa

SEQ ID NO: 231817 - DNA, 25 bp, SARS Virus
tactttgggagtaagaaaaagaaaa

SEQ ID NO: 231818 - DNA, 25 bp, SARS Virus
actttgggagtcagaaaaagaaaag

SEQ ID NO: 231819 - DNA, 25 bp, SARS Virus
ctttgggagtcaaaaaaagaaaagt

SEQ ID NO: 231820 - DNA, 25 bp, SARS Virus
tttgggagtcagaaaaagaaaagtt

SEQ ID NO: 231821 - DNA, 25 bp, SARS Virus
ttgggagtcagaaaaagaaaagttg

SEQ ID NO: 231822 - DNA, 25 bp, SARS Virus
tgggagtcagaaaaagaaaagttgt

SEQ ID NO: 231823 - DNA, 25 bp, SARS Virus
gggagtcagaaaaagaaaagttgtg

SEQ ID NO: 231824 - DNA, 25 bp, SARS Virus
ggagtcagaaaaagaaaagttgtgc

SEQ ID NO: 231825 - DNA, 25 bp, SARS Virus
gagtcagaaaaaaaaaagttgtgca

SEQ ID NO: 231826 - DNA, 25 bp, SARS Virus
agtcagaaaaagaaaagttgtgcac

SEQ ID NO: 231827 - DNA, 25 bp, SARS Virus
gtcagaaaaagaaaagttgtgcacc

SEQ ID NO: 231828 - DNA, 25 bp, SARS Virus
tcagaaaaagaaaagttgtgcacca

SEQ ID NO: 231829 - DNA, 25 bp, SARS Virus
cagaaaaagaaaagttgtgcaccaa

SEQ ID NO: 231830 - DNA, 25 bp, SARS Virus
agaaaaagaaaaattgtgcaccaac

SEQ ID NO: 231831 - DNA, 25 bp, SARS Virus
gaaaaagaaaagatgtgcaccaact

SEQ ID NO: 231832 - DNA, 25 bp, SARS Virus
aaaaagaaaagtagtgcaccaactt

SEQ ID NO: 231833 - DNA, 25 bp, SARS Virus
gtcatagagttcctctaggagtaag

SEQ ID NO: 231834 - DNA, 25 bp, SARS Virus
tcatagagttcccctaggagtaagt

SEQ ID NO: 231835 - DNA, 25 bp, SARS Virus
catagagttcctctaggagtaagtt

SEQ ID NO: 231836 - DNA, 25 bp, SARS Virus
atagagttcctccaggagtaagttc

SEQ ID NO: 231837 - DNA, 25 bp, SARS Virus
tagagttcctctcggagtaagttcc

SEQ ID NO: 231838 - DNA, 25 bp, SARS Virus
agagttcctctacgagtaagttcca

SEQ ID NO: 231839 - DNA, 25 bp, SARS Virus
gagttcctctagcagtaagttccag

SEQ ID NO: 231840 - DNA, 25 bp, SARS Virus
agttcctctaggcgtaagttccaga

SEQ ID NO: 231841 - DNA, 25 bp, SARS Virus
gttcctctaggactaagttccagag

SEQ ID NO: 231842 - DNA, 25 bp, SARS Virus
ttcctctaggagcaagttccagagg

SEQ ID NO: 231843 - DNA, 25 bp, SARS Virus
tcctctaggagtcagttccagaggt

SEQ ID NO: 231844 - DNA, 25 bp, SARS Virus
cctctaggagtacgttccagaggtg

SEQ ID NO: 231845 - DNA, 25 bp, SARS Virus
ctctaggagtaacttccagaggtgt

SEQ ID NO: 231846 - DNA, 25 bp, SARS Virus
tctaggagtaagctccagaggtgta

SEQ ID NO: 231847 - DNA, 25 bp, SARS Virus
ctaggagtaagtcccagaggtgtaa

SEQ ID NO: 231848 - DNA, 25 bp, SARS Virus
taggagtaagttccagaggtgtaac

SEQ ID NO: 231849 - DNA, 25 bp, SARS Virus
aggagtaagttccagaggtgtaaca

SEQ ID NO: 231850 - DNA, 25 bp, SARS Virus
ggagtaagttcccgaggtgtaacag

SEQ ID NO: 231851 - DNA, 25 bp, SARS Virus
gagtaagttccacaggtgtaacagt

SEQ ID NO: 231852 - DNA, 25 bp, SARS Virus
agtaagttccagcggtgtaacagtg

SEQ ID NO: 231853 - DNA, 25 bp, SARS Virus
gtaagttccagacgtgtaacagtgg

SEQ ID NO: 231854 - DNA, 25 bp, SARS Virus
taagttccagagctgtaacagtggt

SEQ ID NO: 231855 - DNA, 25 bp, SARS Virus
aagttccagaggcgtaacagtggtc

SEQ ID NO: 231856 - DNA, 25 bp, SARS Virus
agttccagaggtctaacagtggtca

SEQ ID NO: 231857 - DNA, 25 bp, SARS Virus
gttccagaggtgcaacagtggtcat

SEQ ID NO: 231858 - DNA, 25 bp, SARS Virus
ttccagaggtgtcacagtggtcatt

SEQ ID NO: 231859 - DNA, 25 bp, SARS Virus
tccagaggtgtaccagtggtcatta

SEQ ID NO: 231860 - DNA, 25 bp, SARS Virus
ccagaggtgtaacagtggtcattac

SEQ ID NO: 231861 - DNA, 25 bp, SARS Virus
cagaggtgtaaccgtggtcattacg

SEQ ID NO: 231862 - DNA, 25 bp, SARS Virus
agaggtgtaacactggtcattacgg

SEQ ID NO: 231863 - DNA, 25 bp, SARS Virus
gaggtgtaacagcggtcattacggt

SEQ ID NO: 231864 - DNA, 25 bp, SARS Virus
aggtgtaacagtcgtcattacggtc

SEQ ID NO: 231865 - DNA, 25 bp, SARS Virus
ggtgtaacagtgctcattacggtca

SEQ ID NO: 231866 - DNA, 25 bp, SARS Virus
gtgtaacagtggccattacggtcat

SEQ ID NO: 231867 - DNA, 25 bp, SARS Virus
tgtaacagtggtcattacggtcata

SEQ ID NO: 231868 - DNA, 25 bp, SARS Virus
gtaacagtggtccttacggtcatac

SEQ ID NO: 231869 - DNA, 25 bp, SARS Virus
taacagtggtcactacggtcatacc

SEQ ID NO: 231870 - DNA, 25 bp, SARS Virus
aacagtggtcatcacggtcataccg

SEQ ID NO: 231871 - DNA, 25 bp, SARS Virus
acagtggtcattccggtcataccgg

SEQ ID NO: 231872 - DNA, 25 bp, SARS Virus
cagtggtcattacggtcataccgga

SEQ ID NO: 231873 - DNA, 25 bp, SARS Virus
agtggtcattaccgtcataccggac

SEQ ID NO: 231874 - DNA, 25 bp, SARS Virus
gtggtcattacgctcataccggact

SEQ ID NO: 231875 - DNA, 25 bp, SARS Virus
tggtcattacggccataccggactc

SEQ ID NO: 231876 - DNA, 25 bp, SARS Virus
ggtcattacggtcataccggactcg

SEQ ID NO: 231877 - DNA, 25 bp, SARS Virus
gtcattacggtcctaccggactcgg

SEQ ID NO: 231878 - DNA, 25 bp, SARS Virus
tcattacggtcacaccggactcggt

SEQ ID NO: 231879 - DNA, 25 bp, SARS Virus
cattacggtcatcccggactcggtt

SEQ ID NO: 231880 - DNA, 25 bp, SARS Virus
attacggtcataccggactcggtta

SEQ ID NO: 231881 - DNA, 25 bp, SARS Virus
ttacggtcataccggactcggttat

SEQ ID NO: 231882 - DNA, 25 bp, SARS Virus
tacggtcatacccgactcggttata

SEQ ID NO: 231883 - DNA, 25 bp, SARS Virus
acggtcataccgcactcggttatag

SEQ ID NO: 231884 - DNA, 25 bp, SARS Virus
cggtcataccggcctcggttatagt

SEQ ID NO: 231885 - DNA, 25 bp, SARS Virus
ggtcataccggactcggttatagtc

SEQ ID NO: 231886 - DNA, 25 bp, SARS Virus
gtcataccggacccggttatagtcg

SEQ ID NO: 231887 - DNA, 25 bp, SARS Virus
tcataccggactcggttatagtcgt

SEQ ID NO: 231888 - DNA, 25 bp, SARS Virus
cataccggactccgttatagtcgtg

SEQ ID NO: 231889 - DNA, 25 bp, SARS Virus
ataccggactcgcttatagtcgtga

SEQ ID NO: 231890 - DNA, 25 bp, SARS Virus
taccggactcggctatagtcgtgat

SEQ ID NO: 231891 - DNA, 25 bp, SARS Virus
accggactcggtcatagtcgtgatc

SEQ ID NO: 231892 - DNA, 25 bp, SARS Virus
ccggactcggttctagtcgtgatcg

SEQ ID NO: 231893 - DNA, 25 bp, SARS Virus
cggactcggttacagtcgtgatcgt

SEQ ID NO: 231894 - DNA, 25 bp, SARS Virus
ggactcggttatcgtcgtgatcgtg

SEQ ID NO: 231895 - DNA, 25 bp, SARS Virus
gactcggttatactcgtgatcgtgc

SEQ ID NO: 231896 - DNA, 25 bp, SARS Virus
actcggttatagccgtgatcgtgct

SEQ ID NO: 231897 - DNA, 25 bp, SARS Virus
ctcggttatagtcgtgatcgtgctc

SEQ ID NO: 231898 - DNA, 25 bp, SARS Virus
tcggttatagtcctgatcgtgctcc

SEQ ID NO: 231899 - DNA, 25 bp, SARS Virus
cggttatagtcgcgatcgtgctcct

SEQ ID NO: 231900 - DNA, 25 bp, SARS Virus
ggttatagtcgtcatcgtgctcctt

SEQ ID NO: 231901 - DNA, 25 bp, SARS Virus
gttatagtcgtgctcgtgctccttg

SEQ ID NO: 231902 - DNA, 25 bp, SARS Virus
ttatagtcgtgaccgtgctccttgg

SEQ ID NO: 231903 - DNA, 25 bp, SARS Virus
tatagtcgtgatcgtgctccttggg

SEQ ID NO: 231904 - DNA, 25 bp, SARS Virus
atagtcgtgatcctgctccttgggt

SEQ ID NO: 231905 - DNA, 25 bp, SARS Virus
tagtcgtgatcgcgctccttgggtc

SEQ ID NO: 231906 - DNA, 25 bp, SARS Virus
agtcgtgatcgtcctccttgggtca

SEQ ID NO: 231907 - DNA, 25 bp, SARS Virus
gtcgtgatcgtgctccttgggtcat

SEQ ID NO: 231908 - DNA, 25 bp, SARS Virus
tcgtgatcgtgccccttgggtcatc

SEQ ID NO: 231909 - DNA, 25 bp, SARS Virus
cgtgatcgtgctccttgggtcatcc

SEQ ID NO: 231910 - DNA, 25 bp, SARS Virus
gtgatcgtgctccttgggtcatccg

SEQ ID NO: 231911 - DNA, 25 bp, SARS Virus
tgatcgtgctccctgggtcatccgt

SEQ ID NO: 231912 - DNA, 25 bp, SARS Virus
gatcgtgctcctcgggtcatccgtg

SEQ ID NO: 231913 - DNA, 25 bp, SARS Virus
atcgtgctccttcggtcatccgtgc

SEQ ID NO: 231914 - DNA, 25 bp, SARS Virus
tcgtgctccttgcgtcatccgtgcg

SEQ ID NO: 231915 - DNA, 25 bp, SARS Virus
cgtgctccttggctcatccgtgcga

SEQ ID NO: 231916 - DNA, 25 bp, SARS Virus
gtgctccttgggccatccgtgcgaa

SEQ ID NO: 231917 - DNA, 25 bp, SARS Virus
tgctccttgggtcatccgtgcgaat

SEQ ID NO: 231918 - DNA, 25 bp, SARS Virus
gctccttgggtcctccgtgcgaata

SEQ ID NO: 231919 - DNA, 25 bp, SARS Virus
ctccttgggtcacccgtgcgaataa

SEQ ID NO: 231920 - DNA, 25 bp, SARS Virus
tccttgggtcatccgtgcgaataat

SEQ ID NO: 231921 - DNA, 25 bp, SARS Virus
ccttgggtcatccgtgcgaataata

SEQ ID NO: 231922 - DNA, 25 bp, SARS Virus
cttgggtcatccctgcgaataatat

SEQ ID NO: 231923 - DNA, 25 bp, SARS Virus
ttgggtcatccgcgcgaataatatc

SEQ ID NO: 231924 - DNA, 25 bp, SARS Virus
tgggtcatccgtccgaataatatcg

SEQ ID NO: 231925 - DNA, 25 bp, SARS Virus
gggtcatccgtgcgaataatatcgt

SEQ ID NO: 231926 - DNA, 25 bp, SARS Virus
ggtcatccgtgccaataatatcgtc

SEQ ID NO: 231927 - DNA, 25 bp, SARS Virus
gtcatccgtgcgcataatatcgtcg

SEQ ID NO: 231928 - DNA, 25 bp, SARS Virus
tcatccgtgcgactaatatcgtcgg

SEQ ID NO: 231929 - DNA, 25 bp, SARS Virus
catccgtgcgaacaatatcgtcggt

SEQ ID NO: 231930 - DNA, 25 bp, SARS Virus
atccgtgcgaatcatatcgtcggtt

SEQ ID NO: 231931 - DNA, 25 bp, SARS Virus
tccgtgcgaatactatcgtcggttg

SEQ ID NO: 231932 - DNA, 25 bp, SARS Virus
ccgtgcgaataacatcgtcggttgt

SEQ ID NO: 231933 - DNA, 25 bp, SARS Virus
cgtgcgaataatctcgtcggttgta

SEQ ID NO: 231934 - DNA, 25 bp, SARS Virus
gtgcgaataataccgtcggttgtat

SEQ ID NO: 231935 - DNA, 25 bp, SARS Virus
tgcgaataatatcgtcggttgtatc

SEQ ID NO: 231936 - DNA, 25 bp, SARS Virus
gcgaataatatcctcggttgtatcc

SEQ ID NO: 231937 - DNA, 25 bp, SARS Virus
cgaataatatcgccggttgtatccg

SEQ ID NO: 231938 - DNA, 25 bp, SARS Virus
gaataatatcgtcggttgtatccgt

SEQ ID NO: 231939 - DNA, 25 bp, SARS Virus
aataatatcgtccgttgtatccgtt

SEQ ID NO: 231940 - DNA, 25 bp, SARS Virus
ataatatcgtcgcttgtatccgttt

SEQ ID NO: 231941 - DNA, 25 bp, SARS Virus
taatatcgtcggctgtatccgtttg

SEQ ID NO: 231942 - DNA, 25 bp, SARS Virus
aatatcgtcggtcgtatccgtttgt

SEQ ID NO: 231943 - DNA, 25 bp, SARS Virus
atatcgtcggttctatccgtttgtg

SEQ ID NO: 231944 - DNA, 25 bp, SARS Virus
tatcgtcggttgcatccgtttgtgt

SEQ ID NO: 231945 - DNA, 25 bp, SARS Virus
atcgtcggttgtctccgtttgtgtg

SEQ ID NO: 231946 - DNA, 25 bp, SARS Virus
tcgtcggttgtacccgtttgtgtgt

SEQ ID NO: 231947 - DNA, 25 bp, SARS Virus
cgtcggttgtatccgtttgtgtgtc

SEQ ID NO: 231948 - DNA, 25 bp, SARS Virus
gtcggttgtatccgtttgtgtgtcg

SEQ ID NO: 231949 - DNA, 25 bp, SARS Virus
tcggttgtatccctttgtgtgtcgg

SEQ ID NO: 231950 - DNA, 25 bp, SARS Virus
cggttgtatccgcttgtgtgtcgga

SEQ ID NO: 231951 - DNA, 25 bp, SARS Virus
ggttgtatccgtctgtgtgtcggag

SEQ ID NO: 231952 - DNA, 25 bp, SARS Virus
gttgtatccgttcgtgtgtcggagg

SEQ ID NO: 231953 - DNA, 25 bp, SARS Virus
ttgtatccgtttctgtgtcggaggt

SEQ ID NO: 231954 - DNA, 25 bp, SARS Virus
tgtatccgtttgcgtgtcggaggtt

SEQ ID NO: 231955 - DNA, 25 bp, SARS Virus
gtatccgtttgtctgtcggaggttt

SEQ ID NO: 231956 - DNA, 25 bp, SARS Virus
tatccgtttgtgcgtcggaggtttt

SEQ ID NO: 231957 - DNA, 25 bp, SARS Virus
atccgtttgtgtctcggaggttttg

SEQ ID NO: 231958 - DNA, 25 bp, SARS Virus
tccgtttgtgtgccggaggttttgt

SEQ ID NO: 231959 - DNA, 25 bp, SARS Virus
ccgtttgtgtgtcggaggttttgta

SEQ ID NO: 231960 - DNA, 25 bp, SARS Virus
cgtttgtgtgtccgaggttttgtag

SEQ ID NO: 231961 - DNA, 25 bp, SARS Virus
gtttgtgtgtcgcaggttttgtaga

SEQ ID NO: 231962 - DNA, 25 bp, SARS Virus
tttgtgtgtcggcggttttgtagat

SEQ ID NO: 231963 - DNA, 25 bp, SARS Virus
ttgtgtgtcggacgttttgtagatc

SEQ ID NO: 231964 - DNA, 25 bp, SARS Virus
tgtgtgtcggagcttttgtagatca

SEQ ID NO: 231965 - DNA, 25 bp, SARS Virus
gtgtgtcggaggctttgtagatcag

SEQ ID NO: 231966 - DNA, 25 bp, SARS Virus
tgtgtcggaggtcttgtagatcagg

SEQ ID NO: 231967 - DNA, 25 bp, SARS Virus
gtgtcggaggttctgtagatcagga

SEQ ID NO: 231968 - DNA, 25 bp, SARS Virus
tgtcggaggtttcgtagatcaggat

SEQ ID NO: 231969 - DNA, 25 bp, SARS Virus
gtcggaggttttctagatcaggatg

SEQ ID NO: 231970 - DNA, 25 bp, SARS Virus
tcggaggttttgcagatcaggatgg

SEQ ID NO: 231971 - DNA, 25 bp, SARS Virus
cggaggttttgtcgatcaggatgga

SEQ ID NO: 231972 - DNA, 25 bp, SARS Virus
ggaggttttgtacatcaggatggag

SEQ ID NO: 231973 - DNA, 25 bp, SARS Virus
gaggttttgtagctcaggatggagg

SEQ ID NO: 231974 - DNA, 25 bp, SARS Virus
aggttttgtagaccaggatggaggg

SEQ ID NO: 231975 - DNA, 25 bp, SARS Virus
ggttttgtagatcaggatggaggga

SEQ ID NO: 231976 - DNA, 25 bp, SARS Virus
gttttgtagatccggatggagggaa

SEQ ID NO: 231977 - DNA, 25 bp, SARS Virus
ttttgtagatcacgatggagggaac

SEQ ID NO: 231978 - DNA, 25 bp, SARS Virus
tttgtagatcagcatggagggaacg

SEQ ID NO: 231979 - DNA, 25 bp, SARS Virus
ttgtagatcaggctggagggaacgc

SEQ ID NO: 231980 - DNA, 25 bp, SARS Virus
tgtagatcaggacggagggaacgcc

SEQ ID NO: 231981 - DNA, 25 bp, SARS Virus
gtagatcaggatcgagggaacgcct

SEQ ID NO: 231982 - DNA, 25 bp, SARS Virus
tagatcaggatgcagggaacgcctc

SEQ ID NO: 231983 - DNA, 25 bp, SARS Virus
agatcaggatggcgggaacgcctca

SEQ ID NO: 231984 - DNA, 25 bp, SARS Virus
gatcaggatggacggaacgcctcag

SEQ ID NO: 231985 - DNA, 25 bp, SARS Virus
atcaggatggagcgaacgcctcagc

SEQ ID NO: 231986 - DNA, 25 bp, SARS Virus
tcaggatggaggcaacgcctcagct

SEQ ID NO: 231987 - DNA, 25 bp, SARS Virus
caggatggagggcacgcctcagctc

SEQ ID NO: 231988 - DNA, 25 bp, SARS Virus
aggatggagggaccgcctcagctca

SEQ ID NO: 231989 - DNA, 25 bp, SARS Virus
ggatggagggaacgcctcagctcaa

SEQ ID NO: 231990 - DNA, 25 bp, SARS Virus
gatggagggaacccctcagctcaaa

SEQ ID NO: 231991 - DNA, 25 bp, SARS Virus
atggagggaacgcctcagctcaaag

SEQ ID NO: 231992 - DNA, 25 bp, SARS Virus
tggagggaacgcctcagctcaaagt

SEQ ID NO: 231993 - DNA, 25 bp, SARS Virus
ggagggaacgccccagctcaaagtt

SEQ ID NO: 231994 - DNA, 25 bp, SARS Virus
gagggaacgcctcagctcaaagtta

SEQ ID NO: 231995 - DNA, 25 bp, SARS Virus
agggaacgcctccgctcaaagttac

SEQ ID NO: 231996 - DNA, 25 bp, SARS Virus
gggaacgcctcacctcaaagttaca

SEQ ID NO: 231997 - DNA, 25 bp, SARS Virus
ggaacgcctcagctcaaagttacaa

SEQ ID NO: 231998 - DNA, 25 bp, SARS Virus
gaacgcctcagcccaaagttacaaa

SEQ ID NO: 231999 - DNA, 25 bp, SARS Virus
aacgcctcagctcaaagttacaaac

SEQ ID NO: 232000 - DNA, 25 bp, SARS Virus
acgcctcagctccaagttacaaact

SEQ ID NO: 232001 - DNA, 25 bp, SARS Virus
cgcctcagctcacagttacaaactc

SEQ ID NO: 232002 - DNA, 25 bp, SARS Virus
gcctcagctcaacgttacaaactca

SEQ ID NO: 232003 - DNA, 25 bp, SARS Virus
cctcagctcaaacttacaaactcac

SEQ ID NO: 232004 - DNA, 25 bp, SARS Virus
ctcagctcaaagctacaaactcacc

SEQ ID NO: 232005 - DNA, 25 bp, SARS Virus
tcagctcaaagtcacaaactcacca

SEQ ID NO: 232006 - DNA, 25 bp, SARS Virus
cagctcaaagttccaaactcaccaa

SEQ ID NO: 232007 - DNA, 25 bp, SARS Virus
agctcaaagttacaaactcaccaac

SEQ ID NO: 232008 - DNA, 25 bp, SARS Virus
gctcaaagttaccaactcaccaaca

SEQ ID NO: 232009 - DNA, 25 bp, SARS Virus
ctcaaagttacacactcaccaacac

SEQ ID NO: 232010 - DNA, 25 bp, SARS Virus
tcaaagttacaacctcaccaacact

SEQ ID NO: 232011 - DNA, 25 bp, SARS Virus
caaagttacaaactcaccaacacta

SEQ ID NO: 232012 - DNA, 25 bp, SARS Virus
aaagttacaaacccaccaacactat

SEQ ID NO: 232013 - DNA, 25 bp, SARS Virus
aagttacaaactcaccaacactatt

SEQ ID NO: 232014 - DNA, 25 bp, SARS Virus
agttacaaactccccaacactatta

SEQ ID NO: 232015 - DNA, 25 bp, SARS Virus
gttacaaactcaccaacactattag

SEQ ID NO: 232016 - DNA, 25 bp, SARS Virus
ttacaaactcaccaacactattaga

SEQ ID NO: 232017 - DNA, 25 bp, SARS Virus
tacaaactcacccacactattagac

SEQ ID NO: 232018 - DNA, 25 bp, SARS Virus
acaaactcaccaccactattagacg

SEQ ID NO: 232019 - DNA, 25 bp, SARS Virus
caaactcaccaacactattagacgt

SEQ ID NO: 232020 - DNA, 25 bp, SARS Virus
aaactcaccaaccctattagacgtt

SEQ ID NO: 232021 - DNA, 25 bp, SARS Virus
aactcaccaacactattagacgttg

SEQ ID NO: 232022 - DNA, 25 bp, SARS Virus
actcaccaacaccattagacgttgt

SEQ ID NO: 232023 - DNA, 25 bp, SARS Virus
ctcaccaacactcttagacgttgtg

SEQ ID NO: 232024 - DNA, 25 bp, SARS Virus
tcaccaacactactagacgttgtga

SEQ ID NO: 232025 - DNA, 25 bp, SARS Virus
caccaacactatcagacgttgtgat

SEQ ID NO: 232026 - DNA, 25 bp, SARS Virus
accaacactattcgacgttgtgata

SEQ ID NO: 232027 - DNA, 25 bp, SARS Virus
ccaacactattacacgttgtgatac

SEQ ID NO: 232028 - DNA, 25 bp, SARS Virus
caacactattagccgttgtgatacg

SEQ ID NO: 232029 - DNA, 25 bp, SARS Virus
aacactattagacgttgtgatacga

SEQ ID NO: 232030 - DNA, 25 bp, SARS Virus
acactattagaccttgtgatacgag

SEQ ID NO: 232031 - DNA, 25 bp, SARS Virus
cactattagacgctgtgatacgagt

SEQ ID NO: 232032 - DNA, 25 bp, SARS Virus
actattagacgtcgtgatacgagtc

SEQ ID NO: 232033 - DNA, 25 bp, SARS Virus
ctattagacgttctgatacgagtcc

SEQ ID NO: 232034 - DNA, 25 bp, SARS Virus
tattagacgttgcgatacgagtcca

SEQ ID NO: 232035 - DNA, 25 bp, SARS Virus
attagacgttgtcatacgagtccag

SEQ ID NO: 232036 - DNA, 25 bp, SARS Virus
ttagacgttgtgctacgagtccagg

SEQ ID NO: 232037 - DNA, 25 bp, SARS Virus
tagacgttgtgacacgagtccaggt

SEQ ID NO: 232038 - DNA, 25 bp, SARS Virus
agacgttgtgatccgagtccaggtt

SEQ ID NO: 232039 - DNA, 25 bp, SARS Virus
gacgttgtgatacgagtccaggtta

SEQ ID NO: 232040 - DNA, 25 bp, SARS Virus
acgttgtgataccagtccaggttag

SEQ ID NO: 232041 - DNA, 25 bp, SARS Virus
cgttgtgatacgcgtccaggttaga

SEQ ID NO: 232042 - DNA, 25 bp, SARS Virus
gttgtgatacgactccaggttagag

SEQ ID NO: 232043 - DNA, 25 bp, SARS Virus
ttgtgatacgagcccaggttagaga

SEQ ID NO: 232044 - DNA, 25 bp, SARS Virus
tgtgatacgagtccaggttagagac

SEQ ID NO: 232045 - DNA, 25 bp, SARS Virus
gtgatacgagtccaggttagagacc

SEQ ID NO: 232046 - DNA, 25 bp, SARS Virus
tgatacgagtcccggttagagaccc

SEQ ID NO: 232047 - DNA, 25 bp, SARS Virus
gatacgagtccacgttagagaccca

SEQ ID NO: 232048 - DNA, 25 bp, SARS Virus
atacgagtccagcttagagacccag

SEQ ID NO: 232049 - DNA, 25 bp, SARS Virus
tacgagtccaggctagagacccaga

SEQ ID NO: 232050 - DNA, 25 bp, SARS Virus
acgagtccaggtcagagacccagaa

SEQ ID NO: 232051 - DNA, 25 bp, SARS Virus
cgagtccaggttcgagacccagaac

SEQ ID NO: 232052 - DNA, 25 bp, SARS Virus
gagtccaggttacagacccagaact

SEQ ID NO: 232053 - DNA, 25 bp, SARS Virus
agtccaggttagcgacccagaactg

SEQ ID NO: 232054 - DNA, 25 bp, SARS Virus
gtccaggttagacacccagaactgt

SEQ ID NO: 232055 - DNA, 25 bp, SARS Virus
tccaggttagagccccagaactgtc

SEQ ID NO: 232056 - DNA, 25 bp, SARS Virus
ccaggttagagacccagaactgtcc

SEQ ID NO: 232057 - DNA, 25 bp, SARS Virus
caggttagagacccagaactgtccg

SEQ ID NO: 232058 - DNA, 25 bp, SARS Virus
aggttagagacccagaactgtccgt

SEQ ID NO: 232059 - DNA, 25 bp, SARS Virus
ggttagagaccccgaactgtccgtc

SEQ ID NO: 232060 - DNA, 25 bp, SARS Virus
gttagagacccacaactgtccgtcc

SEQ ID NO: 232061 - DNA, 25 bp, SARS Virus
ttagagacccagcactgtccgtcct

SEQ ID NO: 232062 - DNA, 25 bp, SARS Virus
tagagacccagacctgtccgtcctg

SEQ ID NO: 232063 - DNA, 25 bp, SARS Virus
agagacccagaactgtccgtcctgt

SEQ ID NO: 232064 - DNA, 25 bp, SARS Virus
gagacccagaaccgtccgtcctgta

SEQ ID NO: 232065 - DNA, 25 bp, SARS Virus
agacccagaactctccgtcctgtac

SEQ ID NO: 232066 - DNA, 25 bp, SARS Virus
gacccagaactgcccgtcctgtacc

SEQ ID NO: 232067 - DNA, 25 bp, SARS Virus
acccagaactgtccgtcctgtaccg

SEQ ID NO: 232068 - DNA, 25 bp, SARS Virus
cccagaactgtccgtcctgtaccgt

SEQ ID NO: 232069 - DNA, 25 bp, SARS Virus
ccagaactgtccctcctgtaccgta

SEQ ID NO: 232070 - DNA, 25 bp, SARS Virus
cagaactgtccgccctgtaccgtaa

SEQ ID NO: 232071 - DNA, 25 bp, SARS Virus
agaactgtccgtcctgtaccgtaaa

SEQ ID NO: 232072 - DNA, 25 bp, SARS Virus
gaactgtccgtcctgtaccgtaaaa

SEQ ID NO: 232073 - DNA, 25 bp, SARS Virus
aactgtccgtcccgtaccgtaaaag

SEQ ID NO: 232074 - DNA, 25 bp, SARS Virus
actgtccgtcctctaccgtaaaagt

SEQ ID NO: 232075 - DNA, 25 bp, SARS Virus
ctgtccgtcctgcaccgtaaaagtg

SEQ ID NO: 232076 - DNA, 25 bp, SARS Virus
tgtccgtcctgtcccgtaaaagtga

SEQ ID NO: 232077 - DNA, 25 bp, SARS Virus
gtccgtcctgtaccgtaaaagtgat

SEQ ID NO: 232078 - DNA, 25 bp, SARS Virus
tccgtcctgtaccgtaaaagtgatg

SEQ ID NO: 232079 - DNA, 25 bp, SARS Virus
ccgtcctgtaccctaaaagtgatgt

SEQ ID NO: 232080 - DNA, 25 bp, SARS Virus
cgtcctgtaccgcaaaagtgatgtc

SEQ ID NO: 232081 - DNA, 25 bp, SARS Virus
gtcctgtaccgtcaaagtgatgtcg

SEQ ID NO: 232082 - DNA, 25 bp, SARS Virus
tcctgtaccgtacaagtgatgtcgt

SEQ ID NO: 232083 - DNA, 25 bp, SARS Virus
cctgtaccgtaacagtgatgtcgta

SEQ ID NO: 232084 - DNA, 25 bp, SARS Virus
ctgtaccgtaaacgtgatgtcgtaa

SEQ ID NO: 232085 - DNA, 25 bp, SARS Virus
tgtaccgtaaaactgatgtcgtaat

SEQ ID NO: 232086 - DNA, 25 bp, SARS Virus
gtaccgtaaaagcgatgtcgtaatc

SEQ ID NO: 232087 - DNA, 25 bp, SARS Virus
taccgtaaaagtcatgtcgtaatca

SEQ ID NO: 232088 - DNA, 25 bp, SARS Virus
accgtaaaagtgctgtcgtaatcat

SEQ ID NO: 232089 - DNA, 25 bp, SARS Virus
ccgtaaaagtgacgtcgtaatcatc

SEQ ID NO: 232090 - DNA, 25 bp, SARS Virus
cgtaaaagtgatctcgtaatcatcc

SEQ ID NO: 232091 - DNA, 25 bp, SARS Virus
gtaaaagtgatgccgtaatcatcca

SEQ ID NO: 232092 - DNA, 25 bp, SARS Virus
taaaagtgatgtcgtaatcatccat

SEQ ID NO: 232093 - DNA, 25 bp, SARS Virus
aaaagtgatgtcctaatcatccatc

SEQ ID NO: 232094 - DNA, 25 bp, SARS Virus
aaagtgatgtcgcaatcatccatcc

SEQ ID NO: 232095 - DNA, 25 bp, SARS Virus
aagtgatgtcgtcatcatccatcca

SEQ ID NO: 232096 - DNA, 25 bp, SARS Virus
agtgatgtcgtactcatccatccat

SEQ ID NO: 232097 - DNA, 25 bp, SARS Virus
gtgatgtcgtaaccatccatccatg

SEQ ID NO: 232098 - DNA, 25 bp, SARS Virus
tgatgtcgtaatcatccatccatgg

SEQ ID NO: 232099 - DNA, 25 bp, SARS Virus
gatgtcgtaatcctccatccatggg

SEQ ID NO: 232100 - DNA, 25 bp, SARS Virus
atgtcgtaatcacccatccatgggt

SEQ ID NO: 232101 - DNA, 25 bp, SARS Virus
tgtcgtaatcatccatccatgggtg

SEQ ID NO: 232102 - DNA, 25 bp, SARS Virus
gtcgtaatcatccatccatgggtgt

SEQ ID NO: 232103 - DNA, 25 bp, SARS Virus
tcgtaatcatccctccatgggtgta

SEQ ID NO: 232104 - DNA, 25 bp, SARS Virus
cgtaatcatccacccatgggtgtac

SEQ ID NO: 232105 - DNA, 25 bp, SARS Virus
gtaatcatccatccatgggtgtaca

SEQ ID NO: 232106 - DNA, 25 bp, SARS Virus
taatcatccatccatgggtgtacat

SEQ ID NO: 232107 - DNA, 25 bp, SARS Virus
aatcatccatccctgggtgtacatc

SEQ ID NO: 232108 - DNA, 25 bp, SARS Virus
atcatccatccacgggtgtacatca

SEQ ID NO: 232109 - DNA, 25 bp, SARS Virus
tcatccatccatcggtgtacatcat

SEQ ID NO: 232110 - DNA, 25 bp, SARS Virus
catccatccatgcgtgtacatcatc

SEQ ID NO: 232111 - DNA, 25 bp, SARS Virus
atccatccatggctgtacatcatcc

SEQ ID NO: 232112 - DNA, 25 bp, SARS Virus
tccatccatgggcgtacatcatcca

SEQ ID NO: 232113 - DNA, 25 bp, SARS Virus
ccatccatgggtctacatcatccag

SEQ ID NO: 232114 - DNA, 25 bp, SARS Virus
catccatgggtgcacatcatccagg

SEQ ID NO: 232115 - DNA, 25 bp, SARS Virus
atccatgggtgtccatcatccagga

SEQ ID NO: 232116 - DNA, 25 bp, SARS Virus
tccatgggtgtacatcatccaggaa

SEQ ID NO: 232117 - DNA, 25 bp, SARS Virus
ccatgggtgtacctcatccaggaag

SEQ ID NO: 232118 - DNA, 25 bp, SARS Virus
catgggtgtacaccatccaggaagt

SEQ ID NO: 232119 - DNA, 25 bp, SARS Virus
atgggtgtacatcatccaggaagtt

SEQ ID NO: 232120 - DNA, 25 bp, SARS Virus
tgggtgtacatcctccaggaagtta

SEQ ID NO: 232121 - DNA, 25 bp, SARS Virus
gggtgtacatcacccaggaagttat

SEQ ID NO: 232122 - DNA, 25 bp, SARS Virus
ggtgtacatcatccaggaagttatt

SEQ ID NO: 232123 - DNA, 25 bp, SARS Virus
gtgtacatcatccaggaagttattg

SEQ ID NO: 232124 - DNA, 25 bp, SARS Virus
tgtacatcatcccggaagttattga

SEQ ID NO: 232125 - DNA, 25 bp, SARS Virus
gtacatcatccacgaagttattgat

SEQ ID NO: 232126 - DNA, 25 bp, SARS Virus
tacatcatccagcaagttattgatt

SEQ ID NO: 232127 - DNA, 25 bp, SARS Virus
acatcatccaggcagttattgattt

SEQ ID NO: 232128 - DNA, 25 bp, SARS Virus
catcatccaggacgttattgattta

SEQ ID NO: 232129 - DNA, 25 bp, SARS Virus
atcatccaggaacttattgatttaa

SEQ ID NO: 232130 - DNA, 25 bp, SARS Virus
tcatccaggaagctattgatttaaa

SEQ ID NO: 232131 - DNA, 25 bp, SARS Virus
catccaggaagtcattgatttaaaa

SEQ ID NO: 232132 - DNA, 25 bp, SARS Virus
atccaggaagttcttgatttaaaag

SEQ ID NO: 232133 - DNA, 25 bp, SARS Virus
tccaggaagttactgatttaaaagt

SEQ ID NO: 232134 - DNA, 25 bp, SARS Virus
ccaggaagttatcgatttaaaagtc

SEQ ID NO: 232135 - DNA, 25 bp, SARS Virus
caggaagttattcatttaaaagtca

SEQ ID NO: 232136 - DNA, 25 bp, SARS Virus
aggaagttattgctttaaaagtcac

SEQ ID NO: 232137 - DNA, 25 bp, SARS Virus
ggaagttattgacttaaaagtcacg

SEQ ID NO: 232138 - DNA, 25 bp, SARS Virus
gaagttattgatctaaaagtcacgg

SEQ ID NO: 232139 - DNA, 25 bp, SARS Virus
aagttattgattcaaaagtcacggt

SEQ ID NO: 232140 - DNA, 25 bp, SARS Virus
agttattgatttcaaagtcacggtg

SEQ ID NO: 232141 - DNA, 25 bp, SARS Virus
gttattgatttacaagtcacggtgt

SEQ ID NO: 232142 - DNA, 25 bp, SARS Virus
ttattgatttaacagtcacggtgtt

SEQ ID NO: 232143 - DNA, 25 bp, SARS Virus
tattgatttaaacgtcacggtgtta

SEQ ID NO: 232144 - DNA, 25 bp, SARS Virus
attgatttaaaactcacggtgttac

SEQ ID NO: 232145 - DNA, 25 bp, SARS Virus
ttgatttaaaagccacggtgttaca

SEQ ID NO: 232146 - DNA, 25 bp, SARS Virus
tgatttaaaagtcacggtgttacaa

SEQ ID NO: 232147 - DNA, 25 bp, SARS Virus
gatttaaaagtcccggtgttacaag

SEQ ID NO: 232148 - DNA, 25 bp, SARS Virus
atttaaaagtcacggtgttacaagt

SEQ ID NO: 232149 - DNA, 25 bp, SARS Virus
tttaaaagtcaccgtgttacaagtg

SEQ ID NO: 232150 - DNA, 25 bp, SARS Virus
ttaaaagtcacgctgttacaagtgt

SEQ ID NO: 232151 - DNA, 25 bp, SARS Virus
taaaagtcacggcgttacaagtgtt

SEQ ID NO: 232152 - DNA, 25 bp, SARS Virus
aaaagtcacggtcttacaagtgttc

SEQ ID NO: 232153 - DNA, 25 bp, SARS Virus
aaagtcacggtgctacaagtgttca

SEQ ID NO: 232154 - DNA, 25 bp, SARS Virus
aagtcacggtgtcacaagtgttcac

SEQ ID NO: 232155 - DNA, 25 bp, SARS Virus
agtcacggtgttccaagtgttcacc

SEQ ID NO: 232156 - DNA, 25 bp, SARS Virus
gtcacggtgttacaagtgttcaccg

SEQ ID NO: 232157 - DNA, 25 bp, SARS Virus
tcacggtgttaccagtgttcaccga

SEQ ID NO: 232158 - DNA, 25 bp, SARS Virus
cacggtgttacacgtgttcaccgaa

SEQ ID NO: 232159 - DNA, 25 bp, SARS Virus
acggtgttacaactgttcaccgaaa

SEQ ID NO: 232160 - DNA, 25 bp, SARS Virus
cggtgttacaagcgttcaccgaaag

SEQ ID NO: 232161 - DNA, 25 bp, SARS Virus
ggtgttacaagtcttcaccgaaagt

SEQ ID NO: 232162 - DNA, 25 bp, SARS Virus
gtgttacaagtgctcaccgaaagtc

SEQ ID NO: 232163 - DNA, 25 bp, SARS Virus
tgttacaagtgtccaccgaaagtct

SEQ ID NO: 232164 - DNA, 25 bp, SARS Virus
gttacaagtgttcaccgaaagtctt

SEQ ID NO: 232165 - DNA, 25 bp, SARS Virus
ttacaagtgttccccgaaagtcttt

SEQ ID NO: 232166 - DNA, 25 bp, SARS Virus
tacaagtgttcaccgaaagtctttc

SEQ ID NO: 232167 - DNA, 25 bp, SARS Virus
acaagtgttcaccgaaagtctttca

SEQ ID NO: 232168 - DNA, 25 bp, SARS Virus
caagtgttcacccaaagtctttcag

SEQ ID NO: 232169 - DNA, 25 bp, SARS Virus
aagtgttcaccgcaagtctttcagc

SEQ ID NO: 232170 - DNA, 25 bp, SARS Virus
agtgttcaccgacagtctttcagcg

SEQ ID NO: 232171 - DNA, 25 bp, SARS Virus
gtgttcaccgaacgtctttcagcgt

SEQ ID NO: 232172 - DNA, 25 bp, SARS Virus
tgttcaccgaaactctttcagcgtg

SEQ ID NO: 232173 - DNA, 25 bp, SARS Virus
gttcaccgaaagcctttcagcgtgc

SEQ ID NO: 232174 - DNA, 25 bp, SARS Virus
ttcaccgaaagtctttcagcgtgca

SEQ ID NO: 232175 - DNA, 25 bp, SARS Virus
tcaccgaaagtccttcagcgtgcag

SEQ ID NO: 232176 - DNA, 25 bp, SARS Virus
caccgaaagtctctcagcgtgcaga

SEQ ID NO: 232177 - DNA, 25 bp, SARS Virus
accgaaagtcttccagcgtgcagac

SEQ ID NO: 232178 - DNA, 25 bp, SARS Virus
ccgaaagtctttcagcgtgcagacg

SEQ ID NO: 232179 - DNA, 25 bp, SARS Virus
cgaaagtctttccgcgtgcagacgg

SEQ ID NO: 232180 - DNA, 25 bp, SARS Virus
gaaagtctttcaccgtgcagacggt

SEQ ID NO: 232181 - DNA, 25 bp, SARS Virus
aaagtctttcagcgtgcagacggta

SEQ ID NO: 232182 - DNA, 25 bp, SARS Virus
aagtctttcagcctgcagacggtac

SEQ ID NO: 232183 - DNA, 25 bp, SARS Virus
agtctttcagcgcgcagacggtact

SEQ ID NO: 232184 - DNA, 25 bp, SARS Virus
gtctttcagcgtccagacggtactt

SEQ ID NO: 232185 - DNA, 25 bp, SARS Virus
tctttcagcgtgcagacggtacttt

SEQ ID NO: 232186 - DNA, 25 bp, SARS Virus
ctttcagcgtgccgacggtactttg

SEQ ID NO: 232187 - DNA, 25 bp, SARS Virus
tttcagcgtgcacacggtactttga

SEQ ID NO: 232188 - DNA, 25 bp, SARS Virus
ttcagcgtgcagccggtactttgaa

SEQ ID NO: 232189 - DNA, 25 bp, SARS Virus
tcagcgtgcagacggtactttgaag

SEQ ID NO: 232190 - DNA, 25 bp, SARS Virus
cagcgtgcagaccgtactttgaagt

SEQ ID NO: 232191 - DNA, 25 bp, SARS Virus
agcgtgcagacgctactttgaagta

SEQ ID NO: 232192 - DNA, 25 bp, SARS Virus
gcgtgcagacggcactttgaagtag

SEQ ID NO: 232193 - DNA, 25 bp, SARS Virus
cgtgcagacggtcctttgaagtagc

SEQ ID NO: 232194 - DNA, 25 bp, SARS Virus
gtgcagacggtactttgaagtagcg

SEQ ID NO: 232195 - DNA, 25 bp, SARS Virus
tgcagacggtaccttgaagtagcgt

SEQ ID NO: 232196 - DNA, 25 bp, SARS Virus
gcagacggtactctgaagtagcgtt

SEQ ID NO: 232197 - DNA, 25 bp, SARS Virus
cagacggtacttcgaagtagcgtta

SEQ ID NO: 232198 - DNA, 25 bp, SARS Virus
agacggtactttcaagtagcgttac

SEQ ID NO: 232199 - DNA, 25 bp, SARS Virus
gacggtactttgcagtagcgttact

SEQ ID NO: 232200 - DNA, 25 bp, SARS Virus
acggtactttgacgtagcgttacta

SEQ ID NO: 232201 - DNA, 25 bp, SARS Virus
cggtactttgaactagcgttactaa

SEQ ID NO: 232202 - DNA, 25 bp, SARS Virus
ggtactttgaagcagcgttactaat

SEQ ID NO: 232203 - DNA, 25 bp, SARS Virus
gtactttgaagtcgcgttactaatg

SEQ ID NO: 232204 - DNA, 25 bp, SARS Virus
tactttgaagtaccgttactaatgt

SEQ ID NO: 232205 - DNA, 25 bp, SARS Virus
actttgaagtagcgttactaatgta

SEQ ID NO: 232206 - DNA, 25 bp, SARS Virus
ctttgaagtagccttactaatgtaa

SEQ ID NO: 232207 - DNA, 25 bp, SARS Virus
tttgaagtagcgctactaatgtaaa

SEQ ID NO: 232208 - DNA, 25 bp, SARS Virus
ttgaagtagcgtcactaatgtaaag

SEQ ID NO: 232209 - DNA, 25 bp, SARS Virus
tgaagtagcgttcctaatgtaaagt

SEQ ID NO: 232210 - DNA, 25 bp, SARS Virus
gaagtagcgttactaatgtaaagta

SEQ ID NO: 232211 - DNA, 25 bp, SARS Virus
aagtagcgttaccaatgtaaagtag

SEQ ID NO: 232212 - DNA, 25 bp, SARS Virus
agtagcgttactcatgtaaagtagt

SEQ ID NO: 232213 - DNA, 25 bp, SARS Virus
gtagcgttactactgtaaagtagtt

SEQ ID NO: 232214 - DNA, 25 bp, SARS Virus
tagcgttactaacgtaaagtagttc

SEQ ID NO: 232215 - DNA, 25 bp, SARS Virus
agcgttactaatctaaagtagttcc

SEQ ID NO: 232216 - DNA, 25 bp, SARS Virus
gcgttactaatgcaaagtagttcca

SEQ ID NO: 232217 - DNA, 25 bp, SARS Virus
cgttactaatgtcaagtagttccat

SEQ ID NO: 232218 - DNA, 25 bp, SARS Virus
gttactaatgtacagtagttccatc

SEQ ID NO: 232219 - DNA, 25 bp, SARS Virus
ttactaatgtaacgtagttccatct

SEQ ID NO: 232220 - DNA, 25 bp, SARS Virus
tactaatgtaaactagttccatctg

SEQ ID NO: 232221 - DNA, 25 bp, SARS Virus
actaatgtaaagcagttccatctgt

SEQ ID NO: 232222 - DNA, 25 bp, SARS Virus
ctaatgtaaagtcgttccatctgtt

SEQ ID NO: 232223 - DNA, 25 bp, SARS Virus
taatgtaaagtacttccatctgttc

SEQ ID NO: 232224 - DNA, 25 bp, SARS Virus
aatgtaaagtagctccatctgttca

SEQ ID NO: 232225 - DNA, 25 bp, SARS Virus
atgtaaagtagtcccatctgttcac

SEQ ID NO: 232226 - DNA, 25 bp, SARS Virus
tgtaaagtagttccatctgttcacg

SEQ ID NO: 232227 - DNA, 25 bp, SARS Virus
gtaaagtagttccatctgttcacgt

SEQ ID NO: 232228 - DNA, 25 bp, SARS Virus
taaagtagttccctctgttcacgta

SEQ ID NO: 232229 - DNA, 25 bp, SARS Virus
aaagtagttccacctgttcacgtat

SEQ ID NO: 232230 - DNA, 25 bp, SARS Virus
aagtagttccatctgttcacgtata

SEQ ID NO: 232231 - DNA, 25 bp, SARS Virus
agtagttccatccgttcacgtataa

SEQ ID NO: 232232 - DNA, 25 bp, SARS Virus
gtagttccatctcttcacgtataac

SEQ ID NO: 232233 - DNA, 25 bp, SARS Virus
tagttccatctgctcacgtataaca

SEQ ID NO: 232234 - DNA, 25 bp, SARS Virus
agttccatctgtccacgtataacaa

SEQ ID NO: 232235 - DNA, 25 bp, SARS Virus
gttccatctgttcacgtataacaat

SEQ ID NO: 232236 - DNA, 25 bp, SARS Virus
ttccatctgttcccgtataacaatg

SEQ ID NO: 232237 - DNA, 25 bp, SARS Virus
tccatctgttcacgtataacaatgt

SEQ ID NO: 232238 - DNA, 25 bp, SARS Virus
ccatctgttcacctataacaatgtg

SEQ ID NO: 232239 - DNA, 25 bp, SARS Virus
catctgttcacgcataacaatgtga

SEQ ID NO: 232240 - DNA, 25 bp, SARS Virus
atctgttcacgtctaacaatgtgag

SEQ ID NO: 232241 - DNA, 25 bp, SARS Virus
tctgttcacgtacaacaatgtgagg

SEQ ID NO: 232242 - DNA, 25 bp, SARS Virus
ctgttcacgtatcacaatgtgagga

SEQ ID NO: 232243 - DNA, 25 bp, SARS Virus
tgttcacgtataccaatgtgaggac

SEQ ID NO: 232244 - DNA, 25 bp, SARS Virus
gttcacgtataacaatgtgaggaca

SEQ ID NO: 232245 - DNA, 25 bp, SARS Virus
ttcacgtataaccatgtgaggacac

SEQ ID NO: 232246 - DNA, 25 bp, SARS Virus
tcacgtataacactgtgaggacacc

SEQ ID NO: 232247 - DNA, 25 bp, SARS Virus
cacgtataacaacgtgaggacacct

SEQ ID NO: 232248 - DNA, 25 bp, SARS Virus
acgtataacaatctgaggacacctc

SEQ ID NO: 232249 - DNA, 25 bp, SARS Virus
cgtataacaatgcgaggacacctct

SEQ ID NO: 232250 - DNA, 25 bp, SARS Virus
gtataacaatgtcaggacacctcta

SEQ ID NO: 232251 - DNA, 25 bp, SARS Virus
tataacaatgtgcggacacctctac

SEQ ID NO: 232252 - DNA, 25 bp, SARS Virus
ataacaatgtgacgacacctctacg

SEQ ID NO: 232253 - DNA, 25 bp, SARS Virus
taacaatgtgagcacacctctacgt

SEQ ID NO: 232254 - DNA, 25 bp, SARS Virus
aacaatgtgaggccacctctacgtt

SEQ ID NO: 232255 - DNA, 25 bp, SARS Virus
acaatgtgaggacacctctacgttg

SEQ ID NO: 232256 - DNA, 25 bp, SARS Virus
caatgtgaggacccctctacgttgt

SEQ ID NO: 232257 - DNA, 25 bp, SARS Virus
aatgtgaggacacctctacgttgtc

SEQ ID NO: 232258 - DNA, 25 bp, SARS Virus
atgtgaggacacctctacgttgtcc

SEQ ID NO: 232259 - DNA, 25 bp, SARS Virus
tgtgaggacacccctacgttgtccc

SEQ ID NO: 232260 - DNA, 25 bp, SARS Virus
gtgaggacacctctacgttgtccca

SEQ ID NO: 232261 - DNA, 25 bp, SARS Virus
tgaggacacctccacgttgtcccat

SEQ ID NO: 232262 - DNA, 25 bp, SARS Virus
gaggacacctctccgttgtcccatg

SEQ ID NO: 232263 - DNA, 25 bp, SARS Virus
aggacacctctacgttgtcccatgt

SEQ ID NO: 232264 - DNA, 25 bp, SARS Virus
ggacacctctaccttgtcccatgtg

SEQ ID NO: 232265 - DNA, 25 bp, SARS Virus
gacacctctacgctgtcccatgtgt

SEQ ID NO: 232266 - DNA, 25 bp, SARS Virus
acacctctacgtcgtcccatgtgtc

SEQ ID NO: 232267 - DNA, 25 bp, SARS Virus
cacctctacgttctcccatgtgtct

SEQ ID NO: 232268 - DNA, 25 bp, SARS Virus
acctctacgttgccccatgtgtctc

SEQ ID NO: 232269 - DNA, 25 bp, SARS Virus
cctctacgttgtcccatgtgtctcg

SEQ ID NO: 232270 - DNA, 25 bp, SARS Virus
ctctacgttgtcccatgtgtctcgc

SEQ ID NO: 232271 - DNA, 25 bp, SARS Virus
tctacgttgtcccatgtgtctcgca

SEQ ID NO: 232272 - DNA, 25 bp, SARS Virus
ctacgttgtcccctgtgtctcgcat

SEQ ID NO: 232273 - DNA, 25 bp, SARS Virus
tacgttgtcccacgtgtctcgcata

SEQ ID NO: 232274 - DNA, 25 bp, SARS Virus
acgttgtcccatctgtctcgcatat

SEQ ID NO: 232275 - DNA, 25 bp, SARS Virus
cgttgtcccatgcgtctcgcatatg

SEQ ID NO: 232276 - DNA, 25 bp, SARS Virus
gttgtcccatgtctctcgcatatgc

SEQ ID NO: 232277 - DNA, 25 bp, SARS Virus
ttgtcccatgtgcctcgcatatgcg

SEQ ID NO: 232278 - DNA, 25 bp, SARS Virus
tgtcccatgtgtctcgcatatgcgg

SEQ ID NO: 232279 - DNA, 25 bp, SARS Virus
gtcccatgtgtcccgcatatgcggg

SEQ ID NO: 232280 - DNA, 25 bp, SARS Virus
tcccatgtgtctcgcatatgcgggg

SEQ ID NO: 232281 - DNA, 25 bp, SARS Virus
cccatgtgtctcccatatgcggggt

SEQ ID NO: 232282 - DNA, 25 bp, SARS Virus
ccatgtgtctcgcatatgcggggta

SEQ ID NO: 232283 - DNA, 25 bp, SARS Virus
catgtgtctcgcctatgcggggtac

SEQ ID NO: 232284 - DNA, 25 bp, SARS Virus
atgtgtctcgcacatgcggggtact

SEQ ID NO: 232285 - DNA, 25 bp, SARS Virus
tgtgtctcgcatctgcggggtactt

SEQ ID NO: 232286 - DNA, 25 bp, SARS Virus
gtgtctcgcatacgcggggtacttt

SEQ ID NO: 232287 - DNA, 25 bp, SARS Virus
tgtctcgcatatccggggtactttg

SEQ ID NO: 232288 - DNA, 25 bp, SARS Virus
gtctcgcatatgcggggtactttgg

SEQ ID NO: 232289 - DNA, 25 bp, SARS Virus
tctcgcatatgccgggtactttggg

SEQ ID NO: 232290 - DNA, 25 bp, SARS Virus
ctcgcatatgcgcggtactttggga

SEQ ID NO: 232291 - DNA, 25 bp, SARS Virus
tcgcatatgcggcgtactttgggag

SEQ ID NO: 232292 - DNA, 25 bp, SARS Virus
cgcatatgcgggctactttgggagt

SEQ ID NO: 232293 - DNA, 25 bp, SARS Virus
gcatatgcggggcactttgggagtc

SEQ ID NO: 232294 - DNA, 25 bp, SARS Virus
catatgcggggtcctttgggagtca

SEQ ID NO: 232295 - DNA, 25 bp, SARS Virus
atatgcggggtactttgggagtcag

SEQ ID NO: 232296 - DNA, 25 bp, SARS Virus
tatgcggggtaccttgggagtcaga

SEQ ID NO: 232297 - DNA, 25 bp, SARS Virus
atgcggggtactctgggagtcagaa

SEQ ID NO: 232298 - DNA, 25 bp, SARS Virus
tgcggggtacttcgggagtcagaaa

SEQ ID NO: 232299 - DNA, 25 bp, SARS Virus
gcggggtactttcggagtcagaaaa

SEQ ID NO: 232300 - DNA, 25 bp, SARS Virus
cggggtactttgcgagtcagaaaaa

SEQ ID NO: 232301 - DNA, 25 bp, SARS Virus
ggggtactttggcagtcagaaaaag

SEQ ID NO: 232302 - DNA, 25 bp, SARS Virus
gggtactttgggcgtcagaaaaaga

SEQ ID NO: 232303 - DNA, 25 bp, SARS Virus
ggtactttgggactcagaaaaagaa

SEQ ID NO: 232304 - DNA, 25 bp, SARS Virus
gtactttgggagccagaaaaagaaa

SEQ ID NO: 232305 - DNA, 25 bp, SARS Virus
tactttgggagtcagaaaaagaaaa

SEQ ID NO: 232306 - DNA, 25 bp, SARS Virus
actttgggagtccgaaaaagaaaag

SEQ ID NO: 232307 - DNA, 25 bp, SARS Virus
ctttgggagtcacaaaaagaaaagt

SEQ ID NO: 232308 - DNA, 25 bp, SARS Virus
tttgggagtcagcaaaagaaaagtt

SEQ ID NO: 232309 - DNA, 25 bp, SARS Virus
ttgggagtcagacaaagaaaagttg

SEQ ID NO: 232310 - DNA, 25 bp, SARS Virus
tgggagtcagaacaagaaaagttgt

SEQ ID NO: 232311 - DNA, 25 bp, SARS Virus
gggagtcagaaacagaaaagttgtg

SEQ ID NO: 232312 - DNA, 25 bp, SARS Virus
ggagtcagaaaacgaaaagttgtgc

SEQ ID NO: 232313 - DNA, 25 bp, SARS Virus
gagtcagaaaaacaaaagttgtgca

SEQ ID NO: 232314 - DNA, 25 bp, SARS Virus
agtcagaaaaagcaaagttgtgcac

SEQ ID NO: 232315 - DNA, 25 bp, SARS Virus
gtcagaaaaagacaagttgtgcacc

SEQ ID NO: 232316 - DNA, 25 bp, SARS Virus
tcagaaaaagaacagttgtgcacca

SEQ ID NO: 232317 - DNA, 25 bp, SARS Virus
cagaaaaagaaacgttgtgcaccaa

SEQ ID NO: 232318 - DNA, 25 bp, SARS Virus
agaaaaagaaaacttgtgcaccaac

SEQ ID NO: 232319 - DNA, 25 bp, SARS Virus
gaaaaagaaaagctgtgcaccaact

SEQ ID NO: 232320 - DNA, 25 bp, SARS Virus
aaaaagaaaagtcgtgcaccaactt

SEQ ID NO: 232321 - DNA, 25 bp, SARS Virus
gtcatagagttcgtctaggagtaag

SEQ ID NO: 232322 - DNA, 25 bp, SARS Virus
tcatagagttccgctaggagtaagt

SEQ ID NO: 232323 - DNA, 25 bp, SARS Virus
catagagttcctgtaggagtaagtt

SEQ ID NO: 232324 - DNA, 25 bp, SARS Virus
atagagttcctcgaggagtaagttc

SEQ ID NO: 232325 - DNA, 25 bp, SARS Virus
tagagttcctctgggagtaagttcc

SEQ ID NO: 232326 - DNA, 25 bp, SARS Virus
agagttcctctaggagtaagttcca

SEQ ID NO: 232327 - DNA, 25 bp, SARS Virus
gagttcctctaggagtaagttccag

SEQ ID NO: 232328 - DNA, 25 bp, SARS Virus
agttcctctaggggtaagttccaga

SEQ ID NO: 232329 - DNA, 25 bp, SARS Virus
gttcctctaggagtaagttccagag

SEQ ID NO: 232330 - DNA, 25 bp, SARS Virus
ttcctctaggaggaagttccagagg

SEQ ID NO: 232331 - DNA, 25 bp, SARS Virus
tcctctaggagtgagttccagaggt

SEQ ID NO: 232332 - DNA, 25 bp, SARS Virus
cctctaggagtaggttccagaggtg

SEQ ID NO: 232333 - DNA, 25 bp, SARS Virus
ctctaggagtaagttccagaggtgt

SEQ ID NO: 232334 - DNA, 25 bp, SARS Virus
tctaggagtaaggtccagaggtgta

SEQ ID NO: 232335 - DNA, 25 bp, SARS Virus
ctaggagtaagtgccagaggtgtaa

SEQ ID NO: 232336 - DNA, 25 bp, SARS Virus
taggagtaagttgcagaggtgtaac

SEQ ID NO: 232337 - DNA, 25 bp, SARS Virus
aggagtaagttcgagaggtgtaaca

SEQ ID NO: 232338 - DNA, 25 bp, SARS Virus
ggagtaagttccggaggtgtaacag

SEQ ID NO: 232339 - DNA, 25 bp, SARS Virus
gagtaagttccagaggtgtaacagt

SEQ ID NO: 232340 - DNA, 25 bp, SARS Virus
agtaagttccaggggtgtaacagtg

SEQ ID NO: 232341 - DNA, 25 bp, SARS Virus
gtaagttccagaggtgtaacagtgg

SEQ ID NO: 232342 - DNA, 25 bp, SARS Virus
taagttccagaggtgtaacagtggt

SEQ ID NO: 232343 - DNA, 25 bp, SARS Virus
aagttccagaggggtaacagtggtc

SEQ ID NO: 232344 - DNA, 25 bp, SARS Virus
agttccagaggtgtaacagtggtca

SEQ ID NO: 232345 - DNA, 25 bp, SARS Virus
gttccagaggtggaacagtggtcat

SEQ ID NO: 232346 - DNA, 25 bp, SARS Virus
ttccagaggtgtgacagtggtcatt

SEQ ID NO: 232347 - DNA, 25 bp, SARS Virus
tccagaggtgtagcagtggtcatta

SEQ ID NO: 232348 - DNA, 25 bp, SARS Virus
ccagaggtgtaagagtggtcattac

SEQ ID NO: 232349 - DNA, 25 bp, SARS Virus
cagaggtgtaacggtggtcattacg

SEQ ID NO: 232350 - DNA, 25 bp, SARS Virus
agaggtgtaacagtggtcattacgg

SEQ ID NO: 232351 - DNA, 25 bp, SARS Virus
gaggtgtaacaggggtcattacggt

SEQ ID NO: 232352 - DNA, 25 bp, SARS Virus
aggtgtaacagtggtcattacggtc

SEQ ID NO: 232353 - DNA, 25 bp, SARS Virus
ggtgtaacagtggtcattacggtca

SEQ ID NO: 232354 - DNA, 25 bp, SARS Virus
gtgtaacagtgggcattacggtcat

SEQ ID NO: 232355 - DNA, 25 bp, SARS Virus
tgtaacagtggtgattacggtcata

SEQ ID NO: 232356 - DNA, 25 bp, SARS Virus
gtaacagtggtcgttacggtcatac

SEQ ID NO: 232357 - DNA, 25 bp, SARS Virus
taacagtggtcagtacggtcatacc

SEQ ID NO: 232358 - DNA, 25 bp, SARS Virus
aacagtggtcatgacggtcataccg

SEQ ID NO: 232359 - DNA, 25 bp, SARS Virus
acagtggtcattgcggtcataccgg

SEQ ID NO: 232360 - DNA, 25 bp, SARS Virus
cagtggtcattagggtcataccgga

SEQ ID NO: 232361 - DNA, 25 bp, SARS Virus
agtggtcattacggtcataccggac

SEQ ID NO: 232362 - DNA, 25 bp, SARS Virus
gtggtcattacggtcataccggact

SEQ ID NO: 232363 - DNA, 25 bp, SARS Virus
tggtcattacgggcataccggactc

SEQ ID NO: 232364 - DNA, 25 bp, SARS Virus
ggtcattacggtgataccggactcg

SEQ ID NO: 232365 - DNA, 25 bp, SARS Virus
gtcattacggtcgtaccggactcgg

SEQ ID NO: 232366 - DNA, 25 bp, SARS Virus
tcattacggtcagaccggactcggt

SEQ ID NO: 232367 - DNA, 25 bp, SARS Virus
cattacggtcatgccggactcggtt

SEQ ID NO: 232368 - DNA, 25 bp, SARS Virus
attacggtcatagcggactcggtta

SEQ ID NO: 232369 - DNA, 25 bp, SARS Virus
ttacggtcatacgggactcggttat

SEQ ID NO: 232370 - DNA, 25 bp, SARS Virus
tacggtcataccggactcggttata

SEQ ID NO: 232371 - DNA, 25 bp, SARS Virus
acggtcataccggactcggttatag

SEQ ID NO: 232372 - DNA, 25 bp, SARS Virus
cggtcataccgggctcggttatagt

SEQ ID NO: 232373 - DNA, 25 bp, SARS Virus
ggtcataccggagtcggttatagtc

SEQ ID NO: 232374 - DNA, 25 bp, SARS Virus
gtcataccggacgcggttatagtcg

SEQ ID NO: 232375 - DNA, 25 bp, SARS Virus
tcataccggactgggttatagtcgt

SEQ ID NO: 232376 - DNA, 25 bp, SARS Virus
cataccggactcggttatagtcgtg

SEQ ID NO: 232377 - DNA, 25 bp, SARS Virus
ataccggactcggttatagtcgtga

SEQ ID NO: 232378 - DNA, 25 bp, SARS Virus
taccggactcgggtatagtcgtgat

SEQ ID NO: 232379 - DNA, 25 bp, SARS Virus
accggactcggtgatagtcgtgatc

SEQ ID NO: 232380 - DNA, 25 bp, SARS Virus
ccggactcggttgtagtcgtgatcg

SEQ ID NO: 232381 - DNA, 25 bp, SARS Virus
cggactcggttagagtcgtgatcgt

SEQ ID NO: 232382 - DNA, 25 bp, SARS Virus
ggactcggttatggtcgtgatcgtg

SEQ ID NO: 232383 - DNA, 25 bp, SARS Virus
gactcggttatagtcgtgatcgtgc

SEQ ID NO: 232384 - DNA, 25 bp, SARS Virus
actcggttataggcgtgatcgtgct

SEQ ID NO: 232385 - DNA, 25 bp, SARS Virus
ctcggttatagtggtgatcgtgctc

SEQ ID NO: 232386 - DNA, 25 bp, SARS Virus
tcggttatagtcgtgatcgtgctcc

SEQ ID NO: 232387 - DNA, 25 bp, SARS Virus
cggttatagtcgggatcgtgctcct

SEQ ID NO: 232388 - DNA, 25 bp, SARS Virus
ggttatagtcgtgatcgtgctcctt

SEQ ID NO: 232389 - DNA, 25 bp, SARS Virus
gttatagtcgtggtcgtgctccttg

SEQ ID NO: 232390 - DNA, 25 bp, SARS Virus
ttatagtcgtgagcgtgctccttgg

SEQ ID NO: 232391 - DNA, 25 bp, SARS Virus
tatagtcgtgatggtgctccttggg

SEQ ID NO: 232392 - DNA, 25 bp, SARS Virus
atagtcgtgatcgtgctccttgggt

SEQ ID NO: 232393 - DNA, 25 bp, SARS Virus
tagtcgtgatcgggctccttgggtc

SEQ ID NO: 232394 - DNA, 25 bp, SARS Virus
agtcgtgatcgtgctccttgggtca

SEQ ID NO: 232395 - DNA, 25 bp, SARS Virus
gtcgtgatcgtggtccttgggtcat

SEQ ID NO: 232396 - DNA, 25 bp, SARS Virus
tcgtgatcgtgcgccttgggtcatc

SEQ ID NO: 232397 - DNA, 25 bp, SARS Virus
cgtgatcgtgctgcttgggtcatcc

SEQ ID NO: 232398 - DNA, 25 bp, SARS Virus
gtgatcgtgctcgttgggtcatccg

SEQ ID NO: 232399 - DNA, 25 bp, SARS Virus
tgatcgtgctccgtgggtcatccgt

SEQ ID NO: 232400 - DNA, 25 bp, SARS Virus
gatcgtgctcctggggtcatccgtg

SEQ ID NO: 232401 - DNA, 25 bp, SARS Virus
atcgtgctccttgggtcatccgtgc

SEQ ID NO: 232402 - DNA, 25 bp, SARS Virus
tcgtgctccttgggtcatccgtgcg

SEQ ID NO: 232403 - DNA, 25 bp, SARS Virus
cgtgctccttgggtcatccgtgcga

SEQ ID NO: 232404 - DNA, 25 bp, SARS Virus
gtgctccttggggcatccgtgcgaa

SEQ ID NO: 232405 - DNA, 25 bp, SARS Virus
tgctccttgggtgatccgtgcgaat

SEQ ID NO: 232406 - DNA, 25 bp, SARS Virus
gctccttgggtcgtccgtgcgaata

SEQ ID NO: 232407 - DNA, 25 bp, SARS Virus
ctccttgggtcagccgtgcgaataa

SEQ ID NO: 232408 - DNA, 25 bp, SARS Virus
tccttgggtcatgcgtgcgaataat

SEQ ID NO: 232409 - DNA, 25 bp, SARS Virus
ccttgggtcatcggtgcgaataata

SEQ ID NO: 232410 - DNA, 25 bp, SARS Virus
cttgggtcatccgtgcgaataatat

SEQ ID NO: 232411 - DNA, 25 bp, SARS Virus
ttgggtcatccgggcgaataatatc

SEQ ID NO: 232412 - DNA, 25 bp, SARS Virus
tgggtcatccgtgcgaataatatcg

SEQ ID NO: 232413 - DNA, 25 bp, SARS Virus
gggtcatccgtgggaataatatcgt

SEQ ID NO: 232414 - DNA, 25 bp, SARS Virus
ggtcatccgtgcgaataatatcgtc

SEQ ID NO: 232415 - DNA, 25 bp, SARS Virus
gtcatccgtgcggataatatcgtcg

SEQ ID NO: 232416 - DNA, 25 bp, SARS Virus
tcatccgtgcgagtaatatcgtcgg

SEQ ID NO: 232417 - DNA, 25 bp, SARS Virus
catccgtgcgaagaatatcgtcggt

SEQ ID NO: 232418 - DNA, 25 bp, SARS Virus
atccgtgcgaatgatatcgtcggtt

SEQ ID NO: 232419 - DNA, 25 bp, SARS Virus
tccgtgcgaatagtatcgtcggttg

SEQ ID NO: 232420 - DNA, 25 bp, SARS Virus
ccgtgcgaataagatcgtcggttgt

SEQ ID NO: 232421 - DNA, 25 bp, SARS Virus
cgtgcgaataatgtcgtcggttgta

SEQ ID NO: 232422 - DNA, 25 bp, SARS Virus
gtgcgaataatagcgtcggttgtat

SEQ ID NO: 232423 - DNA, 25 bp, SARS Virus
tgcgaataatatggtcggttgtatc

SEQ ID NO: 232424 - DNA, 25 bp, SARS Virus
gcgaataatatcgtcggttgtatcc

SEQ ID NO: 232425 - DNA, 25 bp, SARS Virus
cgaataatatcggcggttgtatccg

SEQ ID NO: 232426 - DNA, 25 bp, SARS Virus
gaataatatcgtgggttgtatccgt

SEQ ID NO: 232427 - DNA, 25 bp, SARS Virus
aataatatcgtcggttgtatccgtt

SEQ ID NO: 232428 - DNA, 25 bp, SARS Virus
ataatatcgtcggttgtatccgttt

SEQ ID NO: 232429 - DNA, 25 bp, SARS Virus
taatatcgtcgggtgtatccgtttg

SEQ ID NO: 232430 - DNA, 25 bp, SARS Virus
aatatcgtcggtggtatccgtttgt

SEQ ID NO: 232431 - DNA, 25 bp, SARS Virus
atatcgtcggttgtatccgtttgtg

SEQ ID NO: 232432 - DNA, 25 bp, SARS Virus
tatcgtcggttggatccgtttgtgt

SEQ ID NO: 232433 - DNA, 25 bp, SARS Virus
atcgtcggttgtgtccgtttgtgtg

SEQ ID NO: 232434 - DNA, 25 bp, SARS Virus
tcgtcggttgtagccgtttgtgtgt

SEQ ID NO: 232435 - DNA, 25 bp, SARS Virus
cgtcggttgtatgcgtttgtgtgtc

SEQ ID NO: 232436 - DNA, 25 bp, SARS Virus
gtcggttgtatcggtttgtgtgtcg

SEQ ID NO: 232437 - DNA, 25 bp, SARS Virus
tcggttgtatccgtttgtgtgtcgg

SEQ ID NO: 232438 - DNA, 25 bp, SARS Virus
cggttgtatccggttgtgtgtcgga

SEQ ID NO: 232439 - DNA, 25 bp, SARS Virus
ggttgtatccgtgtgtgtgtcggag

SEQ ID NO: 232440 - DNA, 25 bp, SARS Virus
gttgtatccgttggtgtgtcggagg

SEQ ID NO: 232441 - DNA, 25 bp, SARS Virus
ttgtatccgtttgtgtgtcggaggt

SEQ ID NO: 232442 - DNA, 25 bp, SARS Virus
tgtatccgtttgggtgtcggaggtt

SEQ ID NO: 232443 - DNA, 25 bp, SARS Virus
gtatccgtttgtgtgtcggaggttt

SEQ ID NO: 232444 - DNA, 25 bp, SARS Virus
tatccgtttgtgggtcggaggtttt

SEQ ID NO: 232445 - DNA, 25 bp, SARS Virus
atccgtttgtgtgtcggaggttttg

SEQ ID NO: 232446 - DNA, 25 bp, SARS Virus
tccgtttgtgtggcggaggttttgt

SEQ ID NO: 232447 - DNA, 25 bp, SARS Virus
ccgtttgtgtgtgggaggttttgta

SEQ ID NO: 232448 - DNA, 25 bp, SARS Virus
cgtttgtgtgtcggaggttttgtag

SEQ ID NO: 232449 - DNA, 25 bp, SARS Virus
gtttgtgtgtcggaggttttgtaga

SEQ ID NO: 232450 - DNA, 25 bp, SARS Virus
tttgtgtgtcgggggttttgtagat

SEQ ID NO: 232451 - DNA, 25 bp, SARS Virus
ttgtgtgtcggaggttttgtagatc

SEQ ID NO: 232452 - DNA, 25 bp, SARS Virus
tgtgtgtcggaggttttgtagatca

SEQ ID NO: 232453 - DNA, 25 bp, SARS Virus
gtgtgtcggagggtttgtagatcag

SEQ ID NO: 232454 - DNA, 25 bp, SARS Virus
tgtgtcggaggtgttgtagatcagg

SEQ ID NO: 232455 - DNA, 25 bp, SARS Virus
gtgtcggaggttgtgtagatcagga

SEQ ID NO: 232456 - DNA, 25 bp, SARS Virus
tgtcggaggtttggtagatcaggat

SEQ ID NO: 232457 - DNA, 25 bp, SARS Virus
gtcggaggttttgtagatcaggatg

SEQ ID NO: 232458 - DNA, 25 bp, SARS Virus
tcggaggttttggagatcaggatgg

SEQ ID NO: 232459 - DNA, 25 bp, SARS Virus
cggaggttttgtggatcaggatgga

SEQ ID NO: 232460 - DNA, 25 bp, SARS Virus
ggaggttttgtagatcaggatggag

SEQ ID NO: 232461 - DNA, 25 bp, SARS Virus
gaggttttgtaggtcaggatggagg

SEQ ID NO: 232462 - DNA, 25 bp, SARS Virus
aggttttgtagagcaggatggaggg

SEQ ID NO: 232463 - DNA, 25 bp, SARS Virus
ggttttgtagatgaggatggaggga

SEQ ID NO: 232464 - DNA, 25 bp, SARS Virus
gttttgtagatcgggatggagggaa

SEQ ID NO: 232465 - DNA, 25 bp, SARS Virus
ttttgtagatcaggatggagggaac

SEQ ID NO: 232466 - DNA, 25 bp, SARS Virus
tttgtagatcaggatggagggaacg

SEQ ID NO: 232467 - DNA, 25 bp, SARS Virus
ttgtagatcagggtggagggaacgc

SEQ ID NO: 232468 - DNA, 25 bp, SARS Virus
tgtagatcaggagggagggaacgcc

SEQ ID NO: 232469 - DNA, 25 bp, SARS Virus
gtagatcaggatggagggaacgcct

SEQ ID NO: 232470 - DNA, 25 bp, SARS Virus
tagatcaggatggagggaacgcctc

SEQ ID NO: 232471 - DNA, 25 bp, SARS Virus
agatcaggatggggggaacgcctca

SEQ ID NO: 232472 - DNA, 25 bp, SARS Virus
gatcaggatggagggaacgcctcag

SEQ ID NO: 232473 - DNA, 25 bp, SARS Virus
atcaggatggagggaacgcctcagc

SEQ ID NO: 232474 - DNA, 25 bp, SARS Virus
tcaggatggagggaacgcctcagct

SEQ ID NO: 232475 - DNA, 25 bp, SARS Virus
caggatggaggggacgcctcagctc

SEQ ID NO: 232476 - DNA, 25 bp, SARS Virus
aggatggagggagcgcctcagctca

SEQ ID NO: 232477 - DNA, 25 bp, SARS Virus
ggatggagggaaggcctcagctcaa

SEQ ID NO: 232478 - DNA, 25 bp, SARS Virus
gatggagggaacgcctcagctcaaa

SEQ ID NO: 232479 - DNA, 25 bp, SARS Virus
atggagggaacggctcagctcaaag

SEQ ID NO: 232480 - DNA, 25 bp, SARS Virus
tggagggaacgcgtcagctcaaagt

SEQ ID NO: 232481 - DNA, 25 bp, SARS Virus
ggagggaacgccgcagctcaaagtt

SEQ ID NO: 232482 - DNA, 25 bp, SARS Virus
gagggaacgcctgagctcaaagtta

SEQ ID NO: 232483 - DNA, 25 bp, SARS Virus
agggaacgcctcggctcaaagttac

SEQ ID NO: 232484 - DNA, 25 bp, SARS Virus
gggaacgcctcagctcaaagttaca

SEQ ID NO: 232485 - DNA, 25 bp, SARS Virus
ggaacgcctcaggtcaaagttacaa

SEQ ID NO: 232486 - DNA, 25 bp, SARS Virus
gaacgcctcagcgcaaagttacaaa

SEQ ID NO: 232487 - DNA, 25 bp, SARS Virus
aacgcctcagctgaaagttacaaac

SEQ ID NO: 232488 - DNA, 25 bp, SARS Virus
acgcctcagctcgaagttacaaact

SEQ ID NO: 232489 - DNA, 25 bp, SARS Virus
cgcctcagctcagagttacaaactc

SEQ ID NO: 232490 - DNA, 25 bp, SARS Virus
gcctcagctcaaggttacaaactca

SEQ ID NO: 232491 - DNA, 25 bp, SARS Virus
cctcagctcaaagttacaaactcac

SEQ ID NO: 232492 - DNA, 25 bp, SARS Virus
ctcagctcaaaggtacaaactcacc

SEQ ID NO: 232493 - DNA, 25 bp, SARS Virus
tcagctcaaagtgacaaactcacca

SEQ ID NO: 232494 - DNA, 25 bp, SARS Virus
cagctcaaagttgcaaactcaccaa

SEQ ID NO: 232495 - DNA, 25 bp, SARS Virus
agctcaaagttagaaactcaccaac

SEQ ID NO: 232496 - DNA, 25 bp, SARS Virus
gctcaaagttacgaactcaccaaca

SEQ ID NO: 232497 - DNA, 25 bp, SARS Virus
ctcaaagttacagactcaccaacac

SEQ ID NO: 232498 - DNA, 25 bp, SARS Virus
tcaaagttacaagctcaccaacact

SEQ ID NO: 232499 - DNA, 25 bp, SARS Virus
caaagttacaaagtcaccaacacta

SEQ ID NO: 232500 - DNA, 25 bp, SARS Virus
aaagttacaaacgcaccaacactat

SEQ ID NO: 232501 - DNA, 25 bp, SARS Virus
aagttacaaactgaccaacactatt

SEQ ID NO: 232502 - DNA, 25 bp, SARS Virus
agttacaaactcgccaacactatta

SEQ ID NO: 232503 - DNA, 25 bp, SARS Virus
gttacaaactcagcaacactattag

SEQ ID NO: 232504 - DNA, 25 bp, SARS Virus
ttacaaactcacgaacactattaga

SEQ ID NO: 232505 - DNA, 25 bp, SARS Virus
tacaaactcaccgacactattagac

SEQ ID NO: 232506 - DNA, 25 bp, SARS Virus
acaaactcaccagcactattagacg

SEQ ID NO: 232507 - DNA, 25 bp, SARS Virus
caaactcaccaagactattagacgt

SEQ ID NO: 232508 - DNA, 25 bp, SARS Virus
aaactcaccaacgctattagacgtt

SEQ ID NO: 232509 - DNA, 25 bp, SARS Virus
aactcaccaacagtattagacgttg

SEQ ID NO: 232510 - DNA, 25 bp, SARS Virus
actcaccaacacgattagacgttgt

SEQ ID NO: 232511 - DNA, 25 bp, SARS Virus
ctcaccaacactgttagacgttgtg

SEQ ID NO: 232512 - DNA, 25 bp, SARS Virus
tcaccaacactagtagacgttgtga

SEQ ID NO: 232513 - DNA, 25 bp, SARS Virus
caccaacactatgagacgttgtgat

SEQ ID NO: 232514 - DNA, 25 bp, SARS Virus
accaacactattggacgttgtgata

SEQ ID NO: 232515 - DNA, 25 bp, SARS Virus
ccaacactattagacgttgtgatac

SEQ ID NO: 232516 - DNA, 25 bp, SARS Virus
caacactattaggcgttgtgatacg

SEQ ID NO: 232517 - DNA, 25 bp, SARS Virus
aacactattagaggttgtgatacga

SEQ ID NO: 232518 - DNA, 25 bp, SARS Virus
acactattagacgttgtgatacgag

SEQ ID NO: 232519 - DNA, 25 bp, SARS Virus
cactattagacggtgtgatacgagt

SEQ ID NO: 232520 - DNA, 25 bp, SARS Virus
actattagacgtggtgatacgagtc

SEQ ID NO: 232521 - DNA, 25 bp, SARS Virus
ctattagacgttgtgatacgagtcc

SEQ ID NO: 232522 - DNA, 25 bp, SARS Virus
tattagacgttgggatacgagtcca

SEQ ID NO: 232523 - DNA, 25 bp, SARS Virus
attagacgttgtgatacgagtccag

SEQ ID NO: 232524 - DNA, 25 bp, SARS Virus
ttagacgttgtggtacgagtccagg

SEQ ID NO: 232525 - DNA, 25 bp, SARS Virus
tagacgttgtgagacgagtccaggt

SEQ ID NO: 232526 - DNA, 25 bp, SARS Virus
agacgttgtgatgcgagtccaggtt

SEQ ID NO: 232527 - DNA, 25 bp, SARS Virus
gacgttgtgataggagtccaggtta

SEQ ID NO: 232528 - DNA, 25 bp, SARS Virus
acgttgtgatacgagtccaggttag

SEQ ID NO: 232529 - DNA, 25 bp, SARS Virus
cgttgtgatacgggtccaggttaga

SEQ ID NO: 232530 - DNA, 25 bp, SARS Virus
gttgtgatacgagtccaggttagag

SEQ ID NO: 232531 - DNA, 25 bp, SARS Virus
ttgtgatacgaggccaggttagaga

SEQ ID NO: 232532 - DNA, 25 bp, SARS Virus
tgtgatacgagtgcaggttagagac

SEQ ID NO: 232533 - DNA, 25 bp, SARS Virus
gtgatacgagtcgaggttagagacc

SEQ ID NO: 232534 - DNA, 25 bp, SARS Virus
tgatacgagtccgggttagagaccc

SEQ ID NO: 232535 - DNA, 25 bp, SARS Virus
gatacgagtccaggttagagaccca

SEQ ID NO: 232536 - DNA, 25 bp, SARS Virus
atacgagtccaggttagagacccag

SEQ ID NO: 232537 - DNA, 25 bp, SARS Virus
tacgagtccagggtagagacccaga

SEQ ID NO: 232538 - DNA, 25 bp, SARS Virus
acgagtccaggtgagagacccagaa

SEQ ID NO: 232539 - DNA, 25 bp, SARS Virus
cgagtccaggttggagacccagaac

SEQ ID NO: 232540 - DNA, 25 bp, SARS Virus
gagtccaggttagagacccagaact

SEQ ID NO: 232541 - DNA, 25 bp, SARS Virus
agtccaggttagggacccagaactg

SEQ ID NO: 232542 - DNA, 25 bp, SARS Virus
gtccaggttagagacccagaactgt

SEQ ID NO: 232543 - DNA, 25 bp, SARS Virus
tccaggttagaggcccagaactgtc

SEQ ID NO: 232544 - DNA, 25 bp, SARS Virus
ccaggttagagagccagaactgtcc

SEQ ID NO: 232545 - DNA, 25 bp, SARS Virus
caggttagagacgcagaactgtccg

SEQ ID NO: 232546 - DNA, 25 bp, SARS Virus
aggttagagaccgagaactgtccgt

SEQ ID NO: 232547 - DNA, 25 bp, SARS Virus
ggttagagacccggaactgtccgtc

SEQ ID NO: 232548 - DNA, 25 bp, SARS Virus
gttagagacccagaactgtccgtcc

SEQ ID NO: 232549 - DNA, 25 bp, SARS Virus
ttagagacccaggactgtccgtcct

SEQ ID NO: 232550 - DNA, 25 bp, SARS Virus
tagagacccagagctgtccgtcctg

SEQ ID NO: 232551 - DNA, 25 bp, SARS Virus
agagacccagaagtgtccgtcctgt

SEQ ID NO: 232552 - DNA, 25 bp, SARS Virus
gagacccagaacggtccgtcctgta

SEQ ID NO: 232553 - DNA, 25 bp, SARS Virus
agacccagaactgtccgtcctgtac

SEQ ID NO: 232554 - DNA, 25 bp, SARS Virus
gacccagaactggccgtcctgtacc

SEQ ID NO: 232555 - DNA, 25 bp, SARS Virus
acccagaactgtgcgtcctgtaccg

SEQ ID NO: 232556 - DNA, 25 bp, SARS Virus
cccagaactgtcggtcctgtaccgt

SEQ ID NO: 232557 - DNA, 25 bp, SARS Virus
ccagaactgtccgtcctgtaccgta

SEQ ID NO: 232558 - DNA, 25 bp, SARS Virus
cagaactgtccggcctgtaccgtaa

SEQ ID NO: 232559 - DNA, 25 bp, SARS Virus
agaactgtccgtgctgtaccgtaaa

SEQ ID NO: 232560 - DNA, 25 bp, SARS Virus
gaactgtccgtcgtgtaccgtaaaa

SEQ ID NO: 232561 - DNA, 25 bp, SARS Virus
aactgtccgtccggtaccgtaaaag

SEQ ID NO: 232562 - DNA, 25 bp, SARS Virus
actgtccgtcctgtaccgtaaaagt

SEQ ID NO: 232563 - DNA, 25 bp, SARS Virus
ctgtccgtcctggaccgtaaaagtg

SEQ ID NO: 232564 - DNA, 25 bp, SARS Virus
tgtccgtcctgtgccgtaaaagtga

SEQ ID NO: 232565 - DNA, 25 bp, SARS Virus
gtccgtcctgtagcgtaaaagtgat

SEQ ID NO: 232566 - DNA, 25 bp, SARS Virus
tccgtcctgtacggtaaaagtgatg

SEQ ID NO: 232567 - DNA, 25 bp, SARS Virus
ccgtcctgtaccgtaaaagtgatgt

SEQ ID NO: 232568 - DNA, 25 bp, SARS Virus
cgtcctgtaccggaaaagtgatgtc

SEQ ID NO: 232569 - DNA, 25 bp, SARS Virus
gtcctgtaccgtgaaagtgatgtcg

SEQ ID NO: 232570 - DNA, 25 bp, SARS Virus
tcctgtaccgtagaagtgatgtcgt

SEQ ID NO: 232571 - DNA, 25 bp, SARS Virus
cctgtaccgtaagagtgatgtcgta

SEQ ID NO: 232572 - DNA, 25 bp, SARS Virus
ctgtaccgtaaaggtgatgtcgtaa

SEQ ID NO: 232573 - DNA, 25 bp, SARS Virus
tgtaccgtaaaagtgatgtcgtaat

SEQ ID NO: 232574 - DNA, 25 bp, SARS Virus
gtaccgtaaaagggatgtcgtaatc

SEQ ID NO: 232575 - DNA, 25 bp, SARS Virus
taccgtaaaagtgatgtcgtaatca

SEQ ID NO: 232576 - DNA, 25 bp, SARS Virus
accgtaaaagtggtgtcgtaatcat

SEQ ID NO: 232577 - DNA, 25 bp, SARS Virus
ccgtaaaagtgaggtcgtaatcatc

SEQ ID NO: 232578 - DNA, 25 bp, SARS Virus
cgtaaaagtgatgtcgtaatcatcc

SEQ ID NO: 232579 - DNA, 25 bp, SARS Virus
gtaaaagtgatggcgtaatcatcca

SEQ ID NO: 232580 - DNA, 25 bp, SARS Virus
taaaagtgatgtggtaatcatccat

SEQ ID NO: 232581 - DNA, 25 bp, SARS Virus
aaaagtgatgtcgtaatcatccatc

SEQ ID NO: 232582 - DNA, 25 bp, SARS Virus
aaagtgatgtcggaatcatccatcc

SEQ ID NO: 232583 - DNA, 25 bp, SARS Virus
aagtgatgtcgtgatcatccatcca

SEQ ID NO: 232584 - DNA, 25 bp, SARS Virus
agtgatgtcgtagtcatccatccat

SEQ ID NO: 232585 - DNA, 25 bp, SARS Virus
gtgatgtcgtaagcatccatccatg

SEQ ID NO: 232586 - DNA, 25 bp, SARS Virus
tgatgtcgtaatgatccatccatgg

SEQ ID NO: 232587 - DNA, 25 bp, SARS Virus
gatgtcgtaatcgtccatccatggg

SEQ ID NO: 232588 - DNA, 25 bp, SARS Virus
atgtcgtaatcagccatccatgggt

SEQ ID NO: 232589 - DNA, 25 bp, SARS Virus
tgtcgtaatcatgcatccatgggtg

SEQ ID NO: 232590 - DNA, 25 bp, SARS Virus
gtcgtaatcatcgatccatgggtgt

SEQ ID NO: 232591 - DNA, 25 bp, SARS Virus
tcgtaatcatccgtccatgggtgta

SEQ ID NO: 232592 - DNA, 25 bp, SARS Virus
cgtaatcatccagccatgggtgtac

SEQ ID NO: 232593 - DNA, 25 bp, SARS Virus
gtaatcatccatgcatgggtgtaca

SEQ ID NO: 232594 - DNA, 25 bp, SARS Virus
taatcatccatcgatgggtgtacat

SEQ ID NO: 232595 - DNA, 25 bp, SARS Virus
aatcatccatccgtgggtgtacatc

SEQ ID NO: 232596 - DNA, 25 bp, SARS Virus
atcatccatccaggggtgtacatca

SEQ ID NO: 232597 - DNA, 25 bp, SARS Virus
tcatccatccatgggtgtacatcat

SEQ ID NO: 232598 - DNA, 25 bp, SARS Virus
catccatccatgggtgtacatcatc

SEQ ID NO: 232599 - DNA, 25 bp, SARS Virus
atccatccatgggtgtacatcatcc

SEQ ID NO: 232600 - DNA, 25 bp, SARS Virus
tccatccatgggggtacatcatcca

SEQ ID NO: 232601 - DNA, 25 bp, SARS Virus
ccatccatgggtgtacatcatccag

SEQ ID NO: 232602 - DNA, 25 bp, SARS Virus
catccatgggtggacatcatccagg

SEQ ID NO: 232603 - DNA, 25 bp, SARS Virus
atccatgggtgtgcatcatccagga

SEQ ID NO: 232604 - DNA, 25 bp, SARS Virus
tccatgggtgtagatcatccaggaa

SEQ ID NO: 232605 - DNA, 25 bp, SARS Virus
ccatgggtgtacgtcatccaggaag

SEQ ID NO: 232606 - DNA, 25 bp, SARS Virus
catgggtgtacagcatccaggaagt

SEQ ID NO: 232607 - DNA, 25 bp, SARS Virus
atgggtgtacatgatccaggaagtt

SEQ ID NO: 232608 - DNA, 25 bp, SARS Virus
tgggtgtacatcgtccaggaagtta

SEQ ID NO: 232609 - DNA, 25 bp, SARS Virus
gggtgtacatcagccaggaagttat

SEQ ID NO: 232610 - DNA, 25 bp, SARS Virus
ggtgtacatcatgcaggaagttatt

SEQ ID NO: 232611 - DNA, 25 bp, SARS Virus
gtgtacatcatcgaggaagttattg

SEQ ID NO: 232612 - DNA, 25 bp, SARS Virus
tgtacatcatccgggaagttattga

SEQ ID NO: 232613 - DNA, 25 bp, SARS Virus
gtacatcatccaggaagttattgat

SEQ ID NO: 232614 - DNA, 25 bp, SARS Virus
tacatcatccaggaagttattgatt

SEQ ID NO: 232615 - DNA, 25 bp, SARS Virus
acatcatccagggagttattgattt

SEQ ID NO: 232616 - DNA, 25 bp, SARS Virus
catcatccaggaggttattgattta

SEQ ID NO: 232617 - DNA, 25 bp, SARS Virus
atcatccaggaagttattgatttaa

SEQ ID NO: 232618 - DNA, 25 bp, SARS Virus
tcatccaggaaggtattgatttaaa

SEQ ID NO: 232619 - DNA, 25 bp, SARS Virus
catccaggaagtgattgatttaaaa

SEQ ID NO: 232620 - DNA, 25 bp, SARS Virus
atccaggaagttgttgatttaaaag

SEQ ID NO: 232621 - DNA, 25 bp, SARS Virus
tccaggaagttagtgatttaaaagt

SEQ ID NO: 232622 - DNA, 25 bp, SARS Virus
ccaggaagttatggatttaaaagtc

SEQ ID NO: 232623 - DNA, 25 bp, SARS Virus
caggaagttattgatttaaaagtca

SEQ ID NO: 232624 - DNA, 25 bp, SARS Virus
aggaagttattggtttaaaagtcac

SEQ ID NO: 232625 - DNA, 25 bp, SARS Virus
ggaagttattgagttaaaagtcacg

SEQ ID NO: 232626 - DNA, 25 bp, SARS Virus
gaagttattgatgtaaaagtcacgg

SEQ ID NO: 232627 - DNA, 25 bp, SARS Virus
aagttattgattgaaaagtcacggt

SEQ ID NO: 232628 - DNA, 25 bp, SARS Virus
agttattgatttgaaagtcacggtg

SEQ ID NO: 232629 - DNA, 25 bp, SARS Virus
gttattgatttagaagtcacggtgt

SEQ ID NO: 232630 - DNA, 25 bp, SARS Virus
ttattgatttaagagtcacggtgtt

SEQ ID NO: 232631 - DNA, 25 bp, SARS Virus
tattgatttaaaggtcacggtgtta

SEQ ID NO: 232632 - DNA, 25 bp, SARS Virus
attgatttaaaagtcacggtgttac

SEQ ID NO: 232633 - DNA, 25 bp, SARS Virus
ttgatttaaaaggcacggtgttaca

SEQ ID NO: 232634 - DNA, 25 bp, SARS Virus
tgatttaaaagtgacggtgttacaa

SEQ ID NO: 232635 - DNA, 25 bp, SARS Virus
gatttaaaagtcgcggtgttacaag

SEQ ID NO: 232636 - DNA, 25 bp, SARS Virus
atttaaaagtcagggtgttacaagt

SEQ ID NO: 232637 - DNA, 25 bp, SARS Virus
tttaaaagtcacggtgttacaagtg

SEQ ID NO: 232638 - DNA, 25 bp, SARS Virus
ttaaaagtcacggtgttacaagtgt

SEQ ID NO: 232639 - DNA, 25 bp, SARS Virus
taaaagtcacggggttacaagtgtt

SEQ ID NO: 232640 - DNA, 25 bp, SARS Virus
aaaagtcacggtgttacaagtgttc

SEQ ID NO: 232641 - DNA, 25 bp, SARS Virus
aaagtcacggtggtacaagtgttca

SEQ ID NO: 232642 - DNA, 25 bp, SARS Virus
aagtcacggtgtgacaagtgttcac

SEQ ID NO: 232643 - DNA, 25 bp, SARS Virus
agtcacggtgttgcaagtgttcacc

SEQ ID NO: 232644 - DNA, 25 bp, SARS Virus
gtcacggtgttagaagtgttcaccg

SEQ ID NO: 232645 - DNA, 25 bp, SARS Virus
tcacggtgttacgagtgttcaccga

SEQ ID NO: 232646 - DNA, 25 bp, SARS Virus
cacggtgttacaggtgttcaccgaa

SEQ ID NO: 232647 - DNA, 25 bp, SARS Virus
acggtgttacaagtgttcaccgaaa

SEQ ID NO: 232648 - DNA, 25 bp, SARS Virus
cggtgttacaagggttcaccgaaag

SEQ ID NO: 232649 - DNA, 25 bp, SARS Virus
ggtgttacaagtgttcaccgaaagt

SEQ ID NO: 232650 - DNA, 25 bp, SARS Virus
gtgttacaagtggtcaccgaaagtc

SEQ ID NO: 232651 - DNA, 25 bp, SARS Virus
tgttacaagtgtgcaccgaaagtct

SEQ ID NO: 232652 - DNA, 25 bp, SARS Virus
gttacaagtgttgaccgaaagtctt

SEQ ID NO: 232653 - DNA, 25 bp, SARS Virus
ttacaagtgttcgccgaaagtcttt

SEQ ID NO: 232654 - DNA, 25 bp, SARS Virus
tacaagtgttcagcgaaagtctttc

SEQ ID NO: 232655 - DNA, 25 bp, SARS Virus
acaagtgttcacggaaagtctttca

SEQ ID NO: 232656 - DNA, 25 bp, SARS Virus
caagtgttcaccgaaagtctttcag

SEQ ID NO: 232657 - DNA, 25 bp, SARS Virus
aagtgttcaccggaagtctttcagc

SEQ ID NO: 232658 - DNA, 25 bp, SARS Virus
agtgttcaccgagagtctttcagcg

SEQ ID NO: 232659 - DNA, 25 bp, SARS Virus
gtgttcaccgaaggtctttcagcgt

SEQ ID NO: 232660 - DNA, 25 bp, SARS Virus
tgttcaccgaaagtctttcagcgtg

SEQ ID NO: 232661 - DNA, 25 bp, SARS Virus
gttcaccgaaaggctttcagcgtgc

SEQ ID NO: 232662 - DNA, 25 bp, SARS Virus
ttcaccgaaagtgtttcagcgtgca

SEQ ID NO: 232663 - DNA, 25 bp, SARS Virus
tcaccgaaagtcgttcagcgtgcag

SEQ ID NO: 232664 - DNA, 25 bp, SARS Virus
caccgaaagtctgtcagcgtgcaga

SEQ ID NO: 232665 - DNA, 25 bp, SARS Virus
accgaaagtcttgcagcgtgcagac

SEQ ID NO: 232666 - DNA, 25 bp, SARS Virus
ccgaaagtctttgagcgtgcagacg

SEQ ID NO: 232667 - DNA, 25 bp, SARS Virus
cgaaagtctttcggcgtgcagacgg

SEQ ID NO: 232668 - DNA, 25 bp, SARS Virus
gaaagtctttcagcgtgcagacggt

SEQ ID NO: 232669 - DNA, 25 bp, SARS Virus
aaagtctttcagggtgcagacggta

SEQ ID NO: 232670 - DNA, 25 bp, SARS Virus
aagtctttcagcgtgcagacggtac

SEQ ID NO: 232671 - DNA, 25 bp, SARS Virus
agtctttcagcgggcagacggtact

SEQ ID NO: 232672 - DNA, 25 bp, SARS Virus
gtctttcagcgtgcagacggtactt

SEQ ID NO: 232673 - DNA, 25 bp, SARS Virus
tctttcagcgtggagacggtacttt

SEQ ID NO: 232674 - DNA, 25 bp, SARS Virus
ctttcagcgtgcggacggtactttg

SEQ ID NO: 232675 - DNA, 25 bp, SARS Virus
tttcagcgtgcagacggtactttga

SEQ ID NO: 232676 - DNA, 25 bp, SARS Virus
ttcagcgtgcaggcggtactttgaa

SEQ ID NO: 232677 - DNA, 25 bp, SARS Virus
tcagcgtgcagagggtactttgaag

SEQ ID NO: 232678 - DNA, 25 bp, SARS Virus
cagcgtgcagacggtactttgaagt

SEQ ID NO: 232679 - DNA, 25 bp, SARS Virus
agcgtgcagacggtactttgaagta

SEQ ID NO: 232680 - DNA, 25 bp, SARS Virus
gcgtgcagacgggactttgaagtag

SEQ ID NO: 232681 - DNA, 25 bp, SARS Virus
cgtgcagacggtgctttgaagtagc

SEQ ID NO: 232682 - DNA, 25 bp, SARS Virus
gtgcagacggtagtttgaagtagcg

SEQ ID NO: 232683 - DNA, 25 bp, SARS Virus
tgcagacggtacgttgaagtagcgt

SEQ ID NO: 232684 - DNA, 25 bp, SARS Virus
gcagacggtactgtgaagtagcgtt

SEQ ID NO: 232685 - DNA, 25 bp, SARS Virus
cagacggtacttggaagtagcgtta

SEQ ID NO: 232686 - DNA, 25 bp, SARS Virus
agacggtactttgaagtagcgttac

SEQ ID NO: 232687 - DNA, 25 bp, SARS Virus
gacggtactttggagtagcgttact

SEQ ID NO: 232688 - DNA, 25 bp, SARS Virus
acggtactttgaggtagcgttacta

SEQ ID NO: 232689 - DNA, 25 bp, SARS Virus
cggtactttgaagtagcgttactaa

SEQ ID NO: 232690 - DNA, 25 bp, SARS Virus
ggtactttgaaggagcgttactaat

SEQ ID NO: 232691 - DNA, 25 bp, SARS Virus
gtactttgaagtggcgttactaatg

SEQ ID NO: 232692 - DNA, 25 bp, SARS Virus
tactttgaagtagcgttactaatgt

SEQ ID NO: 232693 - DNA, 25 bp, SARS Virus
actttgaagtagggttactaatgta

SEQ ID NO: 232694 - DNA, 25 bp, SARS Virus
ctttgaagtagcgttactaatgtaa

SEQ ID NO: 232695 - DNA, 25 bp, SARS Virus
tttgaagtagcggtactaatgtaaa

SEQ ID NO: 232696 - DNA, 25 bp, SARS Virus
ttgaagtagcgtgactaatgtaaag

SEQ ID NO: 232697 - DNA, 25 bp, SARS Virus
tgaagtagcgttgctaatgtaaagt

SEQ ID NO: 232698 - DNA, 25 bp, SARS Virus
gaagtagcgttagtaatgtaaagta

SEQ ID NO: 232699 - DNA, 25 bp, SARS Virus
aagtagcgttacgaatgtaaagtag

SEQ ID NO: 232700 - DNA, 25 bp, SARS Virus
agtagcgttactgatgtaaagtagt

SEQ ID NO: 232701 - DNA, 25 bp, SARS Virus
gtagcgttactagtgtaaagtagtt

SEQ ID NO: 232702 - DNA, 25 bp, SARS Virus
tagcgttactaaggtaaagtagttc

SEQ ID NO: 232703 - DNA, 25 bp, SARS Virus
agcgttactaatgtaaagtagttcc

SEQ ID NO: 232704 - DNA, 25 bp, SARS Virus
gcgttactaatggaaagtagttcca

SEQ ID NO: 232705 - DNA, 25 bp, SARS Virus
cgttactaatgtgaagtagttccat

SEQ ID NO: 232706 - DNA, 25 bp, SARS Virus
gttactaatgtagagtagttccatc

SEQ ID NO: 232707 - DNA, 25 bp, SARS Virus
ttactaatgtaaggtagttccatct

SEQ ID NO: 232708 - DNA, 25 bp, SARS Virus
tactaatgtaaagtagttccatctg

SEQ ID NO: 232709 - DNA, 25 bp, SARS Virus
actaatgtaaaggagttccatctgt

SEQ ID NO: 232710 - DNA, 25 bp, SARS Virus
ctaatgtaaagtggttccatctgtt

SEQ ID NO: 232711 - DNA, 25 bp, SARS Virus
taatgtaaagtagttccatctgttc

SEQ ID NO: 232712 - DNA, 25 bp, SARS Virus
aatgtaaagtaggtccatctgttca

SEQ ID NO: 232713 - DNA, 25 bp, SARS Virus
atgtaaagtagtgccatctgttcac

SEQ ID NO: 232714 - DNA, 25 bp, SARS Virus
tgtaaagtagttgcatctgttcacg

SEQ ID NO: 232715 - DNA, 25 bp, SARS Virus
gtaaagtagttcgatctgttcacgt

SEQ ID NO: 232716 - DNA, 25 bp, SARS Virus
taaagtagttccgtctgttcacgta

SEQ ID NO: 232717 - DNA, 25 bp, SARS Virus
aaagtagttccagctgttcacgtat

SEQ ID NO: 232718 - DNA, 25 bp, SARS Virus
aagtagttccatgtgttcacgtata

SEQ ID NO: 232719 - DNA, 25 bp, SARS Virus
agtagttccatcggttcacgtataa

SEQ ID NO: 232720 - DNA, 25 bp, SARS Virus
gtagttccatctgttcacgtataac

SEQ ID NO: 232721 - DNA, 25 bp, SARS Virus
tagttccatctggtcacgtataaca

SEQ ID NO: 232722 - DNA, 25 bp, SARS Virus
agttccatctgtgcacgtataacaa

SEQ ID NO: 232723 - DNA, 25 bp, SARS Virus
gttccatctgttgacgtataacaat

SEQ ID NO: 232724 - DNA, 25 bp, SARS Virus
ttccatctgttcgcgtataacaatg

SEQ ID NO: 232725 - DNA, 25 bp, SARS Virus
tccatctgttcaggtataacaatgt

SEQ ID NO: 232726 - DNA, 25 bp, SARS Virus
ccatctgttcacgtataacaatgtg

SEQ ID NO: 232727 - DNA, 25 bp, SARS Virus
catctgttcacggataacaatgtga

SEQ ID NO: 232728 - DNA, 25 bp, SARS Virus
atctgttcacgtgtaacaatgtgag

SEQ ID NO: 232729 - DNA, 25 bp, SARS Virus
tctgttcacgtagaacaatgtgagg

SEQ ID NO: 232730 - DNA, 25 bp, SARS Virus
ctgttcacgtatgacaatgtgagga

SEQ ID NO: 232731 - DNA, 25 bp, SARS Virus
tgttcacgtatagcaatgtgaggac

SEQ ID NO: 232732 - DNA, 25 bp, SARS Virus
gttcacgtataagaatgtgaggaca

SEQ ID NO: 232733 - DNA, 25 bp, SARS Virus
ttcacgtataacgatgtgaggacac

SEQ ID NO: 232734 - DNA, 25 bp, SARS Virus
tcacgtataacagtgtgaggacacc

SEQ ID NO: 232735 - DNA, 25 bp, SARS Virus
cacgtataacaaggtgaggacacct

SEQ ID NO: 232736 - DNA, 25 bp, SARS Virus
acgtataacaatgtgaggacacctc

SEQ ID NO: 232737 - DNA, 25 bp, SARS Virus
cgtataacaatgggaggacacctct

SEQ ID NO: 232738 - DNA, 25 bp, SARS Virus
gtataacaatgtgaggacacctcta

SEQ ID NO: 232739 - DNA, 25 bp, SARS Virus
tataacaatgtggggacacctctac

SEQ ID NO: 232740 - DNA, 25 bp, SARS Virus
ataacaatgtgaggacacctctacg

SEQ ID NO: 232741 - DNA, 25 bp, SARS Virus
taacaatgtgaggacacctctacgt

SEQ ID NO: 232742 - DNA, 25 bp, SARS Virus
aacaatgtgagggcacctctacgtt

SEQ ID NO: 232743 - DNA, 25 bp, SARS Virus
acaatgtgaggagacctctacgttg

SEQ ID NO: 232744 - DNA, 25 bp, SARS Virus
caatgtgaggacgcctctacgttgt

SEQ ID NO: 232745 - DNA, 25 bp, SARS Virus
aatgtgaggacagctctacgttgtc

SEQ ID NO: 232746 - DNA, 25 bp, SARS Virus
atgtgaggacacgtctacgttgtcc

SEQ ID NO: 232747 - DNA, 25 bp, SARS Virus
tgtgaggacaccgctacgttgtccc

SEQ ID NO: 232748 - DNA, 25 bp, SARS Virus
gtgaggacacctgtacgttgtccca

SEQ ID NO: 232749 - DNA, 25 bp, SARS Virus
tgaggacacctcgacgttgtcccat

SEQ ID NO: 232750 - DNA, 25 bp, SARS Virus
gaggacacctctgcgttgtcccatg

SEQ ID NO: 232751 - DNA, 25 bp, SARS Virus
aggacacctctaggttgtcccatgt

SEQ ID NO: 232752 - DNA, 25 bp, SARS Virus
ggacacctctacgttgtcccatgtg

SEQ ID NO: 232753 - DNA, 25 bp, SARS Virus
gacacctctacggtgtcccatgtgt

SEQ ID NO: 232754 - DNA, 25 bp, SARS Virus
acacctctacgtggtcccatgtgtc

SEQ ID NO: 232755 - DNA, 25 bp, SARS Virus
cacctctacgttgtcccatgtgtct

SEQ ID NO: 232756 - DNA, 25 bp, SARS Virus
acctctacgttggcccatgtgtctc

SEQ ID NO: 232757 - DNA, 25 bp, SARS Virus
cctctacgttgtgccatgtgtctcg

SEQ ID NO: 232758 - DNA, 25 bp, SARS Virus
ctctacgttgtcgcatgtgtctcgc

SEQ ID NO: 232759 - DNA, 25 bp, SARS Virus
tctacgttgtccgatgtgtctcgca

SEQ ID NO: 232760 - DNA, 25 bp, SARS Virus
ctacgttgtcccgtgtgtctcgcat

SEQ ID NO: 232761 - DNA, 25 bp, SARS Virus
tacgttgtcccaggtgtctcgcata

SEQ ID NO: 232762 - DNA, 25 bp, SARS Virus
acgttgtcccatgtgtctcgcatat

SEQ ID NO: 232763 - DNA, 25 bp, SARS Virus
cgttgtcccatgggtctcgcatatg

SEQ ID NO: 232764 - DNA, 25 bp, SARS Virus
gttgtcccatgtgtctcgcatatgc

SEQ ID NO: 232765 - DNA, 25 bp, SARS Virus
ttgtcccatgtggctcgcatatgcg

SEQ ID NO: 232766 - DNA, 25 bp, SARS Virus
tgtcccatgtgtgtcgcatatgcgg

SEQ ID NO: 232767 - DNA, 25 bp, SARS Virus
gtcccatgtgtcgcgcatatgcggg

SEQ ID NO: 232768 - DNA, 25 bp, SARS Virus
tcccatgtgtctggcatatgcgggg

SEQ ID NO: 232769 - DNA, 25 bp, SARS Virus
cccatgtgtctcgcatatgcggggt

SEQ ID NO: 232770 - DNA, 25 bp, SARS Virus
ccatgtgtctcggatatgcggggta

SEQ ID NO: 232771 - DNA, 25 bp, SARS Virus
catgtgtctcgcgtatgcggggtac

SEQ ID NO: 232772 - DNA, 25 bp, SARS Virus
atgtgtctcgcagatgcggggtact

SEQ ID NO: 232773 - DNA, 25 bp, SARS Virus
tgtgtctcgcatgtgcggggtactt

SEQ ID NO: 232774 - DNA, 25 bp, SARS Virus
gtgtctcgcataggcggggtacttt

SEQ ID NO: 232775 - DNA, 25 bp, SARS Virus
tgtctcgcatatgcggggtactttg

SEQ ID NO: 232776 - DNA, 25 bp, SARS Virus
gtctcgcatatggggggtactttgg

SEQ ID NO: 232777 - DNA, 25 bp, SARS Virus
tctcgcatatgcggggtactttggg

SEQ ID NO: 232778 - DNA, 25 bp, SARS Virus
ctcgcatatgcggggtactttggga

SEQ ID NO: 232779 - DNA, 25 bp, SARS Virus
tcgcatatgcggggtactttgggag

SEQ ID NO: 232780 - DNA, 25 bp, SARS Virus
cgcatatgcggggtactttgggagt

SEQ ID NO: 232781 - DNA, 25 bp, SARS Virus
gcatatgcgggggactttgggagtc

SEQ ID NO: 232782 - DNA, 25 bp, SARS Virus
catatgcggggtgctttgggagtca

SEQ ID NO: 232783 - DNA, 25 bp, SARS Virus
atatgcggggtagtttgggagtcag

SEQ ID NO: 232784 - DNA, 25 bp, SARS Virus
tatgcggggtacgttgggagtcaga

SEQ ID NO: 232785 - DNA, 25 bp, SARS Virus
atgcggggtactgtgggagtcagaa

SEQ ID NO: 232786 - DNA, 25 bp, SARS Virus
tgcggggtacttggggagtcagaaa

SEQ ID NO: 232787 - DNA, 25 bp, SARS Virus
gcggggtactttgggagtcagaaaa

SEQ ID NO: 232788 - DNA, 25 bp, SARS Virus
cggggtactttgggagtcagaaaaa

SEQ ID NO: 232789 - DNA, 25 bp, SARS Virus
ggggtactttgggagtcagaaaaag

SEQ ID NO: 232790 - DNA, 25 bp, SARS Virus
gggtactttgggggtcagaaaaaga

SEQ ID NO: 232791 - DNA, 25 bp, SARS Virus
ggtactttgggagtcagaaaaagaa

SEQ ID NO: 232792 - DNA, 25 bp, SARS Virus
gtactttgggaggcagaaaaagaaa

SEQ ID NO: 232793 - DNA, 25 bp, SARS Virus
tactttgggagtgagaaaaagaaaa

SEQ ID NO: 232794 - DNA, 25 bp, SARS Virus
actttgggagtcggaaaaagaaaag

SEQ ID NO: 232795 - DNA, 25 bp, SARS Virus
ctttgggagtcagaaaaagaaaagt

SEQ ID NO: 232796 - DNA, 25 bp, SARS Virus
tttgggagtcaggaaaagaaaagtt

SEQ ID NO: 232797 - DNA, 25 bp, SARS Virus
ttgggagtcagagaaagaaaagttg

SEQ ID NO: 232798 - DNA, 25 bp, SARS Virus
tgggagtcagaagaagaaaagttgt

SEQ ID NO: 232799 - DNA, 25 bp, SARS Virus
gggagtcagaaagagaaaagttgtg

SEQ ID NO: 232800 - DNA, 25 bp, SARS Virus
ggagtcagaaaaggaaaagttgtgc

SEQ ID NO: 232801 - DNA, 25 bp, SARS Virus
gagtcagaaaaagaaaagttgtgca

SEQ ID NO: 232802 - DNA, 25 bp, SARS Virus
agtcagaaaaaggaaagttgtgcac

SEQ ID NO: 232803 - DNA, 25 bp, SARS Virus
gtcagaaaaagagaagttgtgcacc

SEQ ID NO: 232804 - DNA, 25 bp, SARS Virus
tcagaaaaagaagagttgtgcacca

SEQ ID NO: 232805 - DNA, 25 bp, SARS Virus
cagaaaaagaaaggttgtgcaccaa

SEQ ID NO: 232806 - DNA, 25 bp, SARS Virus
agaaaaagaaaagttgtgcaccaac

SEQ ID NO: 232807 - DNA, 25 bp, SARS Virus
gaaaaagaaaaggtgtgcaccaact

SEQ ID NO: 232808 - DNA, 25 bp, SARS Virus
aaaaagaaaagtggtgcaccaactt

SEQ ID NO: 232809 - DNA, 25 bp, SARS Virus
gtcatagagttcttctaggagtaag

SEQ ID NO: 232810 - DNA, 25 bp, SARS Virus
tcatagagttcctctaggagtaagt

SEQ ID NO: 232811 - DNA, 25 bp, SARS Virus
catagagttcctttaggagtaagtt

SEQ ID NO: 232812 - DNA, 25 bp, SARS Virus
atagagttcctctaggagtaagttc

SEQ ID NO: 232813 - DNA, 25 bp, SARS Virus
tagagttcctcttggagtaagttcc

SEQ ID NO: 232814 - DNA, 25 bp, SARS Virus
agagttcctctatgagtaagttcca

SEQ ID NO: 232815 - DNA, 25 bp, SARS Virus
gagttcctctagtagtaagttccag

SEQ ID NO: 232816 - DNA, 25 bp, SARS Virus
agttcctctaggtgtaagttccaga

SEQ ID NO: 232817 - DNA, 25 bp, SARS Virus
gttcctctaggattaagttccagag

SEQ ID NO: 232818 - DNA, 25 bp, SARS Virus
ttcctctaggagtaagttccagagg

SEQ ID NO: 232819 - DNA, 25 bp, SARS Virus
tcctctaggagttagttccagaggt

SEQ ID NO: 232820 - DNA, 25 bp, SARS Virus
cctctaggagtatgttccagaggtg

SEQ ID NO: 232821 - DNA, 25 bp, SARS Virus
ctctaggagtaatttccagaggtgt

SEQ ID NO: 232822 - DNA, 25 bp, SARS Virus
tctaggagtaagttccagaggtgta

SEQ ID NO: 232823 - DNA, 25 bp, SARS Virus
ctaggagtaagttccagaggtgtaa

SEQ ID NO: 232824 - DNA, 25 bp, SARS Virus
taggagtaagtttcagaggtgtaac

SEQ ID NO: 232825 - DNA, 25 bp, SARS Virus
aggagtaagttctagaggtgtaaca

SEQ ID NO: 232826 - DNA, 25 bp, SARS Virus
ggagtaagttcctgaggtgtaacag

SEQ ID NO: 232827 - DNA, 25 bp, SARS Virus
gagtaagttccataggtgtaacagt

SEQ ID NO: 232828 - DNA, 25 bp, SARS Virus
agtaagttccagtggtgtaacagtg

SEQ ID NO: 232829 - DNA, 25 bp, SARS Virus
gtaagttccagatgtgtaacagtgg

SEQ ID NO: 232830 - DNA, 25 bp, SARS Virus
taagttccagagttgtaacagtggt

SEQ ID NO: 232831 - DNA, 25 bp, SARS Virus
aagttccagaggtgtaacagtggtc

SEQ ID NO: 232832 - DNA, 25 bp, SARS Virus
agttccagaggtttaacagtggtca

SEQ ID NO: 232833 - DNA, 25 bp, SARS Virus
gttccagaggtgtaacagtggtcat

SEQ ID NO: 232834 - DNA, 25 bp, SARS Virus
ttccagaggtgttacagtggtcatt

SEQ ID NO: 232835 - DNA, 25 bp, SARS Virus
tccagaggtgtatcagtggtcatta

SEQ ID NO: 232836 - DNA, 25 bp, SARS Virus
ccagaggtgtaatagtggtcattac

SEQ ID NO: 232837 - DNA, 25 bp, SARS Virus
cagaggtgtaactgtggtcattacg

SEQ ID NO: 232838 - DNA, 25 bp, SARS Virus
agaggtgtaacattggtcattacgg

SEQ ID NO: 232839 - DNA, 25 bp, SARS Virus
gaggtgtaacagtggtcattacggt

SEQ ID NO: 232840 - DNA, 25 bp, SARS Virus
aggtgtaacagttgtcattacggtc

SEQ ID NO: 232841 - DNA, 25 bp, SARS Virus
ggtgtaacagtgttcattacggtca

SEQ ID NO: 232842 - DNA, 25 bp, SARS Virus
gtgtaacagtggtcattacggtcat

SEQ ID NO: 232843 - DNA, 25 bp, SARS Virus
tgtaacagtggttattacggtcata

SEQ ID NO: 232844 - DNA, 25 bp, SARS Virus
gtaacagtggtctttacggtcatac

SEQ ID NO: 232845 - DNA, 25 bp, SARS Virus
taacagtggtcattacggtcatacc

SEQ ID NO: 232846 - DNA, 25 bp, SARS Virus
aacagtggtcattacggtcataccg

SEQ ID NO: 232847 - DNA, 25 bp, SARS Virus
acagtggtcatttcggtcataccgg

SEQ ID NO: 232848 - DNA, 25 bp, SARS Virus
cagtggtcattatggtcataccgga

SEQ ID NO: 232849 - DNA, 25 bp, SARS Virus
agtggtcattactgtcataccggac

SEQ ID NO: 232850 - DNA, 25 bp, SARS Virus
gtggtcattacgttcataccggact

SEQ ID NO: 232851 - DNA, 25 bp, SARS Virus
tggtcattacggtcataccggactc

SEQ ID NO: 232852 - DNA, 25 bp, SARS Virus
ggtcattacggttataccggactcg

SEQ ID NO: 232853 - DNA, 25 bp, SARS Virus
gtcattacggtcttaccggactcgg

SEQ ID NO: 232854 - DNA, 25 bp, SARS Virus
tcattacggtcataccggactcggt

SEQ ID NO: 232855 - DNA, 25 bp, SARS Virus
cattacggtcattccggactcggtt

SEQ ID NO: 232856 - DNA, 25 bp, SARS Virus
attacggtcatatcggactcggtta

SEQ ID NO: 232857 - DNA, 25 bp, SARS Virus
ttacggtcatactggactcggttat

SEQ ID NO: 232858 - DNA, 25 bp, SARS Virus
tacggtcatacctgactcggttata

SEQ ID NO: 232859 - DNA, 25 bp, SARS Virus
acggtcataccgtactcggttatag

SEQ ID NO: 232860 - DNA, 25 bp, SARS Virus
cggtcataccggtctcggttatagt

SEQ ID NO: 232861 - DNA, 25 bp, SARS Virus
ggtcataccggattcggttatagtc

SEQ ID NO: 232862 - DNA, 25 bp, SARS Virus
gtcataccggactcggttatagtcg

SEQ ID NO: 232863 - DNA, 25 bp, SARS Virus
tcataccggacttggttatagtcgt

SEQ ID NO: 232864 - DNA, 25 bp, SARS Virus
cataccggactctgttatagtcgtg

SEQ ID NO: 232865 - DNA, 25 bp, SARS Virus
ataccggactcgtttatagtcgtga

SEQ ID NO: 232866 - DNA, 25 bp, SARS Virus
taccggactcggttatagtcgtgat

SEQ ID NO: 232867 - DNA, 25 bp, SARS Virus
accggactcggttatagtcgtgatc

SEQ ID NO: 232868 - DNA, 25 bp, SARS Virus
ccggactcggttttagtcgtgatcg

SEQ ID NO: 232869 - DNA, 25 bp, SARS Virus
cggactcggttatagtcgtgatcgt

SEQ ID NO: 232870 - DNA, 25 bp, SARS Virus
ggactcggttattgtcgtgatcgtg

SEQ ID NO: 232871 - DNA, 25 bp, SARS Virus
gactcggttatattcgtgatcgtgc

SEQ ID NO: 232872 - DNA, 25 bp, SARS Virus
actcggttatagtcgtgatcgtgct

SEQ ID NO: 232873 - DNA, 25 bp, SARS Virus
ctcggttatagttgtgatcgtgctc

SEQ ID NO: 232874 - DNA, 25 bp, SARS Virus
tcggttatagtcttgatcgtgctcc

SEQ ID NO: 232875 - DNA, 25 bp, SARS Virus
cggttatagtcgtgatcgtgctcct

SEQ ID NO: 232876 - DNA, 25 bp, SARS Virus
ggttatagtcgttatcgtgctcctt

SEQ ID NO: 232877 - DNA, 25 bp, SARS Virus
gttatagtcgtgttcgtgctccttg

SEQ ID NO: 232878 - DNA, 25 bp, SARS Virus
ttatagtcgtgatcgtgctccttgg

SEQ ID NO: 232879 - DNA, 25 bp, SARS Virus
tatagtcgtgattgtgctccttggg

SEQ ID NO: 232880 - DNA, 25 bp, SARS Virus
atagtcgtgatcttgctccttgggt

SEQ ID NO: 232881 - DNA, 25 bp, SARS Virus
tagtcgtgatcgtgctccttgggtc

SEQ ID NO: 232882 - DNA, 25 bp, SARS Virus
agtcgtgatcgttctccttgggtca

SEQ ID NO: 232883 - DNA, 25 bp, SARS Virus
gtcgtgatcgtgttccttgggtcat

SEQ ID NO: 232884 - DNA, 25 bp, SARS Virus
tcgtgatcgtgctccttgggtcatc

SEQ ID NO: 232885 - DNA, 25 bp, SARS Virus
cgtgatcgtgcttcttgggtcatcc

SEQ ID NO: 232886 - DNA, 25 bp, SARS Virus
gtgatcgtgctctttgggtcatccg

SEQ ID NO: 232887 - DNA, 25 bp, SARS Virus
tgatcgtgctccttgggtcatccgt

SEQ ID NO: 232888 - DNA, 25 bp, SARS Virus
gatcgtgctccttgggtcatccgtg

SEQ ID NO: 232889 - DNA, 25 bp, SARS Virus
atcgtgctcctttggtcatccgtgc

SEQ ID NO: 232890 - DNA, 25 bp, SARS Virus
tcgtgctccttgtgtcatccgtgcg

SEQ ID NO: 232891 - DNA, 25 bp, SARS Virus
cgtgctccttggttcatccgtgcga

SEQ ID NO: 232892 - DNA, 25 bp, SARS Virus
gtgctccttgggtcatccgtgcgaa

SEQ ID NO: 232893 - DNA, 25 bp, SARS Virus
tgctccttgggttatccgtgcgaat

SEQ ID NO: 232894 - DNA, 25 bp, SARS Virus
gctccttgggtcttccgtgcgaata

SEQ ID NO: 232895 - DNA, 25 bp, SARS Virus
ctccttgggtcatccgtgcgaataa

SEQ ID NO: 232896 - DNA, 25 bp, SARS Virus
tccttgggtcattcgtgcgaataat

SEQ ID NO: 232897 - DNA, 25 bp, SARS Virus
ccttgggtcatctgtgcgaataata

SEQ ID NO: 232898 - DNA, 25 bp, SARS Virus
cttgggtcatccttgcgaataatat

SEQ ID NO: 232899 - DNA, 25 bp, SARS Virus
ttgggtcatccgtgcgaataatatc

SEQ ID NO: 232900 - DNA, 25 bp, SARS Virus
tgggtcatccgttcgaataatatcg

SEQ ID NO: 232901 - DNA, 25 bp, SARS Virus
gggtcatccgtgtgaataatatcgt

SEQ ID NO: 232902 - DNA, 25 bp, SARS Virus
ggtcatccgtgctaataatatcgtc

SEQ ID NO: 232903 - DNA, 25 bp, SARS Virus
gtcatccgtgcgtataatatcgtcg

SEQ ID NO: 232904 - DNA, 25 bp, SARS Virus
tcatccgtgcgattaatatcgtcgg

SEQ ID NO: 232905 - DNA, 25 bp, SARS Virus
catccgtgcgaataatatcgtcggt

SEQ ID NO: 232906 - DNA, 25 bp, SARS Virus
atccgtgcgaattatatcgtcggtt

SEQ ID NO: 232907 - DNA, 25 bp, SARS Virus
tccgtgcgaatattatcgtcggttg

SEQ ID NO: 232908 - DNA, 25 bp, SARS Virus
ccgtgcgaataatatcgtcggttgt

SEQ ID NO: 232909 - DNA, 25 bp, SARS Virus
cgtgcgaataatttcgtcggttgta

SEQ ID NO: 232910 - DNA, 25 bp, SARS Virus
gtgcgaataatatcgtcggttgtat

SEQ ID NO: 232911 - DNA, 25 bp, SARS Virus
tgcgaataatattgtcggttgtatc

SEQ ID NO: 232912 - DNA, 25 bp, SARS Virus
gcgaataatatcttcggttgtatcc

SEQ ID NO: 232913 - DNA, 25 bp, SARS Virus
cgaataatatcgtcggttgtatccg

SEQ ID NO: 232914 - DNA, 25 bp, SARS Virus
gaataatatcgttggttgtatccgt

SEQ ID NO: 232915 - DNA, 25 bp, SARS Virus
aataatatcgtctgttgtatccgtt

SEQ ID NO: 232916 - DNA, 25 bp, SARS Virus
ataatatcgtcgtttgtatccgttt

SEQ ID NO: 232917 - DNA, 25 bp, SARS Virus
taatatcgtcggttgtatccgtttg

SEQ ID NO: 232918 - DNA, 25 bp, SARS Virus
aatatcgtcggttgtatccgtttgt

SEQ ID NO: 232919 - DNA, 25 bp, SARS Virus
atatcgtcggttttatccgtttgtg

SEQ ID NO: 232920 - DNA, 25 bp, SARS Virus
tatcgtcggttgtatccgtttgtgt

SEQ ID NO: 232921 - DNA, 25 bp, SARS Virus
atcgtcggttgtttccgtttgtgtg

SEQ ID NO: 232922 - DNA, 25 bp, SARS Virus
tcgtcggttgtatccgtttgtgtgt

SEQ ID NO: 232923 - DNA, 25 bp, SARS Virus
cgtcggttgtattcgtttgtgtgtc

SEQ ID NO: 232924 - DNA, 25 bp, SARS Virus
gtcggttgtatctgtttgtgtgtcg

SEQ ID NO: 232925 - DNA, 25 bp, SARS Virus
tcggttgtatccttttgtgtgtcgg

SEQ ID NO: 232926 - DNA, 25 bp, SARS Virus
cggttgtatccgtttgtgtgtcgga

SEQ ID NO: 232927 - DNA, 25 bp, SARS Virus
ggttgtatccgtttgtgtgtcggag

SEQ ID NO: 232928 - DNA, 25 bp, SARS Virus
gttgtatccgtttgtgtgtcggagg

SEQ ID NO: 232929 - DNA, 25 bp, SARS Virus
ttgtatccgtttttgtgtcggaggt

SEQ ID NO: 232930 - DNA, 25 bp, SARS Virus
tgtatccgtttgtgtgtcggaggtt

SEQ ID NO: 232931 - DNA, 25 bp, SARS Virus
gtatccgtttgtttgtcggaggttt

SEQ ID NO: 232932 - DNA, 25 bp, SARS Virus
tatccgtttgtgtgtcggaggtttt

SEQ ID NO: 232933 - DNA, 25 bp, SARS Virus
atccgtttgtgtttcggaggttttg

SEQ ID NO: 232934 - DNA, 25 bp, SARS Virus
tccgtttgtgtgtcggaggttttgt

SEQ ID NO: 232935 - DNA, 25 bp, SARS Virus
ccgtttgtgtgttggaggttttgta

SEQ ID NO: 232936 - DNA, 25 bp, SARS Virus
cgtttgtgtgtctgaggttttgtag

SEQ ID NO: 232937 - DNA, 25 bp, SARS Virus
gtttgtgtgtcgtaggttttgtaga

SEQ ID NO: 232938 - DNA, 25 bp, SARS Virus
tttgtgtgtcggtggttttgtagat

SEQ ID NO: 232939 - DNA, 25 bp, SARS Virus
ttgtgtgtcggatgttttgtagatc

SEQ ID NO: 232940 - DNA, 25 bp, SARS Virus
tgtgtgtcggagtttttgtagatca

SEQ ID NO: 232941 - DNA, 25 bp, SARS Virus
gtgtgtcggaggttttgtagatcag

SEQ ID NO: 232942 - DNA, 25 bp, SARS Virus
tgtgtcggaggttttgtagatcagg

SEQ ID NO: 232943 - DNA, 25 bp, SARS Virus
gtgtcggaggttttgtagatcagga

SEQ ID NO: 232944 - DNA, 25 bp, SARS Virus
tgtcggaggttttgtagatcaggat

SEQ ID NO: 232945 - DNA, 25 bp, SARS Virus
gtcggaggttttttagatcaggatg

SEQ ID NO: 232946 - DNA, 25 bp, SARS Virus
tcggaggttttgtagatcaggatgg

SEQ ID NO: 232947 - DNA, 25 bp, SARS Virus
cggaggttttgttgatcaggatgga

SEQ ID NO: 232948 - DNA, 25 bp, SARS Virus
ggaggttttgtatatcaggatggag

SEQ ID NO: 232949 - DNA, 25 bp, SARS Virus
gaggttttgtagttcaggatggagg

SEQ ID NO: 232950 - DNA, 25 bp, SARS Virus
aggttttgtagatcaggatggaggg

SEQ ID NO: 232951 - DNA, 25 bp, SARS Virus
ggttttgtagattaggatggaggga

SEQ ID NO: 232952 - DNA, 25 bp, SARS Virus
gttttgtagatctggatggagggaa

SEQ ID NO: 232953 - DNA, 25 bp, SARS Virus
ttttgtagatcatgatggagggaac

SEQ ID NO: 232954 - DNA, 25 bp, SARS Virus
tttgtagatcagtatggagggaacg

SEQ ID NO: 232955 - DNA, 25 bp, SARS Virus
ttgtagatcaggttggagggaacgc

SEQ ID NO: 232956 - DNA, 25 bp, SARS Virus
tgtagatcaggatggagggaacgcc

SEQ ID NO: 232957 - DNA, 25 bp, SARS Virus
gtagatcaggattgagggaacgcct

SEQ ID NO: 232958 - DNA, 25 bp, SARS Virus
tagatcaggatgtagggaacgcctc

SEQ ID NO: 232959 - DNA, 25 bp, SARS Virus
agatcaggatggtgggaacgcctca

SEQ ID NO: 232960 - DNA, 25 bp, SARS Virus
gatcaggatggatggaacgcctcag

SEQ ID NO: 232961 - DNA, 25 bp, SARS Virus
atcaggatggagtgaacgcctcagc

SEQ ID NO: 232962 - DNA, 25 bp, SARS Virus
tcaggatggaggtaacgcctcagct

SEQ ID NO: 232963 - DNA, 25 bp, SARS Virus
caggatggagggtacgcctcagctc

SEQ ID NO: 232964 - DNA, 25 bp, SARS Virus
aggatggagggatcgcctcagctca

SEQ ID NO: 232965 - DNA, 25 bp, SARS Virus
ggatggagggaatgcctcagctcaa

SEQ ID NO: 232966 - DNA, 25 bp, SARS Virus
gatggagggaactcctcagctcaaa

SEQ ID NO: 232967 - DNA, 25 bp, SARS Virus
atggagggaacgtctcagctcaaag

SEQ ID NO: 232968 - DNA, 25 bp, SARS Virus
tggagggaacgcttcagctcaaagt

SEQ ID NO: 232969 - DNA, 25 bp, SARS Virus
ggagggaacgcctcagctcaaagtt

SEQ ID NO: 232970 - DNA, 25 bp, SARS Virus
gagggaacgccttagctcaaagtta

SEQ ID NO: 232971 - DNA, 25 bp, SARS Virus
agggaacgcctctgctcaaagttac

SEQ ID NO: 232972 - DNA, 25 bp, SARS Virus
gggaacgcctcatctcaaagttaca

SEQ ID NO: 232973 - DNA, 25 bp, SARS Virus
ggaacgcctcagttcaaagttacaa

SEQ ID NO: 232974 - DNA, 25 bp, SARS Virus
gaacgcctcagctcaaagttacaaa

SEQ ID NO: 232975 - DNA, 25 bp, SARS Virus
aacgcctcagcttaaagttacaaac

SEQ ID NO: 232976 - DNA, 25 bp, SARS Virus
acgcctcagctctaagttacaaact

SEQ ID NO: 232977 - DNA, 25 bp, SARS Virus
cgcctcagctcatagttacaaactc

SEQ ID NO: 232978 - DNA, 25 bp, SARS Virus
gcctcagctcaatgttacaaactca

SEQ ID NO: 232979 - DNA, 25 bp, SARS Virus
cctcagctcaaatttacaaactcac

SEQ ID NO: 232980 - DNA, 25 bp, SARS Virus
ctcagctcaaagttacaaactcacc

SEQ ID NO: 232981 - DNA, 25 bp, SARS Virus
tcagctcaaagttacaaactcacca

SEQ ID NO: 232982 - DNA, 25 bp, SARS Virus
cagctcaaagtttcaaactcaccaa

SEQ ID NO: 232983 - DNA, 25 bp, SARS Virus
agctcaaagttataaactcaccaac

SEQ ID NO: 232984 - DNA, 25 bp, SARS Virus
gctcaaagttactaactcaccaaca

SEQ ID NO: 232985 - DNA, 25 bp, SARS Virus
ctcaaagttacatactcaccaacac

SEQ ID NO: 232986 - DNA, 25 bp, SARS Virus
tcaaagttacaatctcaccaacact

SEQ ID NO: 232987 - DNA, 25 bp, SARS Virus
caaagttacaaattcaccaacacta

SEQ ID NO: 232988 - DNA, 25 bp, SARS Virus
aaagttacaaactcaccaacactat

SEQ ID NO: 232989 - DNA, 25 bp, SARS Virus
aagttacaaacttaccaacactatt

SEQ ID NO: 232990 - DNA, 25 bp, SARS Virus
agttacaaactctccaacactatta

SEQ ID NO: 232991 - DNA, 25 bp, SARS Virus
gttacaaactcatcaacactattag

SEQ ID NO: 232992 - DNA, 25 bp, SARS Virus
ttacaaactcactaacactattaga

SEQ ID NO: 232993 - DNA, 25 bp, SARS Virus
tacaaactcacctacactattagac

SEQ ID NO: 232994 - DNA, 25 bp, SARS Virus
acaaactcaccatcactattagacg

SEQ ID NO: 232995 - DNA, 25 bp, SARS Virus
caaactcaccaatactattagacgt

SEQ ID NO: 232996 - DNA, 25 bp, SARS Virus
aaactcaccaactctattagacgtt

SEQ ID NO: 232997 - DNA, 25 bp, SARS Virus
aactcaccaacattattagacgttg

SEQ ID NO: 232998 - DNA, 25 bp, SARS Virus
actcaccaacactattagacgttgt

SEQ ID NO: 232999 - DNA, 25 bp, SARS Virus
ctcaccaacacttttagacgttgtg

SEQ ID NO: 233000 - DNA, 25 bp, SARS Virus
tcaccaacactattagacgttgtga

SEQ ID NO: 233001 - DNA, 25 bp, SARS Virus
caccaacactattagacgttgtgat

SEQ ID NO: 233002 - DNA, 25 bp, SARS Virus
accaacactatttgacgttgtgata

SEQ ID NO: 233003 - DNA, 25 bp, SARS Virus
ccaacactattatacgttgtgatac

SEQ ID NO: 233004 - DNA, 25 bp, SARS Virus
caacactattagtcgttgtgatacg

SEQ ID NO: 233005 - DNA, 25 bp, SARS Virus
aacactattagatgttgtgatacga

SEQ ID NO: 233006 - DNA, 25 bp, SARS Virus
acactattagactttgtgatacgag

SEQ ID NO: 233007 - DNA, 25 bp, SARS Virus
cactattagacgttgtgatacgagt

SEQ ID NO: 233008 - DNA, 25 bp, SARS Virus
actattagacgttgtgatacgagtc

SEQ ID NO: 233009 - DNA, 25 bp, SARS Virus
ctattagacgttttgatacgagtcc

SEQ ID NO: 233010 - DNA, 25 bp, SARS Virus
tattagacgttgtgatacgagtcca

SEQ ID NO: 233011 - DNA, 25 bp, SARS Virus
attagacgttgttatacgagtccag

SEQ ID NO: 233012 - DNA, 25 bp, SARS Virus
ttagacgttgtgttacgagtccagg

SEQ ID NO: 233013 - DNA, 25 bp, SARS Virus
tagacgttgtgatacgagtccaggt

SEQ ID NO: 233014 - DNA, 25 bp, SARS Virus
agacgttgtgattcgagtccaggtt

SEQ ID NO: 233015 - DNA, 25 bp, SARS Virus
gacgttgtgatatgagtccaggtta

SEQ ID NO: 233016 - DNA, 25 bp, SARS Virus
acgttgtgatactagtccaggttag

SEQ ID NO: 233017 - DNA, 25 bp, SARS Virus
cgttgtgatacgtgtccaggttaga

SEQ ID NO: 233018 - DNA, 25 bp, SARS Virus
gttgtgatacgattccaggttagag

SEQ ID NO: 233019 - DNA, 25 bp, SARS Virus
ttgtgatacgagtccaggttagaga

SEQ ID NO: 233020 - DNA, 25 bp, SARS Virus
tgtgatacgagttcaggttagagac

SEQ ID NO: 233021 - DNA, 25 bp, SARS Virus
gtgatacgagtctaggttagagacc

SEQ ID NO: 233022 - DNA, 25 bp, SARS Virus
tgatacgagtcctggttagagaccc

SEQ ID NO: 233023 - DNA, 25 bp, SARS Virus
gatacgagtccatgttagagaccca

SEQ ID NO: 233024 - DNA, 25 bp, SARS Virus
atacgagtccagtttagagacccag

SEQ ID NO: 233025 - DNA, 25 bp, SARS Virus
tacgagtccaggttagagacccaga

SEQ ID NO: 233026 - DNA, 25 bp, SARS Virus
acgagtccaggttagagacccagaa

SEQ ID NO: 233027 - DNA, 25 bp, SARS Virus
cgagtccaggtttgagacccagaac

SEQ ID NO: 233028 - DNA, 25 bp, SARS Virus
gagtccaggttatagacccagaact

SEQ ID NO: 233029 - DNA, 25 bp, SARS Virus
agtccaggttagtgacccagaactg

SEQ ID NO: 233030 - DNA, 25 bp, SARS Virus
gtccaggttagatacccagaactgt

SEQ ID NO: 233031 - DNA, 25 bp, SARS Virus
tccaggttagagtcccagaactgtc

SEQ ID NO: 233032 - DNA, 25 bp, SARS Virus
ccaggttagagatccagaactgtcc

SEQ ID NO: 233033 - DNA, 25 bp, SARS Virus
caggttagagactcagaactgtccg

SEQ ID NO: 233034 - DNA, 25 bp, SARS Virus
aggttagagacctagaactgtccgt

SEQ ID NO: 233035 - DNA, 25 bp, SARS Virus
ggttagagaccctgaactgtccgtc

SEQ ID NO: 233036 - DNA, 25 bp, SARS Virus
gttagagacccataactgtccgtcc

SEQ ID NO: 233037 - DNA, 25 bp, SARS Virus
ttagagacccagtactgtccgtcct

SEQ ID NO: 233038 - DNA, 25 bp, SARS Virus
tagagacccagatctgtccgtcctg

SEQ ID NO: 233039 - DNA, 25 bp, SARS Virus
agagacccagaattgtccgtcctgt

SEQ ID NO: 233040 - DNA, 25 bp, SARS Virus
gagacccagaactgtccgtcctgta

SEQ ID NO: 233041 - DNA, 25 bp, SARS Virus
agacccagaactttccgtcctgtac

SEQ ID NO: 233042 - DNA, 25 bp, SARS Virus
gacccagaactgtccgtcctgtacc

SEQ ID NO: 233043 - DNA, 25 bp, SARS Virus
acccagaactgttcgtcctgtaccg

SEQ ID NO: 233044 - DNA, 25 bp, SARS Virus
cccagaactgtctgtcctgtaccgt

SEQ ID NO: 233045 - DNA, 25 bp, SARS Virus
ccagaactgtccttcctgtaccgta

SEQ ID NO: 233046 - DNA, 25 bp, SARS Virus
cagaactgtccgtcctgtaccgtaa

SEQ ID NO: 233047 - DNA, 25 bp, SARS Virus
agaactgtccgttctgtaccgtaaa

SEQ ID NO: 233048 - DNA, 25 bp, SARS Virus
gaactgtccgtcttgtaccgtaaaa

SEQ ID NO: 233049 - DNA, 25 bp, SARS Virus
aactgtccgtcctgtaccgtaaaag

SEQ ID NO: 233050 - DNA, 25 bp, SARS Virus
actgtccgtcctttaccgtaaaagt

SEQ ID NO: 233051 - DNA, 25 bp, SARS Virus
ctgtccgtcctgtaccgtaaaagtg

SEQ ID NO: 233052 - DNA, 25 bp, SARS Virus
tgtccgtcctgttccgtaaaagtga

SEQ ID NO: 233053 - DNA, 25 bp, SARS Virus
gtccgtcctgtatcgtaaaagtgat

SEQ ID NO: 233054 - DNA, 25 bp, SARS Virus
tccgtcctgtactgtaaaagtgatg

SEQ ID NO: 233055 - DNA, 25 bp, SARS Virus
ccgtcctgtaccttaaaagtgatgt

SEQ ID NO: 233056 - DNA, 25 bp, SARS Virus
cgtcctgtaccgtaaaagtgatgtc

SEQ ID NO: 233057 - DNA, 25 bp, SARS Virus
gtcctgtaccgttaaagtgatgtcg

SEQ ID NO: 233058 - DNA, 25 bp, SARS Virus
tcctgtaccgtataagtgatgtcgt

SEQ ID NO: 233059 - DNA, 25 bp, SARS Virus
cctgtaccgtaatagtgatgtcgta

SEQ ID NO: 233060 - DNA, 25 bp, SARS Virus
ctgtaccgtaaatgtgatgtcgtaa

SEQ ID NO: 233061 - DNA, 25 bp, SARS Virus
tgtaccgtaaaattgatgtcgtaat

SEQ ID NO: 233062 - DNA, 25 bp, SARS Virus
gtaccgtaaaagtgatgtcgtaatc

SEQ ID NO: 233063 - DNA, 25 bp, SARS Virus
taccgtaaaagttatgtcgtaatca

SEQ ID NO: 233064 - DNA, 25 bp, SARS Virus
accgtaaaagtgttgtcgtaatcat

SEQ ID NO: 233065 - DNA, 25 bp, SARS Virus
ccgtaaaagtgatgtcgtaatcatc

SEQ ID NO: 233066 - DNA, 25 bp, SARS Virus
cgtaaaagtgatttcgtaatcatcc

SEQ ID NO: 233067 - DNA, 25 bp, SARS Virus
gtaaaagtgatgtcgtaatcatcca

SEQ ID NO: 233068 - DNA, 25 bp, SARS Virus
taaaagtgatgttgtaatcatccat

SEQ ID NO: 233069 - DNA, 25 bp, SARS Virus
aaaagtgatgtcttaatcatccatc

SEQ ID NO: 233070 - DNA, 25 bp, SARS Virus
aaagtgatgtcgtaatcatccatcc

SEQ ID NO: 233071 - DNA, 25 bp, SARS Virus
aagtgatgtcgttatcatccatcca

SEQ ID NO: 233072 - DNA, 25 bp, SARS Virus
agtgatgtcgtattcatccatccat

SEQ ID NO: 233073 - DNA, 25 bp, SARS Virus
gtgatgtcgtaatcatccatccatg

SEQ ID NO: 233074 - DNA, 25 bp, SARS Virus
tgatgtcgtaattatccatccatgg

SEQ ID NO: 233075 - DNA, 25 bp, SARS Virus
gatgtcgtaatcttccatccatggg

SEQ ID NO: 233076 - DNA, 25 bp, SARS Virus
atgtcgtaatcatccatccatgggt

SEQ ID NO: 233077 - DNA, 25 bp, SARS Virus
tgtcgtaatcattcatccatgggtg

SEQ ID NO: 233078 - DNA, 25 bp, SARS Virus
gtcgtaatcatctatccatgggtgt

SEQ ID NO: 233079 - DNA, 25 bp, SARS Virus
tcgtaatcatccttccatgggtgta

SEQ ID NO: 233080 - DNA, 25 bp, SARS Virus
cgtaatcatccatccatgggtgtac

SEQ ID NO: 233081 - DNA, 25 bp, SARS Virus
gtaatcatccattcatgggtgtaca

SEQ ID NO: 233082 - DNA, 25 bp, SARS Virus
taatcatccatctatgggtgtacat

SEQ ID NO: 233083 - DNA, 25 bp, SARS Virus
aatcatccatccttgggtgtacatc

SEQ ID NO: 233084 - DNA, 25 bp, SARS Virus
atcatccatccatgggtgtacatca

SEQ ID NO: 233085 - DNA, 25 bp, SARS Virus
tcatccatccattggtgtacatcat

SEQ ID NO: 233086 - DNA, 25 bp, SARS Virus
catccatccatgtgtgtacatcatc

SEQ ID NO: 233087 - DNA, 25 bp, SARS Virus
atccatccatggttgtacatcatcc

SEQ ID NO: 233088 - DNA, 25 bp, SARS Virus
tccatccatgggtgtacatcatcca

SEQ ID NO: 233089 - DNA, 25 bp, SARS Virus
ccatccatgggtttacatcatccag

SEQ ID NO: 233090 - DNA, 25 bp, SARS Virus
catccatgggtgtacatcatccagg

SEQ ID NO: 233091 - DNA, 25 bp, SARS Virus
atccatgggtgttcatcatccagga

SEQ ID NO: 233092 - DNA, 25 bp, SARS Virus
tccatgggtgtatatcatccaggaa

SEQ ID NO: 233093 - DNA, 25 bp, SARS Virus
ccatgggtgtacttcatccaggaag

SEQ ID NO: 233094 - DNA, 25 bp, SARS Virus
catgggtgtacatcatccaggaagt

SEQ ID NO: 233095 - DNA, 25 bp, SARS Virus
atgggtgtacattatccaggaagtt

SEQ ID NO: 233096 - DNA, 25 bp, SARS Virus
tgggtgtacatcttccaggaagtta

SEQ ID NO: 233097 - DNA, 25 bp, SARS Virus
gggtgtacatcatccaggaagttat

SEQ ID NO: 233098 - DNA, 25 bp, SARS Virus
ggtgtacatcattcaggaagttatt

SEQ ID NO: 233099 - DNA, 25 bp, SARS Virus
gtgtacatcatctaggaagttattg

SEQ ID NO: 233100 - DNA, 25 bp, SARS Virus
tgtacatcatcctggaagttattga

SEQ ID NO: 233101 - DNA, 25 bp, SARS Virus
gtacatcatccatgaagttattgat

SEQ ID NO: 233102 - DNA, 25 bp, SARS Virus
tacatcatccagtaagttattgatt

SEQ ID NO: 233103 - DNA, 25 bp, SARS Virus
acatcatccaggtagttattgattt

SEQ ID NO: 233104 - DNA, 25 bp, SARS Virus
catcatccaggatgttattgattta

SEQ ID NO: 233105 - DNA, 25 bp, SARS Virus
atcatccaggaatttattgatttaa

SEQ ID NO: 233106 - DNA, 25 bp, SARS Virus
tcatccaggaagttattgatttaaa

SEQ ID NO: 233107 - DNA, 25 bp, SARS Virus
catccaggaagttattgatttaaaa

SEQ ID NO: 233108 - DNA, 25 bp, SARS Virus
atccaggaagtttttgatttaaaag

SEQ ID NO: 233109 - DNA, 25 bp, SARS Virus
tccaggaagttattgatttaaaagt

SEQ ID NO: 233110 - DNA, 25 bp, SARS Virus
ccaggaagttattgatttaaaagtc

SEQ ID NO: 233111 - DNA, 25 bp, SARS Virus
caggaagttatttatttaaaagtca

SEQ ID NO: 233112 - DNA, 25 bp, SARS Virus
aggaagttattgttttaaaagtcac

SEQ ID NO: 233113 - DNA, 25 bp, SARS Virus
ggaagttattgatttaaaagtcacg

SEQ ID NO: 233114 - DNA, 25 bp, SARS Virus
gaagttattgatttaaaagtcacgg

SEQ ID NO: 233115 - DNA, 25 bp, SARS Virus
aagttattgatttaaaagtcacggt

SEQ ID NO: 233116 - DNA, 25 bp, SARS Virus
agttattgattttaaagtcacggtg

SEQ ID NO: 233117 - DNA, 25 bp, SARS Virus
gttattgatttataagtcacggtgt

SEQ ID NO: 233118 - DNA, 25 bp, SARS Virus
ttattgatttaatagtcacggtgtt

SEQ ID NO: 233119 - DNA, 25 bp, SARS Virus
tattgatttaaatgtcacggtgtta

SEQ ID NO: 233120 - DNA, 25 bp, SARS Virus
attgatttaaaattcacggtgttac

SEQ ID NO: 233121 - DNA, 25 bp, SARS Virus
ttgatttaaaagtcacggtgttaca

SEQ ID NO: 233122 - DNA, 25 bp, SARS Virus
tgatttaaaagttacggtgttacaa

SEQ ID NO: 233123 - DNA, 25 bp, SARS Virus
gatttaaaagtctcggtgttacaag

SEQ ID NO: 233124 - DNA, 25 bp, SARS Virus
atttaaaagtcatggtgttacaagt

SEQ ID NO: 233125 - DNA, 25 bp, SARS Virus
tttaaaagtcactgtgttacaagtg

SEQ ID NO: 233126 - DNA, 25 bp, SARS Virus
ttaaaagtcacgttgttacaagtgt

SEQ ID NO: 233127 - DNA, 25 bp, SARS Virus
taaaagtcacggtgttacaagtgtt

SEQ ID NO: 233128 - DNA, 25 bp, SARS Virus
aaaagtcacggttttacaagtgttc

SEQ ID NO: 233129 - DNA, 25 bp, SARS Virus
aaagtcacggtgttacaagtgttca

SEQ ID NO: 233130 - DNA, 25 bp, SARS Virus
aagtcacggtgttacaagtgttcac

SEQ ID NO: 233131 - DNA, 25 bp, SARS Virus
agtcacggtgtttcaagtgttcacc

SEQ ID NO: 233132 - DNA, 25 bp, SARS Virus
gtcacggtgttataagtgttcaccg

SEQ ID NO: 233133 - DNA, 25 bp, SARS Virus
tcacggtgttactagtgttcaccga

SEQ ID NO: 233134 - DNA, 25 bp, SARS Virus
cacggtgttacatgtgttcaccgaa

SEQ ID NO: 233135 - DNA, 25 bp, SARS Virus
acggtgttacaattgttcaccgaaa

SEQ ID NO: 233136 - DNA, 25 bp, SARS Virus
cggtgttacaagtgttcaccgaaag

SEQ ID NO: 233137 - DNA, 25 bp, SARS Virus
ggtgttacaagttttcaccgaaagt

SEQ ID NO: 233138 - DNA, 25 bp, SARS Virus
gtgttacaagtgttcaccgaaagtc

SEQ ID NO: 233139 - DNA, 25 bp, SARS Virus
tgttacaagtgttcaccgaaagtct

SEQ ID NO: 233140 - DNA, 25 bp, SARS Virus
gttacaagtgtttaccgaaagtctt

SEQ ID NO: 233141 - DNA, 25 bp, SARS Virus
ttacaagtgttctccgaaagtcttt

SEQ ID NO: 233142 - DNA, 25 bp, SARS Virus
tacaagtgttcatcgaaagtctttc

SEQ ID NO: 233143 - DNA, 25 bp, SARS Virus
acaagtgttcactgaaagtctttca

SEQ ID NO: 233144 - DNA, 25 bp, SARS Virus
caagtgttcacctaaagtctttcag

SEQ ID NO: 233145 - DNA, 25 bp, SARS Virus
aagtgttcaccgtaagtctttcagc

SEQ ID NO: 233146 - DNA, 25 bp, SARS Virus
agtgttcaccgatagtctttcagcg

SEQ ID NO: 233147 - DNA, 25 bp, SARS Virus
gtgttcaccgaatgtctttcagcgt

SEQ ID NO: 233148 - DNA, 25 bp, SARS Virus
tgttcaccgaaattctttcagcgtg

SEQ ID NO: 233149 - DNA, 25 bp, SARS Virus
gttcaccgaaagtctttcagcgtgc

SEQ ID NO: 233150 - DNA, 25 bp, SARS Virus
ttcaccgaaagtttttcagcgtgca

SEQ ID NO: 233151 - DNA, 25 bp, SARS Virus
tcaccgaaagtctttcagcgtgcag

SEQ ID NO: 233152 - DNA, 25 bp, SARS Virus
caccgaaagtctttcagcgtgcaga

SEQ ID NO: 233153 - DNA, 25 bp, SARS Virus
accgaaagtctttcagcgtgcagac

SEQ ID NO: 233154 - DNA, 25 bp, SARS Virus
ccgaaagtcttttagcgtgcagacg

SEQ ID NO: 233155 - DNA, 25 bp, SARS Virus
cgaaagtctttctgcgtgcagacgg

SEQ ID NO: 233156 - DNA, 25 bp, SARS Virus
gaaagtctttcatcgtgcagacggt

SEQ ID NO: 233157 - DNA, 25 bp, SARS Virus
aaagtctttcagtgtgcagacggta

SEQ ID NO: 233158 - DNA, 25 bp, SARS Virus
aagtctttcagcttgcagacggtac

SEQ ID NO: 233159 - DNA, 25 bp, SARS Virus
agtctttcagcgtgcagacggtact

SEQ ID NO: 233160 - DNA, 25 bp, SARS Virus
gtctttcagcgttcagacggtactt

SEQ ID NO: 233161 - DNA, 25 bp, SARS Virus
tctttcagcgtgtagacggtacttt

SEQ ID NO: 233162 - DNA, 25 bp, SARS Virus
ctttcagcgtgctgacggtactttg

SEQ ID NO: 233163 - DNA, 25 bp, SARS Virus
tttcagcgtgcatacggtactttga

SEQ ID NO: 233164 - DNA, 25 bp, SARS Virus
ttcagcgtgcagtcggtactttgaa

SEQ ID NO: 233165 - DNA, 25 bp, SARS Virus
tcagcgtgcagatggtactttgaag

SEQ ID NO: 233166 - DNA, 25 bp, SARS Virus
cagcgtgcagactgtactttgaagt

SEQ ID NO: 233167 - DNA, 25 bp, SARS Virus
agcgtgcagacgttactttgaagta

SEQ ID NO: 233168 - DNA, 25 bp, SARS Virus
gcgtgcagacggtactttgaagtag

SEQ ID NO: 233169 - DNA, 25 bp, SARS Virus
cgtgcagacggttctttgaagtagc

SEQ ID NO: 233170 - DNA, 25 bp, SARS Virus
gtgcagacggtattttgaagtagcg

SEQ ID NO: 233171 - DNA, 25 bp, SARS Virus
tgcagacggtactttgaagtagcgt

SEQ ID NO: 233172 - DNA, 25 bp, SARS Virus
gcagacggtactttgaagtagcgtt

SEQ ID NO: 233173 - DNA, 25 bp, SARS Virus
cagacggtactttgaagtagcgtta

SEQ ID NO: 233174 - DNA, 25 bp, SARS Virus
agacggtacttttaagtagcgttac

SEQ ID NO: 233175 - DNA, 25 bp, SARS Virus
gacggtactttgtagtagcgttact

SEQ ID NO: 233176 - DNA, 25 bp, SARS Virus
acggtactttgatgtagcgttacta

SEQ ID NO: 233177 - DNA, 25 bp, SARS Virus
cggtactttgaattagcgttactaa

SEQ ID NO: 233178 - DNA, 25 bp, SARS Virus
ggtactttgaagtagcgttactaat

SEQ ID NO: 233179 - DNA, 25 bp, SARS Virus
gtactttgaagttgcgttactaatg

SEQ ID NO: 233180 - DNA, 25 bp, SARS Virus
tactttgaagtatcgttactaatgt

SEQ ID NO: 233181 - DNA, 25 bp, SARS Virus
actttgaagtagtgttactaatgta

SEQ ID NO: 233182 - DNA, 25 bp, SARS Virus
ctttgaagtagctttactaatgtaa

SEQ ID NO: 233183 - DNA, 25 bp, SARS Virus
tttgaagtagcgttactaatgtaaa

SEQ ID NO: 233184 - DNA, 25 bp, SARS Virus
ttgaagtagcgttactaatgtaaag

SEQ ID NO: 233185 - DNA, 25 bp, SARS Virus
tgaagtagcgtttctaatgtaaagt

SEQ ID NO: 233186 - DNA, 25 bp, SARS Virus
gaagtagcgttattaatgtaaagta

SEQ ID NO: 233187 - DNA, 25 bp, SARS Virus
aagtagcgttactaatgtaaagtag

SEQ ID NO: 233188 - DNA, 25 bp, SARS Virus
agtagcgttacttatgtaaagtagt

SEQ ID NO: 233189 - DNA, 25 bp, SARS Virus
gtagcgttactattgtaaagtagtt

SEQ ID NO: 233190 - DNA, 25 bp, SARS Virus
tagcgttactaatgtaaagtagttc

SEQ ID NO: 233191 - DNA, 25 bp, SARS Virus
agcgttactaatttaaagtagttcc

SEQ ID NO: 233192 - DNA, 25 bp, SARS Virus
gcgttactaatgtaaagtagttcca

SEQ ID NO: 233193 - DNA, 25 bp, SARS Virus
cgttactaatgttaagtagttccat

SEQ ID NO: 233194 - DNA, 25 bp, SARS Virus
gttactaatgtatagtagttccatc

SEQ ID NO: 233195 - DNA, 25 bp, SARS Virus
ttactaatgtaatgtagttccatct

SEQ ID NO: 233196 - DNA, 25 bp, SARS Virus
tactaatgtaaattagttccatctg

SEQ ID NO: 233197 - DNA, 25 bp, SARS Virus
actaatgtaaagtagttccatctgt

SEQ ID NO: 233198 - DNA, 25 bp, SARS Virus
ctaatgtaaagttgttccatctgtt

SEQ ID NO: 233199 - DNA, 25 bp, SARS Virus
taatgtaaagtatttccatctgttc

SEQ ID NO: 233200 - DNA, 25 bp, SARS Virus
aatgtaaagtagttccatctgttca

SEQ ID NO: 233201 - DNA, 25 bp, SARS Virus
atgtaaagtagttccatctgttcac

SEQ ID NO: 233202 - DNA, 25 bp, SARS Virus
tgtaaagtagtttcatctgttcacg

SEQ ID NO: 233203 - DNA, 25 bp, SARS Virus
gtaaagtagttctatctgttcacgt

SEQ ID NO: 233204 - DNA, 25 bp, SARS Virus
taaagtagttccttctgttcacgta

SEQ ID NO: 233205 - DNA, 25 bp, SARS Virus
aaagtagttccatctgttcacgtat

SEQ ID NO: 233206 - DNA, 25 bp, SARS Virus
aagtagttccatttgttcacgtata

SEQ ID NO: 233207 - DNA, 25 bp, SARS Virus
agtagttccatctgttcacgtataa

SEQ ID NO: 233208 - DNA, 25 bp, SARS Virus
gtagttccatcttttcacgtataac

SEQ ID NO: 233209 - DNA, 25 bp, SARS Virus
tagttccatctgttcacgtataaca

SEQ ID NO: 233210 - DNA, 25 bp, SARS Virus
agttccatctgttcacgtataacaa

SEQ ID NO: 233211 - DNA, 25 bp, SARS Virus
gttccatctgtttacgtataacaat

SEQ ID NO: 233212 - DNA, 25 bp, SARS Virus
ttccatctgttctcgtataacaatg

SEQ ID NO: 233213 - DNA, 25 bp, SARS Virus
tccatctgttcatgtataacaatgt

SEQ ID NO: 233214 - DNA, 25 bp, SARS Virus
ccatctgttcacttataacaatgtg

SEQ ID NO: 233215 - DNA, 25 bp, SARS Virus
catctgttcacgtataacaatgtga

SEQ ID NO: 233216 - DNA, 25 bp, SARS Virus
atctgttcacgtttaacaatgtgag

SEQ ID NO: 233217 - DNA, 25 bp, SARS Virus
tctgttcacgtataacaatgtgagg

SEQ ID NO: 233218 - DNA, 25 bp, SARS Virus
ctgttcacgtattacaatgtgagga

SEQ ID NO: 233219 - DNA, 25 bp, SARS Virus
tgttcacgtatatcaatgtgaggac

SEQ ID NO: 233220 - DNA, 25 bp, SARS Virus
gttcacgtataataatgtgaggaca

SEQ ID NO: 233221 - DNA, 25 bp, SARS Virus
ttcacgtataactatgtgaggacac

SEQ ID NO: 233222 - DNA, 25 bp, SARS Virus
tcacgtataacattgtgaggacacc

SEQ ID NO: 233223 - DNA, 25 bp, SARS Virus
cacgtataacaatgtgaggacacct

SEQ ID NO: 233224 - DNA, 25 bp, SARS Virus
acgtataacaatttgaggacacctc

SEQ ID NO: 233225 - DNA, 25 bp, SARS Virus
cgtataacaatgtgaggacacctct

SEQ ID NO: 233226 - DNA, 25 bp, SARS Virus
gtataacaatgttaggacacctcta

SEQ ID NO: 233227 - DNA, 25 bp, SARS Virus
tataacaatgtgtggacacctctac

SEQ ID NO: 233228 - DNA, 25 bp, SARS Virus
ataacaatgtgatgacacctctacg

SEQ ID NO: 233229 - DNA, 25 bp, SARS Virus
taacaatgtgagtacacctctacgt

SEQ ID NO: 233230 - DNA, 25 bp, SARS Virus
aacaatgtgaggtcacctctacgtt

SEQ ID NO: 233231 - DNA, 25 bp, SARS Virus
acaatgtgaggatacctctacgttg

SEQ ID NO: 233232 - DNA, 25 bp, SARS Virus
caatgtgaggactcctctacgttgt

SEQ ID NO: 233233 - DNA, 25 bp, SARS Virus
aatgtgaggacatctctacgttgtc

SEQ ID NO: 233234 - DNA, 25 bp, SARS Virus
atgtgaggacacttctacgttgtcc

SEQ ID NO: 233235 - DNA, 25 bp, SARS Virus
tgtgaggacacctctacgttgtccc

SEQ ID NO: 233236 - DNA, 25 bp, SARS Virus
gtgaggacacctttacgttgtccca

SEQ ID NO: 233237 - DNA, 25 bp, SARS Virus
tgaggacacctctacgttgtcccat

SEQ ID NO: 233238 - DNA, 25 bp, SARS Virus
gaggacacctcttcgttgtcccatg

SEQ ID NO: 233239 - DNA, 25 bp, SARS Virus
aggacacctctatgttgtcccatgt

SEQ ID NO: 233240 - DNA, 25 bp, SARS Virus
ggacacctctactttgtcccatgtg

SEQ ID NO: 233241 - DNA, 25 bp, SARS Virus
gacacctctacgttgtcccatgtgt

SEQ ID NO: 233242 - DNA, 25 bp, SARS Virus
acacctctacgttgtcccatgtgtc

SEQ ID NO: 233243 - DNA, 25 bp, SARS Virus
cacctctacgttttcccatgtgtct

SEQ ID NO: 233244 - DNA, 25 bp, SARS Virus
acctctacgttgtcccatgtgtctc

SEQ ID NO: 233245 - DNA, 25 bp, SARS Virus
cctctacgttgttccatgtgtctcg

SEQ ID NO: 233246 - DNA, 25 bp, SARS Virus
ctctacgttgtctcatgtgtctcgc

SEQ ID NO: 233247 - DNA, 25 bp, SARS Virus
tctacgttgtcctatgtgtctcgca

SEQ ID NO: 233248 - DNA, 25 bp, SARS Virus
ctacgttgtcccttgtgtctcgcat

SEQ ID NO: 233249 - DNA, 25 bp, SARS Virus
tacgttgtcccatgtgtctcgcata

SEQ ID NO: 233250 - DNA, 25 bp, SARS Virus
acgttgtcccatttgtctcgcatat

SEQ ID NO: 233251 - DNA, 25 bp, SARS Virus
cgttgtcccatgtgtctcgcatatg

SEQ ID NO: 233252 - DNA, 25 bp, SARS Virus
gttgtcccatgtttctcgcatatgc

SEQ ID NO: 233253 - DNA, 25 bp, SARS Virus
ttgtcccatgtgtctcgcatatgcg

SEQ ID NO: 233254 - DNA, 25 bp, SARS Virus
tgtcccatgtgtttcgcatatgcgg

SEQ ID NO: 233255 - DNA, 25 bp, SARS Virus
gtcccatgtgtctcgcatatgcggg

SEQ ID NO: 233256 - DNA, 25 bp, SARS Virus
tcccatgtgtcttgcatatgcgggg

SEQ ID NO: 233257 - DNA, 25 bp, SARS Virus
cccatgtgtctctcatatgcggggt

SEQ ID NO: 233258 - DNA, 25 bp, SARS Virus
ccatgtgtctcgtatatgcggggta

SEQ ID NO: 233259 - DNA, 25 bp, SARS Virus
catgtgtctcgcttatgcggggtac

SEQ ID NO: 233260 - DNA, 25 bp, SARS Virus
atgtgtctcgcatatgcggggtact

SEQ ID NO: 233261 - DNA, 25 bp, SARS Virus
tgtgtctcgcatttgcggggtactt

SEQ ID NO: 233262 - DNA, 25 bp, SARS Virus
gtgtctcgcatatgcggggtacttt

SEQ ID NO: 233263 - DNA, 25 bp, SARS Virus
tgtctcgcatattcggggtactttg

SEQ ID NO: 233264 - DNA, 25 bp, SARS Virus
gtctcgcatatgtggggtactttgg

SEQ ID NO: 233265 - DNA, 25 bp, SARS Virus
tctcgcatatgctgggtactttggg

SEQ ID NO: 233266 - DNA, 25 bp, SARS Virus
ctcgcatatgcgtggtactttggga

SEQ ID NO: 233267 - DNA, 25 bp, SARS Virus
tcgcatatgcggtgtactttgggag

SEQ ID NO: 233268 - DNA, 25 bp, SARS Virus
cgcatatgcgggttactttgggagt

SEQ ID NO: 233269 - DNA, 25 bp, SARS Virus
gcatatgcggggtactttgggagtc

SEQ ID NO: 233270 - DNA, 25 bp, SARS Virus
catatgcggggttctttgggagtca

SEQ ID NO: 233271 - DNA, 25 bp, SARS Virus
atatgcggggtattttgggagtcag

SEQ ID NO: 233272 - DNA, 25 bp, SARS Virus
tatgcggggtactttgggagtcaga

SEQ ID NO: 233273 - DNA, 25 bp, SARS Virus
atgcggggtactttgggagtcagaa

SEQ ID NO: 233274 - DNA, 25 bp, SARS Virus
tgcggggtactttgggagtcagaaa

SEQ ID NO: 233275 - DNA, 25 bp, SARS Virus
gcggggtacttttggagtcagaaaa

SEQ ID NO: 233276 - DNA, 25 bp, SARS Virus
cggggtactttgtgagtcagaaaaa

SEQ ID NO: 233277 - DNA, 25 bp, SARS Virus
ggggtactttggtagtcagaaaaag

SEQ ID NO: 233278 - DNA, 25 bp, SARS Virus
gggtactttgggtgtcagaaaaaga

SEQ ID NO: 233279 - DNA, 25 bp, SARS Virus
ggtactttgggattcagaaaaagaa

SEQ ID NO: 233280 - DNA, 25 bp, SARS Virus
gtactttgggagtcagaaaaagaaa

SEQ ID NO: 233281 - DNA, 25 bp, SARS Virus
tactttgggagttagaaaaagaaaa

SEQ ID NO: 233282 - DNA, 25 bp, SARS Virus
actttgggagtctgaaaaagaaaag

SEQ ID NO: 233283 - DNA, 25 bp, SARS Virus
ctttgggagtcataaaaagaaaagt

SEQ ID NO: 233284 - DNA, 25 bp, SARS Virus
tttgggagtcagtaaaagaaaagtt

SEQ ID NO: 233285 - DNA, 25 bp, SARS Virus
ttgggagtcagataaagaaaagttg

SEQ ID NO: 233286 - DNA, 25 bp, SARS Virus
tgggagtcagaataagaaaagttgt

SEQ ID NO: 233287 - DNA, 25 bp, SARS Virus
gggagtcagaaatagaaaagttgtg

SEQ ID NO: 233288 - DNA, 25 bp, SARS Virus
ggagtcagaaaatgaaaagttgtgc

SEQ ID NO: 233289 - DNA, 25 bp, SARS Virus
gagtcagaaaaataaaagttgtgca

SEQ ID NO: 233290 - DNA, 25 bp, SARS Virus
agtcagaaaaagtaaagttgtgcac

SEQ ID NO: 233291 - DNA, 25 bp, SARS Virus
gtcagaaaaagataagttgtgcacc

SEQ ID NO: 233292 - DNA, 25 bp, SARS Virus
tcagaaaaagaatagttgtgcacca

SEQ ID NO: 233293 - DNA, 25 bp, SARS Virus
cagaaaaagaaatgttgtgcaccaa

SEQ ID NO: 233294 - DNA, 25 bp, SARS Virus
agaaaaagaaaatttgtgcaccaac

SEQ ID NO: 233295 - DNA, 25 bp, SARS Virus
gaaaaagaaaagttgtgcaccaact

SEQ ID NO: 233296 - DNA, 25 bp, SARS Virus
aaaaagaaaagttgtgcaccaactt

SEQ ID NO: 233297 - DNA, 25 bp, SARS Virus
aaaagaaaagttatgcaccaactta

SEQ ID NO: 233298 - DNA, 25 bp, SARS Virus
aaagaaaagttgagcaccaacttac

SEQ ID NO: 233299 - DNA, 25 bp, SARS Virus
aagaaaagttgtacaccaacttact

SEQ ID NO: 233300 - DNA, 25 bp, SARS Virus
agaaaagttgtgaaccaacttactg

SEQ ID NO: 233301 - DNA, 25 bp, SARS Virus
gaaaagttgtgcaccaacttactga

SEQ ID NO: 233302 - DNA, 25 bp, SARS Virus
aaaagttgtgcaacaacttactgaa

SEQ ID NO: 233303 - DNA, 25 bp, SARS Virus
aaagttgtgcacaaacttactgaaa

SEQ ID NO: 233304 - DNA, 25 bp, SARS Virus
aagttgtgcaccaacttactgaaac

SEQ ID NO: 233305 - DNA, 25 bp, SARS Virus
agttgtgcaccaacttactgaaact

SEQ ID NO: 233306 - DNA, 25 bp, SARS Virus
gttgtgcaccaaattactgaaactg

SEQ ID NO: 233307 - DNA, 25 bp, SARS Virus
ttgtgcaccaacatactgaaactga

SEQ ID NO: 233308 - DNA, 25 bp, SARS Virus
tgtgcaccaactaactgaaactgaa

SEQ ID NO: 233309 - DNA, 25 bp, SARS Virus
gtgcaccaacttactgaaactgaaa

SEQ ID NO: 233310 - DNA, 25 bp, SARS Virus
tgcaccaacttaatgaaactgaaaa

SEQ ID NO: 233311 - DNA, 25 bp, SARS Virus
gcaccaacttacagaaactgaaaac

SEQ ID NO: 233312 - DNA, 25 bp, SARS Virus
caccaacttactaaaactgaaaact

SEQ ID NO: 233313 - DNA, 25 bp, SARS Virus
accaacttactgaaactgaaaactc

SEQ ID NO: 233314 - DNA, 25 bp, SARS Virus
ccaacttactgaaactgaaaactca

SEQ ID NO: 233315 - DNA, 25 bp, SARS Virus
caacttactgaaactgaaaactcaa

SEQ ID NO: 233316 - DNA, 25 bp, SARS Virus
aacttactgaaaatgaaaactcaat

SEQ ID NO: 233317 - DNA, 25 bp, SARS Virus
acttactgaaacagaaaactcaatt

SEQ ID NO: 233318 - DNA, 25 bp, SARS Virus
cttactgaaactaaaaactcaattc

SEQ ID NO: 233319 - DNA, 25 bp, SARS Virus
ttactgaaactgaaaactcaattct

SEQ ID NO: 233320 - DNA, 25 bp, SARS Virus
tactgaaactgaaaactcaattctc

SEQ ID NO: 233321 - DNA, 25 bp, SARS Virus
actgaaactgaaaactcaattctcc

SEQ ID NO: 233322 - DNA, 25 bp, SARS Virus
ctgaaactgaaaactcaattctcct

SEQ ID NO: 233323 - DNA, 25 bp, SARS Virus
tgaaactgaaaaatcaattctcctt

SEQ ID NO: 233324 - DNA, 25 bp, SARS Virus
gaaactgaaaacacaattctccttt

SEQ ID NO: 233325 - DNA, 25 bp, SARS Virus
aaactgaaaactaaattctcctttg

SEQ ID NO: 233326 - DNA, 25 bp, SARS Virus
aactgaaaactcaattctcctttgt

SEQ ID NO: 233327 - DNA, 25 bp, SARS Virus
actgaaaactcaattctcctttgtg

SEQ ID NO: 233328 - DNA, 25 bp, SARS Virus
ctgaaaactcaaatctcctttgtgt

SEQ ID NO: 233329 - DNA, 25 bp, SARS Virus
tgaaaactcaatactcctttgtgtt

SEQ ID NO: 233330 - DNA, 25 bp, SARS Virus
gaaaactcaattatcctttgtgttt

SEQ ID NO: 233331 - DNA, 25 bp, SARS Virus
aaaactcaattcacctttgtgtttg

SEQ ID NO: 233332 - DNA, 25 bp, SARS Virus
aaactcaattctactttgtgtttga

SEQ ID NO: 233333 - DNA, 25 bp, SARS Virus
aactcaattctcatttgtgtttgaa

SEQ ID NO: 233334 - DNA, 25 bp, SARS Virus
actcaattctccattgtgtttgaaa

SEQ ID NO: 233335 - DNA, 25 bp, SARS Virus
ctcaattctcctatgtgtttgaaac

SEQ ID NO: 233336 - DNA, 25 bp, SARS Virus
tcaattctccttagtgtttgaaacc

SEQ ID NO: 233337 - DNA, 25 bp, SARS Virus
caattctcctttatgtttgaaaccc

SEQ ID NO: 233338 - DNA, 25 bp, SARS Virus
aattctcctttgagtttgaaacccg

SEQ ID NO: 233339 - DNA, 25 bp, SARS Virus
attctcctttgtatttgaaacccgt

SEQ ID NO: 233340 - DNA, 25 bp, SARS Virus
ttctcctttgtgattgaaacccgta

SEQ ID NO: 233341 - DNA, 25 bp, SARS Virus
tctcctttgtgtatgaaacccgtaa

SEQ ID NO: 233342 - DNA, 25 bp, SARS Virus
ctcctttgtgttagaaacccgtaag

SEQ ID NO: 233343 - DNA, 25 bp, SARS Virus
tcctttgtgtttaaaacccgtaagg

SEQ ID NO: 233344 - DNA, 25 bp, SARS Virus
cctttgtgtttgaaacccgtaaggg

SEQ ID NO: 233345 - DNA, 25 bp, SARS Virus
ctttgtgtttgaaacccgtaagggg

SEQ ID NO: 233346 - DNA, 25 bp, SARS Virus
tttgtgtttgaaacccgtaagggga

SEQ ID NO: 233347 - DNA, 25 bp, SARS Virus
ttgtgtttgaaaaccgtaaggggaa

SEQ ID NO: 233348 - DNA, 25 bp, SARS Virus
tgtgtttgaaacacgtaaggggaaa

SEQ ID NO: 233349 - DNA, 25 bp, SARS Virus
gtgtttgaaaccagtaaggggaaac

SEQ ID NO: 233350 - DNA, 25 bp, SARS Virus
tgtttgaaacccataaggggaaact

SEQ ID NO: 233351 - DNA, 25 bp, SARS Virus
gtttgaaacccgaaaggggaaactt

SEQ ID NO: 233352 - DNA, 25 bp, SARS Virus
tttgaaacccgtaaggggaaacttt

SEQ ID NO: 233353 - DNA, 25 bp, SARS Virus
ttgaaacccgtaaggggaaactttc

SEQ ID NO: 233354 - DNA, 25 bp, SARS Virus
tgaaacccgtaaagggaaactttca

SEQ ID NO: 233355 - DNA, 25 bp, SARS Virus
gaaacccgtaagaggaaactttcac

SEQ ID NO: 233356 - DNA, 25 bp, SARS Virus
aaacccgtaaggagaaactttcaca

SEQ ID NO: 233357 - DNA, 25 bp, SARS Virus
aacccgtaagggaaaactttcacag

SEQ ID NO: 233358 - DNA, 25 bp, SARS Virus
acccgtaaggggaaactttcacagt

SEQ ID NO: 233359 - DNA, 25 bp, SARS Virus
cccgtaaggggaaactttcacagtt

SEQ ID NO: 233360 - DNA, 25 bp, SARS Virus
ccgtaaggggaaactttcacagttt

SEQ ID NO: 233361 - DNA, 25 bp, SARS Virus
cgtaaggggaaaatttcacagttta

SEQ ID NO: 233362 - DNA, 25 bp, SARS Virus
gtaaggggaaacattcacagtttaa

SEQ ID NO: 233363 - DNA, 25 bp, SARS Virus
taaggggaaactatcacagtttaaa

SEQ ID NO: 233364 - DNA, 25 bp, SARS Virus
aaggggaaacttacacagtttaaag

SEQ ID NO: 233365 - DNA, 25 bp, SARS Virus
aggggaaactttaacagtttaaaga

SEQ ID NO: 233366 - DNA, 25 bp, SARS Virus
ggggaaactttcacagtttaaagaa

SEQ ID NO: 233367 - DNA, 25 bp, SARS Virus
gggaaactttcaaagtttaaagaac

SEQ ID NO: 233368 - DNA, 25 bp, SARS Virus
ggaaactttcacagtttaaagaacc

SEQ ID NO: 233369 - DNA, 25 bp, SARS Virus
gaaactttcacaatttaaagaaccg

SEQ ID NO: 233370 - DNA, 25 bp, SARS Virus
aaactttcacagattaaagaaccgt

SEQ ID NO: 233371 - DNA, 25 bp, SARS Virus
aactttcacagtataaagaaccgtg

SEQ ID NO: 233372 - DNA, 25 bp, SARS Virus
actttcacagttaaaagaaccgtga

SEQ ID NO: 233373 - DNA, 25 bp, SARS Virus
ctttcacagtttaaagaaccgtgag

SEQ ID NO: 233374 - DNA, 25 bp, SARS Virus
tttcacagtttaaagaaccgtgaga

SEQ ID NO: 233375 - DNA, 25 bp, SARS Virus
ttcacagtttaaagaaccgtgagaa

SEQ ID NO: 233376 - DNA, 25 bp, SARS Virus
tcacagtttaaaaaaccgtgagaat

SEQ ID NO: 233377 - DNA, 25 bp, SARS Virus
cacagtttaaagaaccgtgagaatt

SEQ ID NO: 233378 - DNA, 25 bp, SARS Virus
acagtttaaagaaccgtgagaatta

SEQ ID NO: 233379 - DNA, 25 bp, SARS Virus
cagtttaaagaaacgtgagaattaa

SEQ ID NO: 233380 - DNA, 25 bp, SARS Virus
agtttaaagaacagtgagaattaaa

SEQ ID NO: 233381 - DNA, 25 bp, SARS Virus
gtttaaagaaccatgagaattaaag

SEQ ID NO: 233382 - DNA, 25 bp, SARS Virus
tttaaagaaccgagagaattaaagc

SEQ ID NO: 233383 - DNA, 25 bp, SARS Virus
ttaaagaaccgtaagaattaaagct

SEQ ID NO: 233384 - DNA, 25 bp, SARS Virus
taaagaaccgtgagaattaaagctt

SEQ ID NO: 233385 - DNA, 25 bp, SARS Virus
aaagaaccgtgaaaattaaagcttc

SEQ ID NO: 233386 - DNA, 25 bp, SARS Virus
aagaaccgtgagaattaaagcttcc

SEQ ID NO: 233387 - DNA, 25 bp, SARS Virus
agaaccgtgagaattaaagcttccc

SEQ ID NO: 233388 - DNA, 25 bp, SARS Virus
gaaccgtgagaaataaagcttccca

SEQ ID NO: 233389 - DNA, 25 bp, SARS Virus
aaccgtgagaataaaagcttcccac

SEQ ID NO: 233390 - DNA, 25 bp, SARS Virus
accgtgagaattaaagcttcccaca

SEQ ID NO: 233391 - DNA, 25 bp, SARS Virus
ccgtgagaattaaagcttcccacag

SEQ ID NO: 233392 - DNA, 25 bp, SARS Virus
cgtgagaattaaagcttcccacaga

SEQ ID NO: 233393 - DNA, 25 bp, SARS Virus
gtgagaattaaaacttcccacagac

SEQ ID NO: 233394 - DNA, 25 bp, SARS Virus
tgagaattaaagattcccacagacc

SEQ ID NO: 233395 - DNA, 25 bp, SARS Virus
gagaattaaagcatcccacagacca

SEQ ID NO: 233396 - DNA, 25 bp, SARS Virus
agaattaaagctacccacagaccac

SEQ ID NO: 233397 - DNA, 25 bp, SARS Virus
gaattaaagcttaccacagaccacg

SEQ ID NO: 233398 - DNA, 25 bp, SARS Virus
aattaaagcttcacacagaccacga

SEQ ID NO: 233399 - DNA, 25 bp, SARS Virus
attaaagcttccaacagaccacgag

SEQ ID NO: 233400 - DNA, 25 bp, SARS Virus
ttaaagcttcccacagaccacgagc

SEQ ID NO: 233401 - DNA, 25 bp, SARS Virus
taaagcttcccaaagaccacgagca

SEQ ID NO: 233402 - DNA, 25 bp, SARS Virus
aaagcttcccacagaccacgagcat

SEQ ID NO: 233403 - DNA, 25 bp, SARS Virus
aagcttcccacaaaccacgagcatc

SEQ ID NO: 233404 - DNA, 25 bp, SARS Virus
agcttcccacagaccacgagcatcg

SEQ ID NO: 233405 - DNA, 25 bp, SARS Virus
gcttcccacagaacacgagcatcga

SEQ ID NO: 233406 - DNA, 25 bp, SARS Virus
cttcccacagacaacgagcatcgag

SEQ ID NO: 233407 - DNA, 25 bp, SARS Virus
ttcccacagaccacgagcatcgaga

SEQ ID NO: 233408 - DNA, 25 bp, SARS Virus
tcccacagaccaagagcatcgagaa

SEQ ID NO: 233409 - DNA, 25 bp, SARS Virus
cccacagaccacaagcatcgagaat

SEQ ID NO: 233410 - DNA, 25 bp, SARS Virus
ccacagaccacgagcatcgagaata

SEQ ID NO: 233411 - DNA, 25 bp, SARS Virus
cacagaccacgaacatcgagaatag

SEQ ID NO: 233412 - DNA, 25 bp, SARS Virus
acagaccacgagaatcgagaatagt

SEQ ID NO: 233413 - DNA, 25 bp, SARS Virus
cagaccacgagcatcgagaatagtc

SEQ ID NO: 233414 - DNA, 25 bp, SARS Virus
agaccacgagcaacgagaatagtct

SEQ ID NO: 233415 - DNA, 25 bp, SARS Virus
gaccacgagcatagagaatagtctc

SEQ ID NO: 233416 - DNA, 25 bp, SARS Virus
accacgagcatcaagaatagtctcg

SEQ ID NO: 233417 - DNA, 25 bp, SARS Virus
ccacgagcatcgagaatagtctcgc

SEQ ID NO: 233418 - DNA, 25 bp, SARS Virus
cacgagcatcgaaaatagtctcgcg

SEQ ID NO: 233419 - DNA, 25 bp, SARS Virus
acgagcatcgagaatagtctcgcga

SEQ ID NO: 233420 - DNA, 25 bp, SARS Virus
cgagcatcgagaatagtctcgcgag

SEQ ID NO: 233421 - DNA, 25 bp, SARS Virus
gagcatcgagaaaagtctcgcgagt

SEQ ID NO: 233422 - DNA, 25 bp, SARS Virus
agcatcgagaatagtctcgcgagtc

SEQ ID NO: 233423 - DNA, 25 bp, SARS Virus
gcatcgagaataatctcgcgagtca

SEQ ID NO: 233424 - DNA, 25 bp, SARS Virus
catcgagaatagactcgcgagtcac

SEQ ID NO: 233425 - DNA, 25 bp, SARS Virus
atcgagaatagtatcgcgagtcact

SEQ ID NO: 233426 - DNA, 25 bp, SARS Virus
tcgagaatagtcacgcgagtcactt

SEQ ID NO: 233427 - DNA, 25 bp, SARS Virus
cgagaatagtctagcgagtcacttg

SEQ ID NO: 233428 - DNA, 25 bp, SARS Virus
gagaatagtctcacgagtcacttgg

SEQ ID NO: 233429 - DNA, 25 bp, SARS Virus
agaatagtctcgagagtcacttggt

SEQ ID NO: 233430 - DNA, 25 bp, SARS Virus
gaatagtctcgcaagtcacttggtc

SEQ ID NO: 233431 - DNA, 25 bp, SARS Virus
aatagtctcgcgagtcacttggtcc

SEQ ID NO: 233432 - DNA, 25 bp, SARS Virus
atagtctcgcgaatcacttggtccg

SEQ ID NO: 233433 - DNA, 25 bp, SARS Virus
tagtctcgcgagacacttggtccgt

SEQ ID NO: 233434 - DNA, 25 bp, SARS Virus
agtctcgcgagtaacttggtccgtt

SEQ ID NO: 233435 - DNA, 25 bp, SARS Virus
gtctcgcgagtcacttggtccgtta

SEQ ID NO: 233436 - DNA, 25 bp, SARS Virus
tctcgcgagtcaattggtccgttaa

SEQ ID NO: 233437 - DNA, 25 bp, SARS Virus
ctcgcgagtcacatggtccgttaaa

SEQ ID NO: 233438 - DNA, 25 bp, SARS Virus
tcgcgagtcactaggtccgttaaag

SEQ ID NO: 233439 - DNA, 25 bp, SARS Virus
cgcgagtcacttagtccgttaaagt

SEQ ID NO: 233440 - DNA, 25 bp, SARS Virus
gcgagtcacttgatccgttaaagta

SEQ ID NO: 233441 - DNA, 25 bp, SARS Virus
cgagtcacttggaccgttaaagtac

SEQ ID NO: 233442 - DNA, 25 bp, SARS Virus
gagtcacttggtacgttaaagtacg

SEQ ID NO: 233443 - DNA, 25 bp, SARS Virus
agtcacttggtcagttaaagtacga

SEQ ID NO: 233444 - DNA, 25 bp, SARS Virus
gtcacttggtccattaaagtacgag

SEQ ID NO: 233445 - DNA, 25 bp, SARS Virus
tcacttggtccgataaagtacgagt

SEQ ID NO: 233446 - DNA, 25 bp, SARS Virus
cacttggtccgtaaaagtacgagta

SEQ ID NO: 233447 - DNA, 25 bp, SARS Virus
acttggtccgttaaagtacgagtac

SEQ ID NO: 233448 - DNA, 25 bp, SARS Virus
cttggtccgttaaagtacgagtacc

SEQ ID NO: 233449 - DNA, 25 bp, SARS Virus
ttggtccgttaaagtacgagtacca

SEQ ID NO: 233450 - DNA, 25 bp, SARS Virus
tggtccgttaaaatacgagtaccag

SEQ ID NO: 233451 - DNA, 25 bp, SARS Virus
ggtccgttaaagaacgagtaccagt

SEQ ID NO: 233452 - DNA, 25 bp, SARS Virus
gtccgttaaagtacgagtaccagtg

SEQ ID NO: 233453 - DNA, 25 bp, SARS Virus
tccgttaaagtaagagtaccagtgc

SEQ ID NO: 233454 - DNA, 25 bp, SARS Virus
ccgttaaagtacaagtaccagtgcc

SEQ ID NO: 233455 - DNA, 25 bp, SARS Virus
cgttaaagtacgagtaccagtgccg

SEQ ID NO: 233456 - DNA, 25 bp, SARS Virus
gttaaagtacgaataccagtgccgt

SEQ ID NO: 233457 - DNA, 25 bp, SARS Virus
ttaaagtacgagaaccagtgccgtc

SEQ ID NO: 233458 - DNA, 25 bp, SARS Virus
taaagtacgagtaccagtgccgtcg

SEQ ID NO: 233459 - DNA, 25 bp, SARS Virus
aaagtacgagtaacagtgccgtcgt

SEQ ID NO: 233460 - DNA, 25 bp, SARS Virus
aagtacgagtacaagtgccgtcgtc

SEQ ID NO: 233461 - DNA, 25 bp, SARS Virus
agtacgagtaccagtgccgtcgtca

SEQ ID NO: 233462 - DNA, 25 bp, SARS Virus
gtacgagtaccaatgccgtcgtcat

SEQ ID NO: 233463 - DNA, 25 bp, SARS Virus
tacgagtaccagagccgtcgtcatc

SEQ ID NO: 233464 - DNA, 25 bp, SARS Virus
acgagtaccagtaccgtcgtcatct

SEQ ID NO: 233465 - DNA, 25 bp, SARS Virus
cgagtaccagtgacgtcgtcatctg

SEQ ID NO: 233466 - DNA, 25 bp, SARS Virus
gagtaccagtgcagtcgtcatctgt

SEQ ID NO: 233467 - DNA, 25 bp, SARS Virus
agtaccagtgccatcgtcatctgtg

SEQ ID NO: 233468 - DNA, 25 bp, SARS Virus
gtaccagtgccgacgtcatctgtgg

SEQ ID NO: 233469 - DNA, 25 bp, SARS Virus
taccagtgccgtagtcatctgtgga

SEQ ID NO: 233470 - DNA, 25 bp, SARS Virus
accagtgccgtcatcatctgtggag

SEQ ID NO: 233471 - DNA, 25 bp, SARS Virus
ccagtgccgtcgacatctgtggaga

SEQ ID NO: 233472 - DNA, 25 bp, SARS Virus
cagtgccgtcgtaatctgtggagag

SEQ ID NO: 233473 - DNA, 25 bp, SARS Virus
agtgccgtcgtcatctgtggagaga

SEQ ID NO: 233474 - DNA, 25 bp, SARS Virus
gtgccgtcgtcaactgtggagagaa

SEQ ID NO: 233475 - DNA, 25 bp, SARS Virus
tgccgtcgtcatatgtggagagaag

SEQ ID NO: 233476 - DNA, 25 bp, SARS Virus
gccgtcgtcatcagtggagagaagc

SEQ ID NO: 233477 - DNA, 25 bp, SARS Virus
ccgtcgtcatctatggagagaagct

SEQ ID NO: 233478 - DNA, 25 bp, SARS Virus
cgtcgtcatctgaggagagaagctg

SEQ ID NO: 233479 - DNA, 25 bp, SARS Virus
gtcgtcatctgtagagagaagctga

SEQ ID NO: 233480 - DNA, 25 bp, SARS Virus
tcgtcatctgtgaagagaagctgag

SEQ ID NO: 233481 - DNA, 25 bp, SARS Virus
cgtcatctgtggagagaagctgagc

SEQ ID NO: 233482 - DNA, 25 bp, SARS Virus
gtcatctgtggaaagaagctgagct

SEQ ID NO: 233483 - DNA, 25 bp, SARS Virus
tcatctgtggagagaagctgagcta

SEQ ID NO: 233484 - DNA, 25 bp, SARS Virus
catctgtggagaaaagctgagctac

SEQ ID NO: 233485 - DNA, 25 bp, SARS Virus
atctgtggagagaagctgagctaca

SEQ ID NO: 233486 - DNA, 25 bp, SARS Virus
tctgtggagagaagctgagctacat

SEQ ID NO: 233487 - DNA, 25 bp, SARS Virus
ctgtggagagaaactgagctacatt

SEQ ID NO: 233488 - DNA, 25 bp, SARS Virus
tgtggagagaagatgagctacatta

SEQ ID NO: 233489 - DNA, 25 bp, SARS Virus
gtggagagaagcagagctacattag

SEQ ID NO: 233490 - DNA, 25 bp, SARS Virus
tggagagaagctaagctacattagt

SEQ ID NO: 233491 - DNA, 25 bp, SARS Virus
ggagagaagctgagctacattagtt

SEQ ID NO: 233492 - DNA, 25 bp, SARS Virus
gagagaagctgaactacattagttc

SEQ ID NO: 233493 - DNA, 25 bp, SARS Virus
agagaagctgagatacattagttca

SEQ ID NO: 233494 - DNA, 25 bp, SARS Virus
gagaagctgagcaacattagttcaa

SEQ ID NO: 233495 - DNA, 25 bp, SARS Virus
agaagctgagctacattagttcaac

SEQ ID NO: 233496 - DNA, 25 bp, SARS Virus
gaagctgagctaaattagttcaaca

SEQ ID NO: 233497 - DNA, 25 bp, SARS Virus
aagctgagctacattagttcaacaa

SEQ ID NO: 233498 - DNA, 25 bp, SARS Virus
agctgagctacaatagttcaacaag

SEQ ID NO: 233499 - DNA, 25 bp, SARS Virus
gctgagctacataagttcaacaagc

SEQ ID NO: 233500 - DNA, 25 bp, SARS Virus
ctgagctacattagttcaacaagcc

SEQ ID NO: 233501 - DNA, 25 bp, SARS Virus
tgagctacattaattcaacaagcct

SEQ ID NO: 233502 - DNA, 25 bp, SARS Virus
gagctacattagatcaacaagcctt

SEQ ID NO: 233503 - DNA, 25 bp, SARS Virus
agctacattagtacaacaagccttt

SEQ ID NO: 233504 - DNA, 25 bp, SARS Virus
gctacattagttaaacaagcctttc

SEQ ID NO: 233505 - DNA, 25 bp, SARS Virus
ctacattagttcaacaagcctttct

SEQ ID NO: 233506 - DNA, 25 bp, SARS Virus
tacattagttcaacaagcctttctc

SEQ ID NO: 233507 - DNA, 25 bp, SARS Virus
acattagttcaaaaagcctttctca

SEQ ID NO: 233508 - DNA, 25 bp, SARS Virus
cattagttcaacaagcctttctcac

SEQ ID NO: 233509 - DNA, 25 bp, SARS Virus
attagttcaacaagcctttctcacg

SEQ ID NO: 233510 - DNA, 25 bp, SARS Virus
ttagttcaacaaacctttctcacgt

SEQ ID NO: 233511 - DNA, 25 bp, SARS Virus
tagttcaacaagactttctcacgtg

SEQ ID NO: 233512 - DNA, 25 bp, SARS Virus
agttcaacaagcatttctcacgtgt

SEQ ID NO: 233513 - DNA, 25 bp, SARS Virus
gttcaacaagccattctcacgtgta

SEQ ID NO: 233514 - DNA, 25 bp, SARS Virus
ttcaacaagcctatctcacgtgtaa

SEQ ID NO: 233515 - DNA, 25 bp, SARS Virus
tcaacaagccttactcacgtgtaac

SEQ ID NO: 233516 - DNA, 25 bp, SARS Virus
caacaagcctttatcacgtgtaact

SEQ ID NO: 233517 - DNA, 25 bp, SARS Virus
aacaagcctttcacacgtgtaactg

SEQ ID NO: 233518 - DNA, 25 bp, SARS Virus
acaagcctttctaacgtgtaactga

SEQ ID NO: 233519 - DNA, 25 bp, SARS Virus
caagcctttctcacgtgtaactgaa

SEQ ID NO: 233520 - DNA, 25 bp, SARS Virus
aagcctttctcaagtgtaactgaac

SEQ ID NO: 233521 - DNA, 25 bp, SARS Virus
agcctttctcacatgtaactgaacg

SEQ ID NO: 233522 - DNA, 25 bp, SARS Virus
gcctttctcacgagtaactgaacgg

SEQ ID NO: 233523 - DNA, 25 bp, SARS Virus
cctttctcacgtataactgaacggg

SEQ ID NO: 233524 - DNA, 25 bp, SARS Virus
ctttctcacgtgaaactgaacgggc

SEQ ID NO: 233525 - DNA, 25 bp, SARS Virus
tttctcacgtgtaactgaacgggcg

SEQ ID NO: 233526 - DNA, 25 bp, SARS Virus
ttctcacgtgtaactgaacgggcgc

SEQ ID NO: 233527 - DNA, 25 bp, SARS Virus
tctcacgtgtaaatgaacgggcgcg

SEQ ID NO: 233528 - DNA, 25 bp, SARS Virus
ctcacgtgtaacagaacgggcgcgc

SEQ ID NO: 233529 - DNA, 25 bp, SARS Virus
tcacgtgtaactaaacgggcgcgca

SEQ ID NO: 233530 - DNA, 25 bp, SARS Virus
cacgtgtaactgaacgggcgcgcac

SEQ ID NO: 233531 - DNA, 25 bp, SARS Virus
acgtgtaactgaacgggcgcgcacg

SEQ ID NO: 233532 - DNA, 25 bp, SARS Virus
cgtgtaactgaaagggcgcgcacgc

SEQ ID NO: 233533 - DNA, 25 bp, SARS Virus
gtgtaactgaacaggcgcgcacgct

SEQ ID NO: 233534 - DNA, 25 bp, SARS Virus
tgtaactgaacgagcgcgcacgctc

SEQ ID NO: 233535 - DNA, 25 bp, SARS Virus
gtaactgaacggacgcgcacgctct

SEQ ID NO: 233536 - DNA, 25 bp, SARS Virus
taactgaacgggagcgcacgctctt

SEQ ID NO: 233537 - DNA, 25 bp, SARS Virus
aactgaacgggcacgcacgctcttt

SEQ ID NO: 233538 - DNA, 25 bp, SARS Virus
actgaacgggcgagcacgctctttt

SEQ ID NO: 233539 - DNA, 25 bp, SARS Virus
ctgaacgggcgcacacgctctttta

SEQ ID NO: 233540 - DNA, 25 bp, SARS Virus
tgaacgggcgcgaacgctcttttag

SEQ ID NO: 233541 - DNA, 25 bp, SARS Virus
gaacgggcgcgcacgctcttttaga

SEQ ID NO: 233542 - DNA, 25 bp, SARS Virus
aacgggcgcgcaagctcttttagaa

SEQ ID NO: 233543 - DNA, 25 bp, SARS Virus
acgggcgcgcacactcttttagaaa

SEQ ID NO: 233544 - DNA, 25 bp, SARS Virus
cgggcgcgcacgatcttttagaaac

SEQ ID NO: 233545 - DNA, 25 bp, SARS Virus
gggcgcgcacgcacttttagaaact

SEQ ID NO: 233546 - DNA, 25 bp, SARS Virus
ggcgcgcacgctattttagaaacta

SEQ ID NO: 233547 - DNA, 25 bp, SARS Virus
gcgcgcacgctcatttagaaactac

SEQ ID NO: 233548 - DNA, 25 bp, SARS Virus
cgcgcacgctctattagaaactacg

SEQ ID NO: 233549 - DNA, 25 bp, SARS Virus
gcgcacgctcttatagaaactacgt

SEQ ID NO: 233550 - DNA, 25 bp, SARS Virus
cgcacgctctttaagaaactacgtt

SEQ ID NO: 233551 - DNA, 25 bp, SARS Virus
gcacgctcttttagaaactacgtta

SEQ ID NO: 233552 - DNA, 25 bp, SARS Virus
cacgctcttttaaaaactacgttag

SEQ ID NO: 233553 - DNA, 25 bp, SARS Virus
acgctcttttagaaactacgttagt

SEQ ID NO: 233554 - DNA, 25 bp, SARS Virus
cgctcttttagaaactacgttagtt

SEQ ID NO: 233555 - DNA, 25 bp, SARS Virus
gctcttttagaaactacgttagttc

SEQ ID NO: 233556 - DNA, 25 bp, SARS Virus
ctcttttagaaaatacgttagttct

SEQ ID NO: 233557 - DNA, 25 bp, SARS Virus
tcttttagaaacaacgttagttctc

SEQ ID NO: 233558 - DNA, 25 bp, SARS Virus
cttttagaaactacgttagttctcc

SEQ ID NO: 233559 - DNA, 25 bp, SARS Virus
ttttagaaactaagttagttctccc

SEQ ID NO: 233560 - DNA, 25 bp, SARS Virus
tttagaaactacattagttctccca

SEQ ID NO: 233561 - DNA, 25 bp, SARS Virus
ttagaaactacgatagttctcccat

SEQ ID NO: 233562 - DNA, 25 bp, SARS Virus
tagaaactacgtaagttctcccatg

SEQ ID NO: 233563 - DNA, 25 bp, SARS Virus
agaaactacgttagttctcccatgg

SEQ ID NO: 233564 - DNA, 25 bp, SARS Virus
gaaactacgttaattctcccatggg

SEQ ID NO: 233565 - DNA, 25 bp, SARS Virus
aaactacgttagatctcccatgggt

SEQ ID NO: 233566 - DNA, 25 bp, SARS Virus
aactacgttagtactcccatgggta

SEQ ID NO: 233567 - DNA, 25 bp, SARS Virus
actacgttagttatcccatgggtag

SEQ ID NO: 233568 - DNA, 25 bp, SARS Virus
ctacgttagttcacccatgggtaga

SEQ ID NO: 233569 - DNA, 25 bp, SARS Virus
tacgttagttctaccatgggtagac

SEQ ID NO: 233570 - DNA, 25 bp, SARS Virus
acgttagttctcacatgggtagacc

SEQ ID NO: 233571 - DNA, 25 bp, SARS Virus
cgttagttctccaatgggtagaccc

SEQ ID NO: 233572 - DNA, 25 bp, SARS Virus
gttagttctcccatgggtagacccg

SEQ ID NO: 233573 - DNA, 25 bp, SARS Virus
ttagttctcccaagggtagacccgg

SEQ ID NO: 233574 - DNA, 25 bp, SARS Virus
tagttctcccataggtagacccggt

SEQ ID NO: 233575 - DNA, 25 bp, SARS Virus
agttctcccatgagtagacccggtg

SEQ ID NO: 233576 - DNA, 25 bp, SARS Virus
gttctcccatggatagacccggtgt

SEQ ID NO: 233577 - DNA, 25 bp, SARS Virus
ttctcccatgggaagacccggtgtc

SEQ ID NO: 233578 - DNA, 25 bp, SARS Virus
tctcccatgggtagacccggtgtct

SEQ ID NO: 233579 - DNA, 25 bp, SARS Virus
ctcccatgggtaaacccggtgtctt

SEQ ID NO: 233580 - DNA, 25 bp, SARS Virus
tcccatgggtagacccggtgtcttt

SEQ ID NO: 233581 - DNA, 25 bp, SARS Virus
cccatgggtagaaccggtgtcttta

SEQ ID NO: 233582 - DNA, 25 bp, SARS Virus
ccatgggtagacacggtgtctttaa

SEQ ID NO: 233583 - DNA, 25 bp, SARS Virus
catgggtagaccaggtgtctttaac

SEQ ID NO: 233584 - DNA, 25 bp, SARS Virus
atgggtagacccagtgtctttaaca

SEQ ID NO: 233585 - DNA, 25 bp, SARS Virus
tgggtagacccgatgtctttaacaa

SEQ ID NO: 233586 - DNA, 25 bp, SARS Virus
gggtagacccggagtctttaacaac

SEQ ID NO: 233587 - DNA, 25 bp, SARS Virus
ggtagacccggtatctttaacaaca

SEQ ID NO: 233588 - DNA, 25 bp, SARS Virus
gtagacccggtgactttaacaacag

SEQ ID NO: 233589 - DNA, 25 bp, SARS Virus
tagacccggtgtatttaacaacagc

SEQ ID NO: 233590 - DNA, 25 bp, SARS Virus
agacccggtgtcattaacaacagct

SEQ ID NO: 233591 - DNA, 25 bp, SARS Virus
gacccggtgtctataacaacagctg

SEQ ID NO: 233592 - DNA, 25 bp, SARS Virus
acccggtgtcttaaacaacagctgt

SEQ ID NO: 233593 - DNA, 25 bp, SARS Virus
cccggtgtctttaacaacagctgta

SEQ ID NO: 233594 - DNA, 25 bp, SARS Virus
ccggtgtctttaacaacagctgtat

SEQ ID NO: 233595 - DNA, 25 bp, SARS Virus
cggtgtctttaaaaacagctgtatc

SEQ ID NO: 233596 - DNA, 25 bp, SARS Virus
ggtgtctttaacaacagctgtatcg

SEQ ID NO: 233597 - DNA, 25 bp, SARS Virus
gtgtctttaacaacagctgtatcgc

SEQ ID NO: 233598 - DNA, 25 bp, SARS Virus
tgtctttaacaaaagctgtatcgct

SEQ ID NO: 233599 - DNA, 25 bp, SARS Virus
gtctttaacaacagctgtatcgctc

SEQ ID NO: 233600 - DNA, 25 bp, SARS Virus
tctttaacaacaactgtatcgctca

SEQ ID NO: 233601 - DNA, 25 bp, SARS Virus
ctttaacaacagatgtatcgctcac

SEQ ID NO: 233602 - DNA, 25 bp, SARS Virus
tttaacaacagcagtatcgctcact

SEQ ID NO: 233603 - DNA, 25 bp, SARS Virus
ttaacaacagctatatcgctcactg

SEQ ID NO: 233604 - DNA, 25 bp, SARS Virus
taacaacagctgaatcgctcactga

SEQ ID NO: 233605 - DNA, 25 bp, SARS Virus
aacaacagctgtatcgctcactgac

SEQ ID NO: 233606 - DNA, 25 bp, SARS Virus
acaacagctgtaacgctcactgacg

SEQ ID NO: 233607 - DNA, 25 bp, SARS Virus
caacagctgtatagctcactgacgt

SEQ ID NO: 233608 - DNA, 25 bp, SARS Virus
aacagctgtatcactcactgacgtg

SEQ ID NO: 233609 - DNA, 25 bp, SARS Virus
acagctgtatcgatcactgacgtgg

SEQ ID NO: 233610 - DNA, 25 bp, SARS Virus
cagctgtatcgcacactgacgtgga

SEQ ID NO: 233611 - DNA, 25 bp, SARS Virus
agctgtatcgctaactgacgtggag

SEQ ID NO: 233612 - DNA, 25 bp, SARS Virus
gctgtatcgctcactgacgtggagg

SEQ ID NO: 233613 - DNA, 25 bp, SARS Virus
ctgtatcgctcaatgacgtggaggt

SEQ ID NO: 233614 - DNA, 25 bp, SARS Virus
tgtatcgctcacagacgtggaggta

SEQ ID NO: 233615 - DNA, 25 bp, SARS Virus
gtatcgctcactaacgtggaggtaa

SEQ ID NO: 233616 - DNA, 25 bp, SARS Virus
tatcgctcactgacgtggaggtaac

SEQ ID NO: 233617 - DNA, 25 bp, SARS Virus
atcgctcactgaagtggaggtaact

SEQ ID NO: 233618 - DNA, 25 bp, SARS Virus
tcgctcactgacatggaggtaactc

SEQ ID NO: 233619 - DNA, 25 bp, SARS Virus
cgctcactgacgaggaggtaactcg

SEQ ID NO: 233620 - DNA, 25 bp, SARS Virus
gctcactgacgtagaggtaactcga

SEQ ID NO: 233621 - DNA, 25 bp, SARS Virus
ctcactgacgtgaaggtaactcgag

SEQ ID NO: 233622 - DNA, 25 bp, SARS Virus
tcactgacgtggaggtaactcgagt

SEQ ID NO: 233623 - DNA, 25 bp, SARS Virus
cactgacgtggaagtaactcgagtg

SEQ ID NO: 233624 - DNA, 25 bp, SARS Virus
actgacgtggagataactcgagtgc

SEQ ID NO: 233625 - DNA, 25 bp, SARS Virus
ctgacgtggaggaaactcgagtgct

SEQ ID NO: 233626 - DNA, 25 bp, SARS Virus
tgacgtggaggtaactcgagtgctc

SEQ ID NO: 233627 - DNA, 25 bp, SARS Virus
gacgtggaggtaactcgagtgctca

SEQ ID NO: 233628 - DNA, 25 bp, SARS Virus
acgtggaggtaaatcgagtgctcac

SEQ ID NO: 233629 - DNA, 25 bp, SARS Virus
cgtggaggtaacacgagtgctcact

SEQ ID NO: 233630 - DNA, 25 bp, SARS Virus
gtggaggtaactagagtgctcactc

SEQ ID NO: 233631 - DNA, 25 bp, SARS Virus
tggaggtaactcaagtgctcactca

SEQ ID NO: 233632 - DNA, 25 bp, SARS Virus
ggaggtaactcgagtgctcactcaa

SEQ ID NO: 233633 - DNA, 25 bp, SARS Virus
gaggtaactcgaatgctcactcaag

SEQ ID NO: 233634 - DNA, 25 bp, SARS Virus
aggtaactcgagagctcactcaagt

SEQ ID NO: 233635 - DNA, 25 bp, SARS Virus
ggtaactcgagtactcactcaagtg

SEQ ID NO: 233636 - DNA, 25 bp, SARS Virus
gtaactcgagtgatcactcaagtgc

SEQ ID NO: 233637 - DNA, 25 bp, SARS Virus
taactcgagtgcacactcaagtgcc

SEQ ID NO: 233638 - DNA, 25 bp, SARS Virus
aactcgagtgctaactcaagtgcct

SEQ ID NO: 233639 - DNA, 25 bp, SARS Virus
actcgagtgctcactcaagtgcctc

SEQ ID NO: 233640 - DNA, 25 bp, SARS Virus
ctcgagtgctcaatcaagtgcctca

SEQ ID NO: 233641 - DNA, 25 bp, SARS Virus
tcgagtgctcacacaagtgcctcac

SEQ ID NO: 233642 - DNA, 25 bp, SARS Virus
cgagtgctcactaaagtgcctcacg

SEQ ID NO: 233643 - DNA, 25 bp, SARS Virus
gagtgctcactcaagtgcctcacgt

SEQ ID NO: 233644 - DNA, 25 bp, SARS Virus
agtgctcactcaagtgcctcacgtg

SEQ ID NO: 233645 - DNA, 25 bp, SARS Virus
gtgctcactcaaatgcctcacgtgg

SEQ ID NO: 233646 - DNA, 25 bp, SARS Virus
tgctcactcaagagcctcacgtggt

SEQ ID NO: 233647 - DNA, 25 bp, SARS Virus
gctcactcaagtacctcacgtggtg

SEQ ID NO: 233648 - DNA, 25 bp, SARS Virus
ctcactcaagtgactcacgtggtga

SEQ ID NO: 233649 - DNA, 25 bp, SARS Virus
tcactcaagtgcatcacgtggtgac

SEQ ID NO: 233650 - DNA, 25 bp, SARS Virus
cactcaagtgccacacgtggtgacg

SEQ ID NO: 233651 - DNA, 25 bp, SARS Virus
actcaagtgcctaacgtggtgacgg

SEQ ID NO: 233652 - DNA, 25 bp, SARS Virus
ctcaagtgcctcacgtggtgacggt

SEQ ID NO: 233653 - DNA, 25 bp, SARS Virus
tcaagtgcctcaagtggtgacggta

SEQ ID NO: 233654 - DNA, 25 bp, SARS Virus
caagtgcctcacatggtgacggtac

SEQ ID NO: 233655 - DNA, 25 bp, SARS Virus
aagtgcctcacgaggtgacggtacg

SEQ ID NO: 233656 - DNA, 25 bp, SARS Virus
agtgcctcacgtagtgacggtacga

SEQ ID NO: 233657 - DNA, 25 bp, SARS Virus
gtgcctcacgtgatgacggtacgaa

SEQ ID NO: 233658 - DNA, 25 bp, SARS Virus
tgcctcacgtggagacggtacgaat

SEQ ID NO: 233659 - DNA, 25 bp, SARS Virus
gcctcacgtggtaacggtacgaatc

SEQ ID NO: 233660 - DNA, 25 bp, SARS Virus
cctcacgtggtgacggtacgaatca

SEQ ID NO: 233661 - DNA, 25 bp, SARS Virus
ctcacgtggtgaaggtacgaatcac

SEQ ID NO: 233662 - DNA, 25 bp, SARS Virus
tcacgtggtgacagtacgaatcaca

SEQ ID NO: 233663 - DNA, 25 bp, SARS Virus
cacgtggtgacgatacgaatcacaa

SEQ ID NO: 233664 - DNA, 25 bp, SARS Virus
acgtggtgacggaacgaatcacaag

SEQ ID NO: 233665 - DNA, 25 bp, SARS Virus
cgtggtgacggtacgaatcacaagg

SEQ ID NO: 233666 - DNA, 25 bp, SARS Virus
gtggtgacggtaagaatcacaaggt

SEQ ID NO: 233667 - DNA, 25 bp, SARS Virus
tggtgacggtacaaatcacaaggtc

SEQ ID NO: 233668 - DNA, 25 bp, SARS Virus
ggtgacggtacgaatcacaaggtca

SEQ ID NO: 233669 - DNA, 25 bp, SARS Virus
gtgacggtacgaatcacaaggtcaa

SEQ ID NO: 233670 - DNA, 25 bp, SARS Virus
tgacggtacgaaacacaaggtcaaa

SEQ ID NO: 233671 - DNA, 25 bp, SARS Virus
gacggtacgaataacaaggtcaaaa

SEQ ID NO: 233672 - DNA, 25 bp, SARS Virus
acggtacgaatcacaaggtcaaaac

SEQ ID NO: 233673 - DNA, 25 bp, SARS Virus
cggtacgaatcaaaaggtcaaaaca

SEQ ID NO: 233674 - DNA, 25 bp, SARS Virus
ggtacgaatcacaaggtcaaaacaa

SEQ ID NO: 233675 - DNA, 25 bp, SARS Virus
gtacgaatcacaaggtcaaaacaag

SEQ ID NO: 233676 - DNA, 25 bp, SARS Virus
tacgaatcacaaagtcaaaacaagt

SEQ ID NO: 233677 - DNA, 25 bp, SARS Virus
acgaatcacaagatcaaaacaagta

SEQ ID NO: 233678 - DNA, 25 bp, SARS Virus
cgaatcacaaggacaaaacaagtat

SEQ ID NO: 233679 - DNA, 25 bp, SARS Virus
gaatcacaaggtaaaaacaagtatt

SEQ ID NO: 233680 - DNA, 25 bp, SARS Virus
aatcacaaggtcaaaacaagtatta

SEQ ID NO: 233681 - DNA, 25 bp, SARS Virus
atcacaaggtcaaaacaagtattag

SEQ ID NO: 233682 - DNA, 25 bp, SARS Virus
tcacaaggtcaaaacaagtattaga

SEQ ID NO: 233683 - DNA, 25 bp, SARS Virus
cacaaggtcaaaacaagtattagaa

SEQ ID NO: 233684 - DNA, 25 bp, SARS Virus
acaaggtcaaaaaaagtattagaag

SEQ ID NO: 233685 - DNA, 25 bp, SARS Virus
caaggtcaaaacaagtattagaagt

SEQ ID NO: 233686 - DNA, 25 bp, SARS Virus
aaggtcaaaacaagtattagaagtt

SEQ ID NO: 233687 - DNA, 25 bp, SARS Virus
aggtcaaaacaaatattagaagtta

SEQ ID NO: 233688 - DNA, 25 bp, SARS Virus
ggtcaaaacaagaattagaagttac

SEQ ID NO: 233689 - DNA, 25 bp, SARS Virus
gtcaaaacaagtattagaagttacc

SEQ ID NO: 233690 - DNA, 25 bp, SARS Virus
tcaaaacaagtaatagaagttaccc

SEQ ID NO: 233691 - DNA, 25 bp, SARS Virus
caaaacaagtataagaagttaccct

SEQ ID NO: 233692 - DNA, 25 bp, SARS Virus
aaaacaagtattagaagttacccta

SEQ ID NO: 233693 - DNA, 25 bp, SARS Virus
aaacaagtattaaaagttaccctag

SEQ ID NO: 233694 - DNA, 25 bp, SARS Virus
aacaagtattagaagttaccctagt

SEQ ID NO: 233695 - DNA, 25 bp, SARS Virus
acaagtattagaagttaccctagtc

SEQ ID NO: 233696 - DNA, 25 bp, SARS Virus
caagtattagaaattaccctagtca

SEQ ID NO: 233697 - DNA, 25 bp, SARS Virus
aagtattagaagataccctagtcac

SEQ ID NO: 233698 - DNA, 25 bp, SARS Virus
agtattagaagtaaccctagtcacg

SEQ ID NO: 233699 - DNA, 25 bp, SARS Virus
gtattagaagttaccctagtcacgg

SEQ ID NO: 233700 - DNA, 25 bp, SARS Virus
tattagaagttaacctagtcacggt

SEQ ID NO: 233701 - DNA, 25 bp, SARS Virus
attagaagttacactagtcacggtt

SEQ ID NO: 233702 - DNA, 25 bp, SARS Virus
ttagaagttaccatagtcacggttc

SEQ ID NO: 233703 - DNA, 25 bp, SARS Virus
tagaagttacccaagtcacggttcg

SEQ ID NO: 233704 - DNA, 25 bp, SARS Virus
agaagttaccctagtcacggttcga

SEQ ID NO: 233705 - DNA, 25 bp, SARS Virus
gaagttaccctaatcacggttcgag

SEQ ID NO: 233706 - DNA, 25 bp, SARS Virus
aagttaccctagacacggttcgagc

SEQ ID NO: 233707 - DNA, 25 bp, SARS Virus
agttaccctagtaacggttcgagca

SEQ ID NO: 233708 - DNA, 25 bp, SARS Virus
gttaccctagtcacggttcgagcag

SEQ ID NO: 233709 - DNA, 25 bp, SARS Virus
ttaccctagtcaaggttcgagcagt

SEQ ID NO: 233710 - DNA, 25 bp, SARS Virus
taccctagtcacagttcgagcagtg

SEQ ID NO: 233711 - DNA, 25 bp, SARS Virus
accctagtcacgattcgagcagtgg

SEQ ID NO: 233712 - DNA, 25 bp, SARS Virus
ccctagtcacggatcgagcagtgga

SEQ ID NO: 233713 - DNA, 25 bp, SARS Virus
cctagtcacggtacgagcagtggat

SEQ ID NO: 233714 - DNA, 25 bp, SARS Virus
ctagtcacggttagagcagtggatt

SEQ ID NO: 233715 - DNA, 25 bp, SARS Virus
tagtcacggttcaagcagtggattc

SEQ ID NO: 233716 - DNA, 25 bp, SARS Virus
agtcacggttcgagcagtggattca

SEQ ID NO: 233717 - DNA, 25 bp, SARS Virus
gtcacggttcgaacagtggattcag

SEQ ID NO: 233718 - DNA, 25 bp, SARS Virus
tcacggttcgagaagtggattcagt

SEQ ID NO: 233719 - DNA, 25 bp, SARS Virus
cacggttcgagcagtggattcagta

SEQ ID NO: 233720 - DNA, 25 bp, SARS Virus
acggttcgagcaatggattcagtat

SEQ ID NO: 233721 - DNA, 25 bp, SARS Virus
cggttcgagcagaggattcagtatt

SEQ ID NO: 233722 - DNA, 25 bp, SARS Virus
ggttcgagcagtagattcagtattc

SEQ ID NO: 233723 - DNA, 25 bp, SARS Virus
gttcgagcagtgaattcagtattct

SEQ ID NO: 233724 - DNA, 25 bp, SARS Virus
ttcgagcagtggattcagtattctg

SEQ ID NO: 233725 - DNA, 25 bp, SARS Virus
tcgagcagtggaatcagtattctga

SEQ ID NO: 233726 - DNA, 25 bp, SARS Virus
cgagcagtggatacagtattctgaa

SEQ ID NO: 233727 - DNA, 25 bp, SARS Virus
gagcagtggattaagtattctgaaa

SEQ ID NO: 233728 - DNA, 25 bp, SARS Virus
agcagtggattcagtattctgaaat

SEQ ID NO: 233729 - DNA, 25 bp, SARS Virus
gcagtggattcaatattctgaaatc

SEQ ID NO: 233730 - DNA, 25 bp, SARS Virus
cagtggattcagaattctgaaatct

SEQ ID NO: 233731 - DNA, 25 bp, SARS Virus
agtggattcagtattctgaaatcta

SEQ ID NO: 233732 - DNA, 25 bp, SARS Virus
gtggattcagtaatctgaaatctag

SEQ ID NO: 233733 - DNA, 25 bp, SARS Virus
tggattcagtatactgaaatctagc

SEQ ID NO: 233734 - DNA, 25 bp, SARS Virus
ggattcagtattatgaaatctagct

SEQ ID NO: 233735 - DNA, 25 bp, SARS Virus
gattcagtattcagaaatctagcta

SEQ ID NO: 233736 - DNA, 25 bp, SARS Virus
attcagtattctaaaatctagctac

SEQ ID NO: 233737 - DNA, 25 bp, SARS Virus
ttcagtattctgaaatctagctacg

SEQ ID NO: 233738 - DNA, 25 bp, SARS Virus
tcagtattctgaaatctagctacgg

SEQ ID NO: 233739 - DNA, 25 bp, SARS Virus
cagtattctgaaatctagctacggt

SEQ ID NO: 233740 - DNA, 25 bp, SARS Virus
agtattctgaaaactagctacggta

SEQ ID NO: 233741 - DNA, 25 bp, SARS Virus
gtattctgaaatatagctacggtat

SEQ ID NO: 233742 - DNA, 25 bp, SARS Virus
tattctgaaatcaagctacggtatc

SEQ ID NO: 233743 - DNA, 25 bp, SARS Virus
attctgaaatctagctacggtatcg

SEQ ID NO: 233744 - DNA, 25 bp, SARS Virus
ttctgaaatctaactacggtatcga

SEQ ID NO: 233745 - DNA, 25 bp, SARS Virus
tctgaaatctagatacggtatcgat

SEQ ID NO: 233746 - DNA, 25 bp, SARS Virus
ctgaaatctagcaacggtatcgata

SEQ ID NO: 233747 - DNA, 25 bp, SARS Virus
tgaaatctagctacggtatcgatac

SEQ ID NO: 233748 - DNA, 25 bp, SARS Virus
gaaatctagctaaggtatcgatact

SEQ ID NO: 233749 - DNA, 25 bp, SARS Virus
aaatctagctacagtatcgatactg

SEQ ID NO: 233750 - DNA, 25 bp, SARS Virus
aatctagctacgatatcgatactgg

SEQ ID NO: 233751 - DNA, 25 bp, SARS Virus
atctagctacggaatcgatactggt

SEQ ID NO: 233752 - DNA, 25 bp, SARS Virus
tctagctacggtatcgatactggtg

SEQ ID NO: 233753 - DNA, 25 bp, SARS Virus
ctagctacggtaacgatactggtgg

SEQ ID NO: 233754 - DNA, 25 bp, SARS Virus
tagctacggtatagatactggtggc

SEQ ID NO: 233755 - DNA, 25 bp, SARS Virus
agctacggtatcaatactggtggcc

SEQ ID NO: 233756 - DNA, 25 bp, SARS Virus
gctacggtatcgatactggtggccg

SEQ ID NO: 233757 - DNA, 25 bp, SARS Virus
ctacggtatcgaaactggtggccga

SEQ ID NO: 233758 - DNA, 25 bp, SARS Virus
tacggtatcgatactggtggccgag

SEQ ID NO: 233759 - DNA, 25 bp, SARS Virus
acggtatcgataatggtggccgagg

SEQ ID NO: 233760 - DNA, 25 bp, SARS Virus
cggtatcgatacaggtggccgaggg

SEQ ID NO: 233761 - DNA, 25 bp, SARS Virus
ggtatcgatactagtggccgaggga

SEQ ID NO: 233762 - DNA, 25 bp, SARS Virus
gtatcgatactgatggccgagggaa

SEQ ID NO: 233763 - DNA, 25 bp, SARS Virus
tatcgatactggaggccgagggaat

SEQ ID NO: 233764 - DNA, 25 bp, SARS Virus
atcgatactggtagccgagggaata

SEQ ID NO: 233765 - DNA, 25 bp, SARS Virus
tcgatactggtgaccgagggaataa

SEQ ID NO: 233766 - DNA, 25 bp, SARS Virus
cgatactggtggacgagggaataat

SEQ ID NO: 233767 - DNA, 25 bp, SARS Virus
gatactggtggcagagggaataatg

SEQ ID NO: 233768 - DNA, 25 bp, SARS Virus
atactggtggccaagggaataatgg

SEQ ID NO: 233769 - DNA, 25 bp, SARS Virus
tactggtggccgagggaataatggc

SEQ ID NO: 233770 - DNA, 25 bp, SARS Virus
actggtggccgaaggaataatggca

SEQ ID NO: 233771 - DNA, 25 bp, SARS Virus
ctggtggccgagagaataatggcaa

SEQ ID NO: 233772 - DNA, 25 bp, SARS Virus
tggtggccgaggaaataatggcaag

SEQ ID NO: 233773 - DNA, 25 bp, SARS Virus
ggtggccgagggaataatggcaaga

SEQ ID NO: 233774 - DNA, 25 bp, SARS Virus
gtggccgagggaataatggcaagaa

SEQ ID NO: 233775 - DNA, 25 bp, SARS Virus
tggccgagggaaaaatggcaagaat

SEQ ID NO: 233776 - DNA, 25 bp, SARS Virus
ggccgagggaataatggcaagaatg

SEQ ID NO: 233777 - DNA, 25 bp, SARS Virus
gccgagggaataatggcaagaatgc

SEQ ID NO: 233778 - DNA, 25 bp, SARS Virus
ccgagggaataaaggcaagaatgct

SEQ ID NO: 233779 - DNA, 25 bp, SARS Virus
cgagggaataatagcaagaatgctt

SEQ ID NO: 233780 - DNA, 25 bp, SARS Virus
gagggaataatgacaagaatgcttc

SEQ ID NO: 233781 - DNA, 25 bp, SARS Virus
agggaataatggaaagaatgcttct

SEQ ID NO: 233782 - DNA, 25 bp, SARS Virus
gggaataatggcaagaatgcttctt

SEQ ID NO: 233783 - DNA, 25 bp, SARS Virus
ggaataatggcaagaatgcttcttc

SEQ ID NO: 233784 - DNA, 25 bp, SARS Virus
gaataatggcaaaaatgcttcttct

SEQ ID NO: 233785 - DNA, 25 bp, SARS Virus
aaaagaaaagttctgcaccaactta

SEQ ID NO: 233786 - DNA, 25 bp, SARS Virus
aaagaaaagttgcgcaccaacttac

SEQ ID NO: 233787 - DNA, 25 bp, SARS Virus
aagaaaagttgtccaccaacttact

SEQ ID NO: 233788 - DNA, 25 bp, SARS Virus
agaaaagttgtgcaccaacttactg

SEQ ID NO: 233789 - DNA, 25 bp, SARS Virus
gaaaagttgtgccccaacttactga

SEQ ID NO: 233790 - DNA, 25 bp, SARS Virus
aaaagttgtgcaccaacttactgaa

SEQ ID NO: 233791 - DNA, 25 bp, SARS Virus
aaagttgtgcaccaacttactgaaa

SEQ ID NO: 233792 - DNA, 25 bp, SARS Virus
aagttgtgcacccacttactgaaac

SEQ ID NO: 233793 - DNA, 25 bp, SARS Virus
agttgtgcaccaccttactgaaact

SEQ ID NO: 233794 - DNA, 25 bp, SARS Virus
gttgtgcaccaacttactgaaactg

SEQ ID NO: 233795 - DNA, 25 bp, SARS Virus
ttgtgcaccaacctactgaaactga

SEQ ID NO: 233796 - DNA, 25 bp, SARS Virus
tgtgcaccaactcactgaaactgaa

SEQ ID NO: 233797 - DNA, 25 bp, SARS Virus
gtgcaccaacttcctgaaactgaaa

SEQ ID NO: 233798 - DNA, 25 bp, SARS Virus
tgcaccaacttactgaaactgaaaa

SEQ ID NO: 233799 - DNA, 25 bp, SARS Virus
gcaccaacttaccgaaactgaaaac

SEQ ID NO: 233800 - DNA, 25 bp, SARS Virus
caccaacttactcaaactgaaaact

SEQ ID NO: 233801 - DNA, 25 bp, SARS Virus
accaacttactgcaactgaaaactc

SEQ ID NO: 233802 - DNA, 25 bp, SARS Virus
ccaacttactgacactgaaaactca

SEQ ID NO: 233803 - DNA, 25 bp, SARS Virus
caacttactgaacctgaaaactcaa

SEQ ID NO: 233804 - DNA, 25 bp, SARS Virus
aacttactgaaactgaaaactcaat

SEQ ID NO: 233805 - DNA, 25 bp, SARS Virus
acttactgaaaccgaaaactcaatt

SEQ ID NO: 233806 - DNA, 25 bp, SARS Virus
cttactgaaactcaaaactcaattc

SEQ ID NO: 233807 - DNA, 25 bp, SARS Virus
ttactgaaactgcaaactcaattct

SEQ ID NO: 233808 - DNA, 25 bp, SARS Virus
tactgaaactgacaactcaattctc

SEQ ID NO: 233809 - DNA, 25 bp, SARS Virus
actgaaactgaacactcaattctcc

SEQ ID NO: 233810 - DNA, 25 bp, SARS Virus
ctgaaactgaaacctcaattctcct

SEQ ID NO: 233811 - DNA, 25 bp, SARS Virus
tgaaactgaaaactcaattctcctt

SEQ ID NO: 233812 - DNA, 25 bp, SARS Virus
gaaactgaaaacccaattctccttt

SEQ ID NO: 233813 - DNA, 25 bp, SARS Virus
aaactgaaaactcaattctcctttg

SEQ ID NO: 233814 - DNA, 25 bp, SARS Virus
aactgaaaactccattctcctttgt

SEQ ID NO: 233815 - DNA, 25 bp, SARS Virus
actgaaaactcacttctcctttgtg

SEQ ID NO: 233816 - DNA, 25 bp, SARS Virus
ctgaaaactcaactctcctttgtgt

SEQ ID NO: 233817 - DNA, 25 bp, SARS Virus
tgaaaactcaatcctcctttgtgtt

SEQ ID NO: 233818 - DNA, 25 bp, SARS Virus
gaaaactcaattctcctttgtgttt

SEQ ID NO: 233819 - DNA, 25 bp, SARS Virus
aaaactcaattcccctttgtgtttg

SEQ ID NO: 233820 - DNA, 25 bp, SARS Virus
aaactcaattctcctttgtgtttga

SEQ ID NO: 233821 - DNA, 25 bp, SARS Virus
aactcaattctcctttgtgtttgaa

SEQ ID NO: 233822 - DNA, 25 bp, SARS Virus
actcaattctcccttgtgtttgaaa

SEQ ID NO: 233823 - DNA, 25 bp, SARS Virus
ctcaattctcctctgtgtttgaaac

SEQ ID NO: 233824 - DNA, 25 bp, SARS Virus
tcaattctccttcgtgtttgaaacc

SEQ ID NO: 233825 - DNA, 25 bp, SARS Virus
caattctcctttctgtttgaaaccc

SEQ ID NO: 233826 - DNA, 25 bp, SARS Virus
aattctcctttgcgtttgaaacccg

SEQ ID NO: 233827 - DNA, 25 bp, SARS Virus
attctcctttgtctttgaaacccgt

SEQ ID NO: 233828 - DNA, 25 bp, SARS Virus
ttctcctttgtgcttgaaacccgta

SEQ ID NO: 233829 - DNA, 25 bp, SARS Virus
tctcctttgtgtctgaaacccgtaa

SEQ ID NO: 233830 - DNA, 25 bp, SARS Virus
ctcctttgtgttcgaaacccgtaag

SEQ ID NO: 233831 - DNA, 25 bp, SARS Virus
tcctttgtgtttcaaacccgtaagg

SEQ ID NO: 233832 - DNA, 25 bp, SARS Virus
cctttgtgtttgcaacccgtaaggg

SEQ ID NO: 233833 - DNA, 25 bp, SARS Virus
ctttgtgtttgacacccgtaagggg

SEQ ID NO: 233834 - DNA, 25 bp, SARS Virus
tttgtgtttgaaccccgtaagggga

SEQ ID NO: 233835 - DNA, 25 bp, SARS Virus
ttgtgtttgaaacccgtaaggggaa

SEQ ID NO: 233836 - DNA, 25 bp, SARS Virus
tgtgtttgaaacccgtaaggggaaa

SEQ ID NO: 233837 - DNA, 25 bp, SARS Virus
gtgtttgaaacccgtaaggggaaac

SEQ ID NO: 233838 - DNA, 25 bp, SARS Virus
tgtttgaaacccctaaggggaaact

SEQ ID NO: 233839 - DNA, 25 bp, SARS Virus
gtttgaaacccgcaaggggaaactt

SEQ ID NO: 233840 - DNA, 25 bp, SARS Virus
tttgaaacccgtcaggggaaacttt

SEQ ID NO: 233841 - DNA, 25 bp, SARS Virus
ttgaaacccgtacggggaaactttc

SEQ ID NO: 233842 - DNA, 25 bp, SARS Virus
tgaaacccgtaacgggaaactttca

SEQ ID NO: 233843 - DNA, 25 bp, SARS Virus
gaaacccgtaagcggaaactttcac

SEQ ID NO: 233844 - DNA, 25 bp, SARS Virus
aaacccgtaaggcgaaactttcaca

SEQ ID NO: 233845 - DNA, 25 bp, SARS Virus
aacccgtaagggcaaactttcacag

SEQ ID NO: 233846 - DNA, 25 bp, SARS Virus
acccgtaaggggcaactttcacagt

SEQ ID NO: 233847 - DNA, 25 bp, SARS Virus
cccgtaaggggacactttcacagtt

SEQ ID NO: 233848 - DNA, 25 bp, SARS Virus
ccgtaaggggaacctttcacagttt

SEQ ID NO: 233849 - DNA, 25 bp, SARS Virus
cgtaaggggaaactttcacagttta

SEQ ID NO: 233850 - DNA, 25 bp, SARS Virus
gtaaggggaaaccttcacagtttaa

SEQ ID NO: 233851 - DNA, 25 bp, SARS Virus
taaggggaaactctcacagtttaaa

SEQ ID NO: 233852 - DNA, 25 bp, SARS Virus
aaggggaaacttccacagtttaaag

SEQ ID NO: 233853 - DNA, 25 bp, SARS Virus
aggggaaactttcacagtttaaaga

SEQ ID NO: 233854 - DNA, 25 bp, SARS Virus
ggggaaactttcccagtttaaagaa

SEQ ID NO: 233855 - DNA, 25 bp, SARS Virus
gggaaactttcacagtttaaagaac

SEQ ID NO: 233856 - DNA, 25 bp, SARS Virus
ggaaactttcaccgtttaaagaacc

SEQ ID NO: 233857 - DNA, 25 bp, SARS Virus
gaaactttcacactttaaagaaccg

SEQ ID NO: 233858 - DNA, 25 bp, SARS Virus
aaactttcacagcttaaagaaccgt

SEQ ID NO: 233859 - DNA, 25 bp, SARS Virus
aactttcacagtctaaagaaccgtg

SEQ ID NO: 233860 - DNA, 25 bp, SARS Virus
actttcacagttcaaagaaccgtga

SEQ ID NO: 233861 - DNA, 25 bp, SARS Virus
ctttcacagtttcaagaaccgtgag

SEQ ID NO: 233862 - DNA, 25 bp, SARS Virus
tttcacagtttacagaaccgtgaga

SEQ ID NO: 233863 - DNA, 25 bp, SARS Virus
ttcacagtttaacgaaccgtgagaa

SEQ ID NO: 233864 - DNA, 25 bp, SARS Virus
tcacagtttaaacaaccgtgagaat

SEQ ID NO: 233865 - DNA, 25 bp, SARS Virus
cacagtttaaagcaccgtgagaatt

SEQ ID NO: 233866 - DNA, 25 bp, SARS Virus
acagtttaaagacccgtgagaatta

SEQ ID NO: 233867 - DNA, 25 bp, SARS Virus
cagtttaaagaaccgtgagaattaa

SEQ ID NO: 233868 - DNA, 25 bp, SARS Virus
agtttaaagaaccgtgagaattaaa

SEQ ID NO: 233869 - DNA, 25 bp, SARS Virus
gtttaaagaaccctgagaattaaag

SEQ ID NO: 233870 - DNA, 25 bp, SARS Virus
tttaaagaaccgcgagaattaaagc

SEQ ID NO: 233871 - DNA, 25 bp, SARS Virus
ttaaagaaccgtcagaattaaagct

SEQ ID NO: 233872 - DNA, 25 bp, SARS Virus
taaagaaccgtgcgaattaaagctt

SEQ ID NO: 233873 - DNA, 25 bp, SARS Virus
aaagaaccgtgacaattaaagcttc

SEQ ID NO: 233874 - DNA, 25 bp, SARS Virus
aagaaccgtgagcattaaagcttcc

SEQ ID NO: 233875 - DNA, 25 bp, SARS Virus
agaaccgtgagacttaaagcttccc

SEQ ID NO: 233876 - DNA, 25 bp, SARS Virus
gaaccgtgagaactaaagcttccca

SEQ ID NO: 233877 - DNA, 25 bp, SARS Virus
aaccgtgagaatcaaagcttcccac

SEQ ID NO: 233878 - DNA, 25 bp, SARS Virus
accgtgagaattcaagcttcccaca

SEQ ID NO: 233879 - DNA, 25 bp, SARS Virus
ccgtgagaattacagcttcccacag

SEQ ID NO: 233880 - DNA, 25 bp, SARS Virus
cgtgagaattaacgcttcccacaga

SEQ ID NO: 233881 - DNA, 25 bp, SARS Virus
gtgagaattaaaccttcccacagac

SEQ ID NO: 233882 - DNA, 25 bp, SARS Virus
tgagaattaaagcttcccacagacc

SEQ ID NO: 233883 - DNA, 25 bp, SARS Virus
gagaattaaagcctcccacagacca

SEQ ID NO: 233884 - DNA, 25 bp, SARS Virus
agaattaaagctccccacagaccac

SEQ ID NO: 233885 - DNA, 25 bp, SARS Virus
gaattaaagcttcccacagaccacg

SEQ ID NO: 233886 - DNA, 25 bp, SARS Virus
aattaaagcttcccacagaccacga

SEQ ID NO: 233887 - DNA, 25 bp, SARS Virus
attaaagcttcccacagaccacgag

SEQ ID NO: 233888 - DNA, 25 bp, SARS Virus
ttaaagcttcccccagaccacgagc

SEQ ID NO: 233889 - DNA, 25 bp, SARS Virus
taaagcttcccacagaccacgagca

SEQ ID NO: 233890 - DNA, 25 bp, SARS Virus
aaagcttcccaccgaccacgagcat

SEQ ID NO: 233891 - DNA, 25 bp, SARS Virus
aagcttcccacacaccacgagcatc

SEQ ID NO: 233892 - DNA, 25 bp, SARS Virus
agcttcccacagcccacgagcatcg

SEQ ID NO: 233893 - DNA, 25 bp, SARS Virus
gcttcccacagaccacgagcatcga

SEQ ID NO: 233894 - DNA, 25 bp, SARS Virus
cttcccacagaccacgagcatcgag

SEQ ID NO: 233895 - DNA, 25 bp, SARS Virus
ttcccacagaccccgagcatcgaga

SEQ ID NO: 233896 - DNA, 25 bp, SARS Virus
tcccacagaccacgagcatcgagaa

SEQ ID NO: 233897 - DNA, 25 bp, SARS Virus
cccacagaccaccagcatcgagaat

SEQ ID NO: 233898 - DNA, 25 bp, SARS Virus
ccacagaccacgcgcatcgagaata

SEQ ID NO: 233899 - DNA, 25 bp, SARS Virus
cacagaccacgaccatcgagaatag

SEQ ID NO: 233900 - DNA, 25 bp, SARS Virus
acagaccacgagcatcgagaatagt

SEQ ID NO: 233901 - DNA, 25 bp, SARS Virus
cagaccacgagcctcgagaatagtc

SEQ ID NO: 233902 - DNA, 25 bp, SARS Virus
agaccacgagcaccgagaatagtct

SEQ ID NO: 233903 - DNA, 25 bp, SARS Virus
gaccacgagcatcgagaatagtctc

SEQ ID NO: 233904 - DNA, 25 bp, SARS Virus
accacgagcatccagaatagtctcg

SEQ ID NO: 233905 - DNA, 25 bp, SARS Virus
ccacgagcatcgcgaatagtctcgc

SEQ ID NO: 233906 - DNA, 25 bp, SARS Virus
cacgagcatcgacaatagtctcgcg

SEQ ID NO: 233907 - DNA, 25 bp, SARS Virus
acgagcatcgagcatagtctcgcga

SEQ ID NO: 233908 - DNA, 25 bp, SARS Virus
cgagcatcgagactagtctcgcgag

SEQ ID NO: 233909 - DNA, 25 bp, SARS Virus
gagcatcgagaacagtctcgcgagt

SEQ ID NO: 233910 - DNA, 25 bp, SARS Virus
agcatcgagaatcgtctcgcgagtc

SEQ ID NO: 233911 - DNA, 25 bp, SARS Virus
gcatcgagaatactctcgcgagtca

SEQ ID NO: 233912 - DNA, 25 bp, SARS Virus
catcgagaatagcctcgcgagtcac

SEQ ID NO: 233913 - DNA, 25 bp, SARS Virus
atcgagaatagtctcgcgagtcact

SEQ ID NO: 233914 - DNA, 25 bp, SARS Virus
tcgagaatagtcccgcgagtcactt

SEQ ID NO: 233915 - DNA, 25 bp, SARS Virus
cgagaatagtctcgcgagtcacttg

SEQ ID NO: 233916 - DNA, 25 bp, SARS Virus
gagaatagtctcccgagtcacttgg

SEQ ID NO: 233917 - DNA, 25 bp, SARS Virus
agaatagtctcgcgagtcacttggt

SEQ ID NO: 233918 - DNA, 25 bp, SARS Virus
gaatagtctcgccagtcacttggtc

SEQ ID NO: 233919 - DNA, 25 bp, SARS Virus
aatagtctcgcgcgtcacttggtcc

SEQ ID NO: 233920 - DNA, 25 bp, SARS Virus
atagtctcgcgactcacttggtccg

SEQ ID NO: 233921 - DNA, 25 bp, SARS Virus
tagtctcgcgagccacttggtccgt

SEQ ID NO: 233922 - DNA, 25 bp, SARS Virus
agtctcgcgagtcacttggtccgtt

SEQ ID NO: 233923 - DNA, 25 bp, SARS Virus
gtctcgcgagtcccttggtccgtta

SEQ ID NO: 233924 - DNA, 25 bp, SARS Virus
tctcgcgagtcacttggtccgttaa

SEQ ID NO: 233925 - DNA, 25 bp, SARS Virus
ctcgcgagtcacctggtccgttaaa

SEQ ID NO: 233926 - DNA, 25 bp, SARS Virus
tcgcgagtcactcggtccgttaaag

SEQ ID NO: 233927 - DNA, 25 bp, SARS Virus
cgcgagtcacttcgtccgttaaagt

SEQ ID NO: 233928 - DNA, 25 bp, SARS Virus
gcgagtcacttgctccgttaaagta

SEQ ID NO: 233929 - DNA, 25 bp, SARS Virus
cgagtcacttggcccgttaaagtac

SEQ ID NO: 233930 - DNA, 25 bp, SARS Virus
gagtcacttggtccgttaaagtacg

SEQ ID NO: 233931 - DNA, 25 bp, SARS Virus
agtcacttggtccgttaaagtacga

SEQ ID NO: 233932 - DNA, 25 bp, SARS Virus
gtcacttggtcccttaaagtacgag

SEQ ID NO: 233933 - DNA, 25 bp, SARS Virus
tcacttggtccgctaaagtacgagt

SEQ ID NO: 233934 - DNA, 25 bp, SARS Virus
cacttggtccgtcaaagtacgagta

SEQ ID NO: 233935 - DNA, 25 bp, SARS Virus
acttggtccgttcaagtacgagtac

SEQ ID NO: 233936 - DNA, 25 bp, SARS Virus
cttggtccgttacagtacgagtacc

SEQ ID NO: 233937 - DNA, 25 bp, SARS Virus
ttggtccgttaacgtacgagtacca

SEQ ID NO: 233938 - DNA, 25 bp, SARS Virus
tggtccgttaaactacgagtaccag

SEQ ID NO: 233939 - DNA, 25 bp, SARS Virus
ggtccgttaaagcacgagtaccagt

SEQ ID NO: 233940 - DNA, 25 bp, SARS Virus
gtccgttaaagtccgagtaccagtg

SEQ ID NO: 233941 - DNA, 25 bp, SARS Virus
tccgttaaagtacgagtaccagtgc

SEQ ID NO: 233942 - DNA, 25 bp, SARS Virus
ccgttaaagtaccagtaccagtgcc

SEQ ID NO: 233943 - DNA, 25 bp, SARS Virus
cgttaaagtacgcgtaccagtgccg

SEQ ID NO: 233944 - DNA, 25 bp, SARS Virus
gttaaagtacgactaccagtgccgt

SEQ ID NO: 233945 - DNA, 25 bp, SARS Virus
ttaaagtacgagcaccagtgccgtc

SEQ ID NO: 233946 - DNA, 25 bp, SARS Virus
taaagtacgagtcccagtgccgtcg

SEQ ID NO: 233947 - DNA, 25 bp, SARS Virus
aaagtacgagtaccagtgccgtcgt

SEQ ID NO: 233948 - DNA, 25 bp, SARS Virus
aagtacgagtaccagtgccgtcgtc

SEQ ID NO: 233949 - DNA, 25 bp, SARS Virus
agtacgagtacccgtgccgtcgtca

SEQ ID NO: 233950 - DNA, 25 bp, SARS Virus
gtacgagtaccactgccgtcgtcat

SEQ ID NO: 233951 - DNA, 25 bp, SARS Virus
tacgagtaccagcgccgtcgtcatc

SEQ ID NO: 233952 - DNA, 25 bp, SARS Virus
acgagtaccagtcccgtcgtcatct

SEQ ID NO: 233953 - DNA, 25 bp, SARS Virus
cgagtaccagtgccgtcgtcatctg

SEQ ID NO: 233954 - DNA, 25 bp, SARS Virus
gagtaccagtgccgtcgtcatctgt

SEQ ID NO: 233955 - DNA, 25 bp, SARS Virus
agtaccagtgccctcgtcatctgtg

SEQ ID NO: 233956 - DNA, 25 bp, SARS Virus
gtaccagtgccgccgtcatctgtgg

SEQ ID NO: 233957 - DNA, 25 bp, SARS Virus
taccagtgccgtcgtcatctgtgga

SEQ ID NO: 233958 - DNA, 25 bp, SARS Virus
accagtgccgtcctcatctgtggag

SEQ ID NO: 233959 - DNA, 25 bp, SARS Virus
ccagtgccgtcgccatctgtggaga

SEQ ID NO: 233960 - DNA, 25 bp, SARS Virus
cagtgccgtcgtcatctgtggagag

SEQ ID NO: 233961 - DNA, 25 bp, SARS Virus
agtgccgtcgtcctctgtggagaga

SEQ ID NO: 233962 - DNA, 25 bp, SARS Virus
gtgccgtcgtcacctgtggagagaa

SEQ ID NO: 233963 - DNA, 25 bp, SARS Virus
tgccgtcgtcatctgtggagagaag

SEQ ID NO: 233964 - DNA, 25 bp, SARS Virus
gccgtcgtcatccgtggagagaagc

SEQ ID NO: 233965 - DNA, 25 bp, SARS Virus
ccgtcgtcatctctggagagaagct

SEQ ID NO: 233966 - DNA, 25 bp, SARS Virus
cgtcgtcatctgcggagagaagctg

SEQ ID NO: 233967 - DNA, 25 bp, SARS Virus
gtcgtcatctgtcgagagaagctga

SEQ ID NO: 233968 - DNA, 25 bp, SARS Virus
tcgtcatctgtgcagagaagctgag

SEQ ID NO: 233969 - DNA, 25 bp, SARS Virus
cgtcatctgtggcgagaagctgagc

SEQ ID NO: 233970 - DNA, 25 bp, SARS Virus
gtcatctgtggacagaagctgagct

SEQ ID NO: 233971 - DNA, 25 bp, SARS Virus
tcatctgtggagcgaagctgagcta

SEQ ID NO: 233972 - DNA, 25 bp, SARS Virus
catctgtggagacaagctgagctac

SEQ ID NO: 233973 - DNA, 25 bp, SARS Virus
atctgtggagagcagctgagctaca

SEQ ID NO: 233974 - DNA, 25 bp, SARS Virus
tctgtggagagacgctgagctacat

SEQ ID NO: 233975 - DNA, 25 bp, SARS Virus
ctgtggagagaacctgagctacatt

SEQ ID NO: 233976 - DNA, 25 bp, SARS Virus
tgtggagagaagctgagctacatta

SEQ ID NO: 233977 - DNA, 25 bp, SARS Virus
gtggagagaagccgagctacattag

SEQ ID NO: 233978 - DNA, 25 bp, SARS Virus
tggagagaagctcagctacattagt

SEQ ID NO: 233979 - DNA, 25 bp, SARS Virus
ggagagaagctgcgctacattagtt

SEQ ID NO: 233980 - DNA, 25 bp, SARS Virus
gagagaagctgacctacattagttc

SEQ ID NO: 233981 - DNA, 25 bp, SARS Virus
agagaagctgagctacattagttca

SEQ ID NO: 233982 - DNA, 25 bp, SARS Virus
gagaagctgagccacattagttcaa

SEQ ID NO: 233983 - DNA, 25 bp, SARS Virus
agaagctgagctccattagttcaac

SEQ ID NO: 233984 - DNA, 25 bp, SARS Virus
gaagctgagctacattagttcaaca

SEQ ID NO: 233985 - DNA, 25 bp, SARS Virus
aagctgagctaccttagttcaacaa

SEQ ID NO: 233986 - DNA, 25 bp, SARS Virus
agctgagctacactagttcaacaag

SEQ ID NO: 233987 - DNA, 25 bp, SARS Virus
gctgagctacatcagttcaacaagc

SEQ ID NO: 233988 - DNA, 25 bp, SARS Virus
ctgagctacattcgttcaacaagcc

SEQ ID NO: 233989 - DNA, 25 bp, SARS Virus
tgagctacattacttcaacaagcct

SEQ ID NO: 233990 - DNA, 25 bp, SARS Virus
gagctacattagctcaacaagcctt

SEQ ID NO: 233991 - DNA, 25 bp, SARS Virus
agctacattagtccaacaagccttt

SEQ ID NO: 233992 - DNA, 25 bp, SARS Virus
gctacattagttcaacaagcctttc

SEQ ID NO: 233993 - DNA, 25 bp, SARS Virus
ctacattagttccacaagcctttct

SEQ ID NO: 233994 - DNA, 25 bp, SARS Virus
tacattagttcaccaagcctttctc

SEQ ID NO: 233995 - DNA, 25 bp, SARS Virus
acattagttcaacaagcctttctca

SEQ ID NO: 233996 - DNA, 25 bp, SARS Virus
cattagttcaaccagcctttctcac

SEQ ID NO: 233997 - DNA, 25 bp, SARS Virus
attagttcaacacgcctttctcacg

SEQ ID NO: 233998 - DNA, 25 bp, SARS Virus
ttagttcaacaaccctttctcacgt

SEQ ID NO: 233999 - DNA, 25 bp, SARS Virus
tagttcaacaagcctttctcacgtg

SEQ ID NO: 234000 - DNA, 25 bp, SARS Virus
agttcaacaagcctttctcacgtgt

SEQ ID NO: 234001 - DNA, 25 bp, SARS Virus
gttcaacaagcccttctcacgtgta

SEQ ID NO: 234002 - DNA, 25 bp, SARS Virus
ttcaacaagcctctctcacgtgtaa

SEQ ID NO: 234003 - DNA, 25 bp, SARS Virus
tcaacaagccttcctcacgtgtaac

SEQ ID NO: 234004 - DNA, 25 bp, SARS Virus
caacaagcctttctcacgtgtaact

SEQ ID NO: 234005 - DNA, 25 bp, SARS Virus
aacaagcctttcccacgtgtaactg

SEQ ID NO: 234006 - DNA, 25 bp, SARS Virus
acaagcctttctcacgtgtaactga

SEQ ID NO: 234007 - DNA, 25 bp, SARS Virus
caagcctttctcccgtgtaactgaa

SEQ ID NO: 234008 - DNA, 25 bp, SARS Virus
aagcctttctcacgtgtaactgaac

SEQ ID NO: 234009 - DNA, 25 bp, SARS Virus
agcctttctcacctgtaactgaacg

SEQ ID NO: 234010 - DNA, 25 bp, SARS Virus
gcctttctcacgcgtaactgaacgg

SEQ ID NO: 234011 - DNA, 25 bp, SARS Virus
cctttctcacgtctaactgaacggg

SEQ ID NO: 234012 - DNA, 25 bp, SARS Virus
ctttctcacgtgcaactgaacgggc

SEQ ID NO: 234013 - DNA, 25 bp, SARS Virus
tttctcacgtgtcactgaacgggcg

SEQ ID NO: 234014 - DNA, 25 bp, SARS Virus
ttctcacgtgtacctgaacgggcgc

SEQ ID NO: 234015 - DNA, 25 bp, SARS Virus
tctcacgtgtaactgaacgggcgcg

SEQ ID NO: 234016 - DNA, 25 bp, SARS Virus
ctcacgtgtaaccgaacgggcgcgc

SEQ ID NO: 234017 - DNA, 25 bp, SARS Virus
tcacgtgtaactcaacgggcgcgca

SEQ ID NO: 234018 - DNA, 25 bp, SARS Virus
cacgtgtaactgcacgggcgcgcac

SEQ ID NO: 234019 - DNA, 25 bp, SARS Virus
acgtgtaactgaccgggcgcgcacg

SEQ ID NO: 234020 - DNA, 25 bp, SARS Virus
cgtgtaactgaacgggcgcgcacgc

SEQ ID NO: 234021 - DNA, 25 bp, SARS Virus
gtgtaactgaaccggcgcgcacgct

SEQ ID NO: 234022 - DNA, 25 bp, SARS Virus
tgtaactgaacgcgcgcgcacgctc

SEQ ID NO: 234023 - DNA, 25 bp, SARS Virus
gtaactgaacggccgcgcacgctct

SEQ ID NO: 234024 - DNA, 25 bp, SARS Virus
taactgaacgggcgcgcacgctctt

SEQ ID NO: 234025 - DNA, 25 bp, SARS Virus
aactgaacgggcccgcacgctcttt

SEQ ID NO: 234026 - DNA, 25 bp, SARS Virus
actgaacgggcgcgcacgctctttt

SEQ ID NO: 234027 - DNA, 25 bp, SARS Virus
ctgaacgggcgcccacgctctttta

SEQ ID NO: 234028 - DNA, 25 bp, SARS Virus
tgaacgggcgcgcacgctcttttag

SEQ ID NO: 234029 - DNA, 25 bp, SARS Virus
gaacgggcgcgcccgctcttttaga

SEQ ID NO: 234030 - DNA, 25 bp, SARS Virus
aacgggcgcgcacgctcttttagaa

SEQ ID NO: 234031 - DNA, 25 bp, SARS Virus
acgggcgcgcaccctcttttagaaa

SEQ ID NO: 234032 - DNA, 25 bp, SARS Virus
cgggcgcgcacgctcttttagaaac

SEQ ID NO: 234033 - DNA, 25 bp, SARS Virus
gggcgcgcacgcccttttagaaact

SEQ ID NO: 234034 - DNA, 25 bp, SARS Virus
ggcgcgcacgctcttttagaaacta

SEQ ID NO: 234035 - DNA, 25 bp, SARS Virus
gcgcgcacgctcctttagaaactac

SEQ ID NO: 234036 - DNA, 25 bp, SARS Virus
cgcgcacgctctcttagaaactacg

SEQ ID NO: 234037 - DNA, 25 bp, SARS Virus
gcgcacgctcttctagaaactacgt

SEQ ID NO: 234038 - DNA, 25 bp, SARS Virus
cgcacgctctttcagaaactacgtt

SEQ ID NO: 234039 - DNA, 25 bp, SARS Virus
gcacgctcttttcgaaactacgtta

SEQ ID NO: 234040 - DNA, 25 bp, SARS Virus
cacgctcttttacaaactacgttag

SEQ ID NO: 234041 - DNA, 25 bp, SARS Virus
acgctcttttagcaactacgttagt

SEQ ID NO: 234042 - DNA, 25 bp, SARS Virus
cgctcttttagacactacgttagtt

SEQ ID NO: 234043 - DNA, 25 bp, SARS Virus
gctcttttagaacctacgttagttc

SEQ ID NO: 234044 - DNA, 25 bp, SARS Virus
ctcttttagaaactacgttagttct

SEQ ID NO: 234045 - DNA, 25 bp, SARS Virus
tcttttagaaaccacgttagttctc

SEQ ID NO: 234046 - DNA, 25 bp, SARS Virus
cttttagaaactccgttagttctcc

SEQ ID NO: 234047 - DNA, 25 bp, SARS Virus
ttttagaaactacgttagttctccc

SEQ ID NO: 234048 - DNA, 25 bp, SARS Virus
tttagaaactaccttagttctccca

SEQ ID NO: 234049 - DNA, 25 bp, SARS Virus
ttagaaactacgctagttctcccat

SEQ ID NO: 234050 - DNA, 25 bp, SARS Virus
tagaaactacgtcagttctcccatg

SEQ ID NO: 234051 - DNA, 25 bp, SARS Virus
agaaactacgttcgttctcccatgg

SEQ ID NO: 234052 - DNA, 25 bp, SARS Virus
gaaactacgttacttctcccatggg

SEQ ID NO: 234053 - DNA, 25 bp, SARS Virus
aaactacgttagctctcccatgggt

SEQ ID NO: 234054 - DNA, 25 bp, SARS Virus
aactacgttagtcctcccatgggta

SEQ ID NO: 234055 - DNA, 25 bp, SARS Virus
actacgttagttctcccatgggtag

SEQ ID NO: 234056 - DNA, 25 bp, SARS Virus
ctacgttagttcccccatgggtaga

SEQ ID NO: 234057 - DNA, 25 bp, SARS Virus
tacgttagttctcccatgggtagac

SEQ ID NO: 234058 - DNA, 25 bp, SARS Virus
acgttagttctcccatgggtagacc

SEQ ID NO: 234059 - DNA, 25 bp, SARS Virus
cgttagttctcccatgggtagaccc

SEQ ID NO: 234060 - DNA, 25 bp, SARS Virus
gttagttctcccctgggtagacccg

SEQ ID NO: 234061 - DNA, 25 bp, SARS Virus
ttagttctcccacgggtagacccgg

SEQ ID NO: 234062 - DNA, 25 bp, SARS Virus
tagttctcccatcggtagacccggt

SEQ ID NO: 234063 - DNA, 25 bp, SARS Virus
agttctcccatgcgtagacccggtg

SEQ ID NO: 234064 - DNA, 25 bp, SARS Virus
gttctcccatggctagacccggtgt

SEQ ID NO: 234065 - DNA, 25 bp, SARS Virus
ttctcccatgggcagacccggtgtc

SEQ ID NO: 234066 - DNA, 25 bp, SARS Virus
tctcccatgggtcgacccggtgtct

SEQ ID NO: 234067 - DNA, 25 bp, SARS Virus
ctcccatgggtacacccggtgtctt

SEQ ID NO: 234068 - DNA, 25 bp, SARS Virus
tcccatgggtagccccggtgtcttt

SEQ ID NO: 234069 - DNA, 25 bp, SARS Virus
cccatgggtagacccggtgtcttta

SEQ ID NO: 234070 - DNA, 25 bp, SARS Virus
ccatgggtagacccggtgtctttaa

SEQ ID NO: 234071 - DNA, 25 bp, SARS Virus
catgggtagacccggtgtctttaac

SEQ ID NO: 234072 - DNA, 25 bp, SARS Virus
atgggtagaccccgtgtctttaaca

SEQ ID NO: 234073 - DNA, 25 bp, SARS Virus
tgggtagacccgctgtctttaacaa

SEQ ID NO: 234074 - DNA, 25 bp, SARS Virus
gggtagacccggcgtctttaacaac

SEQ ID NO: 234075 - DNA, 25 bp, SARS Virus
ggtagacccggtctctttaacaaca

SEQ ID NO: 234076 - DNA, 25 bp, SARS Virus
gtagacccggtgcctttaacaacag

SEQ ID NO: 234077 - DNA, 25 bp, SARS Virus
tagacccggtgtctttaacaacagc

SEQ ID NO: 234078 - DNA, 25 bp, SARS Virus
agacccggtgtccttaacaacagct

SEQ ID NO: 234079 - DNA, 25 bp, SARS Virus
gacccggtgtctctaacaacagctg

SEQ ID NO: 234080 - DNA, 25 bp, SARS Virus
acccggtgtcttcaacaacagctgt

SEQ ID NO: 234081 - DNA, 25 bp, SARS Virus
cccggtgtctttcacaacagctgta

SEQ ID NO: 234082 - DNA, 25 bp, SARS Virus
ccggtgtctttaccaacagctgtat

SEQ ID NO: 234083 - DNA, 25 bp, SARS Virus
cggtgtctttaacaacagctgtatc

SEQ ID NO: 234084 - DNA, 25 bp, SARS Virus
ggtgtctttaaccacagctgtatcg

SEQ ID NO: 234085 - DNA, 25 bp, SARS Virus
gtgtctttaacaccagctgtatcgc

SEQ ID NO: 234086 - DNA, 25 bp, SARS Virus
tgtctttaacaacagctgtatcgct

SEQ ID NO: 234087 - DNA, 25 bp, SARS Virus
gtctttaacaaccgctgtatcgctc

SEQ ID NO: 234088 - DNA, 25 bp, SARS Virus
tctttaacaacacctgtatcgctca

SEQ ID NO: 234089 - DNA, 25 bp, SARS Virus
ctttaacaacagctgtatcgctcac

SEQ ID NO: 234090 - DNA, 25 bp, SARS Virus
tttaacaacagccgtatcgctcact

SEQ ID NO: 234091 - DNA, 25 bp, SARS Virus
ttaacaacagctctatcgctcactg

SEQ ID NO: 234092 - DNA, 25 bp, SARS Virus
taacaacagctgcatcgctcactga

SEQ ID NO: 234093 - DNA, 25 bp, SARS Virus
aacaacagctgtctcgctcactgac

SEQ ID NO: 234094 - DNA, 25 bp, SARS Virus
acaacagctgtaccgctcactgacg

SEQ ID NO: 234095 - DNA, 25 bp, SARS Virus
caacagctgtatcgctcactgacgt

SEQ ID NO: 234096 - DNA, 25 bp, SARS Virus
aacagctgtatccctcactgacgtg

SEQ ID NO: 234097 - DNA, 25 bp, SARS Virus
acagctgtatcgctcactgacgtgg

SEQ ID NO: 234098 - DNA, 25 bp, SARS Virus
cagctgtatcgcccactgacgtgga

SEQ ID NO: 234099 - DNA, 25 bp, SARS Virus
agctgtatcgctcactgacgtggag

SEQ ID NO: 234100 - DNA, 25 bp, SARS Virus
gctgtatcgctccctgacgtggagg

SEQ ID NO: 234101 - DNA, 25 bp, SARS Virus
ctgtatcgctcactgacgtggaggt

SEQ ID NO: 234102 - DNA, 25 bp, SARS Virus
tgtatcgctcaccgacgtggaggta

SEQ ID NO: 234103 - DNA, 25 bp, SARS Virus
gtatcgctcactcacgtggaggtaa

SEQ ID NO: 234104 - DNA, 25 bp, SARS Virus
tatcgctcactgccgtggaggtaac

SEQ ID NO: 234105 - DNA, 25 bp, SARS Virus
atcgctcactgacgtggaggtaact

SEQ ID NO: 234106 - DNA, 25 bp, SARS Virus
tcgctcactgacctggaggtaactc

SEQ ID NO: 234107 - DNA, 25 bp, SARS Virus
cgctcactgacgcggaggtaactcg

SEQ ID NO: 234108 - DNA, 25 bp, SARS Virus
gctcactgacgtcgaggtaactcga

SEQ ID NO: 234109 - DNA, 25 bp, SARS Virus
ctcactgacgtgcaggtaactcgag

SEQ ID NO: 234110 - DNA, 25 bp, SARS Virus
tcactgacgtggcggtaactcgagt

SEQ ID NO: 234111 - DNA, 25 bp, SARS Virus
cactgacgtggacgtaactcgagtg

SEQ ID NO: 234112 - DNA, 25 bp, SARS Virus
actgacgtggagctaactcgagtgc

SEQ ID NO: 234113 - DNA, 25 bp, SARS Virus
ctgacgtggaggcaactcgagtgct

SEQ ID NO: 234114 - DNA, 25 bp, SARS Virus
tgacgtggaggtcactcgagtgctc

SEQ ID NO: 234115 - DNA, 25 bp, SARS Virus
gacgtggaggtacctcgagtgctca

SEQ ID NO: 234116 - DNA, 25 bp, SARS Virus
acgtggaggtaactcgagtgctcac

SEQ ID NO: 234117 - DNA, 25 bp, SARS Virus
cgtggaggtaacccgagtgctcact

SEQ ID NO: 234118 - DNA, 25 bp, SARS Virus
gtggaggtaactcgagtgctcactc

SEQ ID NO: 234119 - DNA, 25 bp, SARS Virus
tggaggtaactccagtgctcactca

SEQ ID NO: 234120 - DNA, 25 bp, SARS Virus
ggaggtaactcgcgtgctcactcaa

SEQ ID NO: 234121 - DNA, 25 bp, SARS Virus
gaggtaactcgactgctcactcaag

SEQ ID NO: 234122 - DNA, 25 bp, SARS Virus
aggtaactcgagcgctcactcaagt

SEQ ID NO: 234123 - DNA, 25 bp, SARS Virus
ggtaactcgagtcctcactcaagtg

SEQ ID NO: 234124 - DNA, 25 bp, SARS Virus
gtaactcgagtgctcactcaagtgc

SEQ ID NO: 234125 - DNA, 25 bp, SARS Virus
taactcgagtgcccactcaagtgcc

SEQ ID NO: 234126 - DNA, 25 bp, SARS Virus
aactcgagtgctcactcaagtgcct

SEQ ID NO: 234127 - DNA, 25 bp, SARS Virus
actcgagtgctccctcaagtgcctc

SEQ ID NO: 234128 - DNA, 25 bp, SARS Virus
ctcgagtgctcactcaagtgcctca

SEQ ID NO: 234129 - DNA, 25 bp, SARS Virus
tcgagtgctcacccaagtgcctcac

SEQ ID NO: 234130 - DNA, 25 bp, SARS Virus
cgagtgctcactcaagtgcctcacg

SEQ ID NO: 234131 - DNA, 25 bp, SARS Virus
gagtgctcactccagtgcctcacgt

SEQ ID NO: 234132 - DNA, 25 bp, SARS Virus
agtgctcactcacgtgcctcacgtg

SEQ ID NO: 234133 - DNA, 25 bp, SARS Virus
gtgctcactcaactgcctcacgtgg

SEQ ID NO: 234134 - DNA, 25 bp, SARS Virus
tgctcactcaagcgcctcacgtggt

SEQ ID NO: 234135 - DNA, 25 bp, SARS Virus
gctcactcaagtccctcacgtggtg

SEQ ID NO: 234136 - DNA, 25 bp, SARS Virus
ctcactcaagtgcctcacgtggtga

SEQ ID NO: 234137 - DNA, 25 bp, SARS Virus
tcactcaagtgcctcacgtggtgac

SEQ ID NO: 234138 - DNA, 25 bp, SARS Virus
cactcaagtgccccacgtggtgacg

SEQ ID NO: 234139 - DNA, 25 bp, SARS Virus
actcaagtgcctcacgtggtgacgg

SEQ ID NO: 234140 - DNA, 25 bp, SARS Virus
ctcaagtgcctcccgtggtgacggt

SEQ ID NO: 234141 - DNA, 25 bp, SARS Virus
tcaagtgcctcacgtggtgacggta

SEQ ID NO: 234142 - DNA, 25 bp, SARS Virus
caagtgcctcacctggtgacggtac

SEQ ID NO: 234143 - DNA, 25 bp, SARS Virus
aagtgcctcacgcggtgacggtacg

SEQ ID NO: 234144 - DNA, 25 bp, SARS Virus
agtgcctcacgtcgtgacggtacga

SEQ ID NO: 234145 - DNA, 25 bp, SARS Virus
gtgcctcacgtgctgacggtacgaa

SEQ ID NO: 234146 - DNA, 25 bp, SARS Virus
tgcctcacgtggcgacggtacgaat

SEQ ID NO: 234147 - DNA, 25 bp, SARS Virus
gcctcacgtggtcacggtacgaatc

SEQ ID NO: 234148 - DNA, 25 bp, SARS Virus
cctcacgtggtgccggtacgaatca

SEQ ID NO: 234149 - DNA, 25 bp, SARS Virus
ctcacgtggtgacggtacgaatcac

SEQ ID NO: 234150 - DNA, 25 bp, SARS Virus
tcacgtggtgaccgtacgaatcaca

SEQ ID NO: 234151 - DNA, 25 bp, SARS Virus
cacgtggtgacgctacgaatcacaa

SEQ ID NO: 234152 - DNA, 25 bp, SARS Virus
acgtggtgacggcacgaatcacaag

SEQ ID NO: 234153 - DNA, 25 bp, SARS Virus
cgtggtgacggtccgaatcacaagg

SEQ ID NO: 234154 - DNA, 25 bp, SARS Virus
gtggtgacggtacgaatcacaaggt

SEQ ID NO: 234155 - DNA, 25 bp, SARS Virus
tggtgacggtaccaatcacaaggtc

SEQ ID NO: 234156 - DNA, 25 bp, SARS Virus
ggtgacggtacgcatcacaaggtca

SEQ ID NO: 234157 - DNA, 25 bp, SARS Virus
gtgacggtacgactcacaaggtcaa

SEQ ID NO: 234158 - DNA, 25 bp, SARS Virus
tgacggtacgaaccacaaggtcaaa

SEQ ID NO: 234159 - DNA, 25 bp, SARS Virus
gacggtacgaatcacaaggtcaaaa

SEQ ID NO: 234160 - DNA, 25 bp, SARS Virus
acggtacgaatcccaaggtcaaaac

SEQ ID NO: 234161 - DNA, 25 bp, SARS Virus
cggtacgaatcacaaggtcaaaaca

SEQ ID NO: 234162 - DNA, 25 bp, SARS Virus
ggtacgaatcaccaggtcaaaacaa

SEQ ID NO: 234163 - DNA, 25 bp, SARS Virus
gtacgaatcacacggtcaaaacaag

SEQ ID NO: 234164 - DNA, 25 bp, SARS Virus
tacgaatcacaacgtcaaaacaagt

SEQ ID NO: 234165 - DNA, 25 bp, SARS Virus
acgaatcacaagctcaaaacaagta

SEQ ID NO: 234166 - DNA, 25 bp, SARS Virus
cgaatcacaaggccaaaacaagtat

SEQ ID NO: 234167 - DNA, 25 bp, SARS Virus
gaatcacaaggtcaaaacaagtatt

SEQ ID NO: 234168 - DNA, 25 bp, SARS Virus
aatcacaaggtccaaacaagtatta

SEQ ID NO: 234169 - DNA, 25 bp, SARS Virus
atcacaaggtcacaacaagtattag

SEQ ID NO: 234170 - DNA, 25 bp, SARS Virus
tcacaaggtcaacacaagtattaga

SEQ ID NO: 234171 - DNA, 25 bp, SARS Virus
cacaaggtcaaaccaagtattagaa

SEQ ID NO: 234172 - DNA, 25 bp, SARS Virus
acaaggtcaaaacaagtattagaag

SEQ ID NO: 234173 - DNA, 25 bp, SARS Virus
caaggtcaaaaccagtattagaagt

SEQ ID NO: 234174 - DNA, 25 bp, SARS Virus
aaggtcaaaacacgtattagaagtt

SEQ ID NO: 234175 - DNA, 25 bp, SARS Virus
aggtcaaaacaactattagaagtta

SEQ ID NO: 234176 - DNA, 25 bp, SARS Virus
ggtcaaaacaagcattagaagttac

SEQ ID NO: 234177 - DNA, 25 bp, SARS Virus
gtcaaaacaagtcttagaagttacc

SEQ ID NO: 234178 - DNA, 25 bp, SARS Virus
tcaaaacaagtactagaagttaccc

SEQ ID NO: 234179 - DNA, 25 bp, SARS Virus
caaaacaagtatcagaagttaccct

SEQ ID NO: 234180 - DNA, 25 bp, SARS Virus
aaaacaagtattcgaagttacccta

SEQ ID NO: 234181 - DNA, 25 bp, SARS Virus
aaacaagtattacaagttaccctag

SEQ ID NO: 234182 - DNA, 25 bp, SARS Virus
aacaagtattagcagttaccctagt

SEQ ID NO: 234183 - DNA, 25 bp, SARS Virus
acaagtattagacgttaccctagtc

SEQ ID NO: 234184 - DNA, 25 bp, SARS Virus
caagtattagaacttaccctagtca

SEQ ID NO: 234185 - DNA, 25 bp, SARS Virus
aagtattagaagctaccctagtcac

SEQ ID NO: 234186 - DNA, 25 bp, SARS Virus
agtattagaagtcaccctagtcacg

SEQ ID NO: 234187 - DNA, 25 bp, SARS Virus
gtattagaagttcccctagtcacgg

SEQ ID NO: 234188 - DNA, 25 bp, SARS Virus
tattagaagttaccctagtcacggt

SEQ ID NO: 234189 - DNA, 25 bp, SARS Virus
attagaagttaccctagtcacggtt

SEQ ID NO: 234190 - DNA, 25 bp, SARS Virus
ttagaagttaccctagtcacggttc

SEQ ID NO: 234191 - DNA, 25 bp, SARS Virus
tagaagttaccccagtcacggttcg

SEQ ID NO: 234192 - DNA, 25 bp, SARS Virus
agaagttaccctcgtcacggttcga

SEQ ID NO: 234193 - DNA, 25 bp, SARS Virus
gaagttaccctactcacggttcgag

SEQ ID NO: 234194 - DNA, 25 bp, SARS Virus
aagttaccctagccacggttcgagc

SEQ ID NO: 234195 - DNA, 25 bp, SARS Virus
agttaccctagtcacggttcgagca

SEQ ID NO: 234196 - DNA, 25 bp, SARS Virus
gttaccctagtcccggttcgagcag

SEQ ID NO: 234197 - DNA, 25 bp, SARS Virus
ttaccctagtcacggttcgagcagt

SEQ ID NO: 234198 - DNA, 25 bp, SARS Virus
taccctagtcaccgttcgagcagtg

SEQ ID NO: 234199 - DNA, 25 bp, SARS Virus
accctagtcacgcttcgagcagtgg

SEQ ID NO: 234200 - DNA, 25 bp, SARS Virus
ccctagtcacggctcgagcagtgga

SEQ ID NO: 234201 - DNA, 25 bp, SARS Virus
cctagtcacggtccgagcagtggat

SEQ ID NO: 234202 - DNA, 25 bp, SARS Virus
ctagtcacggttcgagcagtggatt

SEQ ID NO: 234203 - DNA, 25 bp, SARS Virus
tagtcacggttccagcagtggattc

SEQ ID NO: 234204 - DNA, 25 bp, SARS Virus
agtcacggttcgcgcagtggattca

SEQ ID NO: 234205 - DNA, 25 bp, SARS Virus
gtcacggttcgaccagtggattcag

SEQ ID NO: 234206 - DNA, 25 bp, SARS Virus
tcacggttcgagcagtggattcagt

SEQ ID NO: 234207 - DNA, 25 bp, SARS Virus
cacggttcgagccgtggattcagta

SEQ ID NO: 234208 - DNA, 25 bp, SARS Virus
acggttcgagcactggattcagtat

SEQ ID NO: 234209 - DNA, 25 bp, SARS Virus
cggttcgagcagcggattcagtatt

SEQ ID NO: 234210 - DNA, 25 bp, SARS Virus
ggttcgagcagtcgattcagtattc

SEQ ID NO: 234211 - DNA, 25 bp, SARS Virus
gttcgagcagtgcattcagtattct

SEQ ID NO: 234212 - DNA, 25 bp, SARS Virus
ttcgagcagtggcttcagtattctg

SEQ ID NO: 234213 - DNA, 25 bp, SARS Virus
tcgagcagtggactcagtattctga

SEQ ID NO: 234214 - DNA, 25 bp, SARS Virus
cgagcagtggatccagtattctgaa

SEQ ID NO: 234215 - DNA, 25 bp, SARS Virus
gagcagtggattcagtattctgaaa

SEQ ID NO: 234216 - DNA, 25 bp, SARS Virus
agcagtggattccgtattctgaaat

SEQ ID NO: 234217 - DNA, 25 bp, SARS Virus
gcagtggattcactattctgaaatc

SEQ ID NO: 234218 - DNA, 25 bp, SARS Virus
cagtggattcagcattctgaaatct

SEQ ID NO: 234219 - DNA, 25 bp, SARS Virus
agtggattcagtcttctgaaatcta

SEQ ID NO: 234220 - DNA, 25 bp, SARS Virus
gtggattcagtactctgaaatctag

SEQ ID NO: 234221 - DNA, 25 bp, SARS Virus
tggattcagtatcctgaaatctagc

SEQ ID NO: 234222 - DNA, 25 bp, SARS Virus
ggattcagtattctgaaatctagct

SEQ ID NO: 234223 - DNA, 25 bp, SARS Virus
gattcagtattccgaaatctagcta

SEQ ID NO: 234224 - DNA, 25 bp, SARS Virus
attcagtattctcaaatctagctac

SEQ ID NO: 234225 - DNA, 25 bp, SARS Virus
ttcagtattctgcaatctagctacg

SEQ ID NO: 234226 - DNA, 25 bp, SARS Virus
tcagtattctgacatctagctacgg

SEQ ID NO: 234227 - DNA, 25 bp, SARS Virus
cagtattctgaactctagctacggt

SEQ ID NO: 234228 - DNA, 25 bp, SARS Virus
agtattctgaaacctagctacggta

SEQ ID NO: 234229 - DNA, 25 bp, SARS Virus
gtattctgaaatctagctacggtat

SEQ ID NO: 234230 - DNA, 25 bp, SARS Virus
tattctgaaatccagctacggtatc

SEQ ID NO: 234231 - DNA, 25 bp, SARS Virus
attctgaaatctcgctacggtatcg

SEQ ID NO: 234232 - DNA, 25 bp, SARS Virus
ttctgaaatctacctacggtatcga

SEQ ID NO: 234233 - DNA, 25 bp, SARS Virus
tctgaaatctagctacggtatcgat

SEQ ID NO: 234234 - DNA, 25 bp, SARS Virus
ctgaaatctagccacggtatcgata

SEQ ID NO: 234235 - DNA, 25 bp, SARS Virus
tgaaatctagctccggtatcgatac

SEQ ID NO: 234236 - DNA, 25 bp, SARS Virus
gaaatctagctacggtatcgatact

SEQ ID NO: 234237 - DNA, 25 bp, SARS Virus
aaatctagctaccgtatcgatactg

SEQ ID NO: 234238 - DNA, 25 bp, SARS Virus
aatctagctacgctatcgatactgg

SEQ ID NO: 234239 - DNA, 25 bp, SARS Virus
atctagctacggcatcgatactggt

SEQ ID NO: 234240 - DNA, 25 bp, SARS Virus
tctagctacggtctcgatactggtg

SEQ ID NO: 234241 - DNA, 25 bp, SARS Virus
ctagctacggtaccgatactggtgg

SEQ ID NO: 234242 - DNA, 25 bp, SARS Virus
tagctacggtatcgatactggtggc

SEQ ID NO: 234243 - DNA, 25 bp, SARS Virus
agctacggtatccatactggtggcc

SEQ ID NO: 234244 - DNA, 25 bp, SARS Virus
gctacggtatcgctactggtggccg

SEQ ID NO: 234245 - DNA, 25 bp, SARS Virus
ctacggtatcgacactggtggccga

SEQ ID NO: 234246 - DNA, 25 bp, SARS Virus
tacggtatcgatcctggtggccgag

SEQ ID NO: 234247 - DNA, 25 bp, SARS Virus
acggtatcgatactggtggccgagg

SEQ ID NO: 234248 - DNA, 25 bp, SARS Virus
cggtatcgataccggtggccgaggg

SEQ ID NO: 234249 - DNA, 25 bp, SARS Virus
ggtatcgatactcgtggccgaggga

SEQ ID NO: 234250 - DNA, 25 bp, SARS Virus
gtatcgatactgctggccgagggaa

SEQ ID NO: 234251 - DNA, 25 bp, SARS Virus
tatcgatactggcggccgagggaat

SEQ ID NO: 234252 - DNA, 25 bp, SARS Virus
atcgatactggtcgccgagggaata

SEQ ID NO: 234253 - DNA, 25 bp, SARS Virus
tcgatactggtgcccgagggaataa

SEQ ID NO: 234254 - DNA, 25 bp, SARS Virus
cgatactggtggccgagggaataat

SEQ ID NO: 234255 - DNA, 25 bp, SARS Virus
gatactggtggccgagggaataatg

SEQ ID NO: 234256 - DNA, 25 bp, SARS Virus
atactggtggcccagggaataatgg

SEQ ID NO: 234257 - DNA, 25 bp, SARS Virus
tactggtggccgcgggaataatggc

SEQ ID NO: 234258 - DNA, 25 bp, SARS Virus
actggtggccgacggaataatggca

SEQ ID NO: 234259 - DNA, 25 bp, SARS Virus
ctggtggccgagcgaataatggcaa

SEQ ID NO: 234260 - DNA, 25 bp, SARS Virus
tggtggccgaggcaataatggcaag

SEQ ID NO: 234261 - DNA, 25 bp, SARS Virus
ggtggccgagggcataatggcaaga

SEQ ID NO: 234262 - DNA, 25 bp, SARS Virus
gtggccgagggactaatggcaagaa

SEQ ID NO: 234263 - DNA, 25 bp, SARS Virus
tggccgagggaacaatggcaagaat

SEQ ID NO: 234264 - DNA, 25 bp, SARS Virus
ggccgagggaatcatggcaagaatg

SEQ ID NO: 234265 - DNA, 25 bp, SARS Virus
gccgagggaatactggcaagaatgc

SEQ ID NO: 234266 - DNA, 25 bp, SARS Virus
ccgagggaataacggcaagaatgct

SEQ ID NO: 234267 - DNA, 25 bp, SARS Virus
cgagggaataatcgcaagaatgctt

SEQ ID NO: 234268 - DNA, 25 bp, SARS Virus
gagggaataatgccaagaatgcttc

SEQ ID NO: 234269 - DNA, 25 bp, SARS Virus
agggaataatggcaagaatgcttct

SEQ ID NO: 234270 - DNA, 25 bp, SARS Virus
gggaataatggccagaatgcttctt

SEQ ID NO: 234271 - DNA, 25 bp, SARS Virus
ggaataatggcacgaatgcttcttc

SEQ ID NO: 234272 - DNA, 25 bp, SARS Virus
gaataatggcaacaatgcttcttct

SEQ ID NO: 234273 - DNA, 25 bp, SARS Virus
aaaagaaaagttgtgcaccaactta

SEQ ID NO: 234274 - DNA, 25 bp, SARS Virus
aaagaaaagttgggcaccaacttac

SEQ ID NO: 234275 - DNA, 25 bp, SARS Virus
aagaaaagttgtgcaccaacttact

SEQ ID NO: 234276 - DNA, 25 bp, SARS Virus
agaaaagttgtggaccaacttactg

SEQ ID NO: 234277 - DNA, 25 bp, SARS Virus
gaaaagttgtgcgccaacttactga

SEQ ID NO: 234278 - DNA, 25 bp, SARS Virus
aaaagttgtgcagcaacttactgaa

SEQ ID NO: 234279 - DNA, 25 bp, SARS Virus
aaagttgtgcacgaacttactgaaa

SEQ ID NO: 234280 - DNA, 25 bp, SARS Virus
aagttgtgcaccgacttactgaaac

SEQ ID NO: 234281 - DNA, 25 bp, SARS Virus
agttgtgcaccagcttactgaaact

SEQ ID NO: 234282 - DNA, 25 bp, SARS Virus
gttgtgcaccaagttactgaaactg

SEQ ID NO: 234283 - DNA, 25 bp, SARS Virus
ttgtgcaccaacgtactgaaactga

SEQ ID NO: 234284 - DNA, 25 bp, SARS Virus
tgtgcaccaactgactgaaactgaa

SEQ ID NO: 234285 - DNA, 25 bp, SARS Virus
gtgcaccaacttgctgaaactgaaa

SEQ ID NO: 234286 - DNA, 25 bp, SARS Virus
tgcaccaacttagtgaaactgaaaa

SEQ ID NO: 234287 - DNA, 25 bp, SARS Virus
gcaccaacttacggaaactgaaaac

SEQ ID NO: 234288 - DNA, 25 bp, SARS Virus
caccaacttactgaaactgaaaact

SEQ ID NO: 234289 - DNA, 25 bp, SARS Virus
accaacttactggaactgaaaactc

SEQ ID NO: 234290 - DNA, 25 bp, SARS Virus
ccaacttactgagactgaaaactca

SEQ ID NO: 234291 - DNA, 25 bp, SARS Virus
caacttactgaagctgaaaactcaa

SEQ ID NO: 234292 - DNA, 25 bp, SARS Virus
aacttactgaaagtgaaaactcaat

SEQ ID NO: 234293 - DNA, 25 bp, SARS Virus
acttactgaaacggaaaactcaatt

SEQ ID NO: 234294 - DNA, 25 bp, SARS Virus
cttactgaaactgaaaactcaattc

SEQ ID NO: 234295 - DNA, 25 bp, SARS Virus
ttactgaaactggaaactcaattct

SEQ ID NO: 234296 - DNA, 25 bp, SARS Virus
tactgaaactgagaactcaattctc

SEQ ID NO: 234297 - DNA, 25 bp, SARS Virus
actgaaactgaagactcaattctcc

SEQ ID NO: 234298 - DNA, 25 bp, SARS Virus
ctgaaactgaaagctcaattctcct

SEQ ID NO: 234299 - DNA, 25 bp, SARS Virus
tgaaactgaaaagtcaattctcctt

SEQ ID NO: 234300 - DNA, 25 bp, SARS Virus
gaaactgaaaacgcaattctccttt

SEQ ID NO: 234301 - DNA, 25 bp, SARS Virus
aaactgaaaactgaattctcctttg

SEQ ID NO: 234302 - DNA, 25 bp, SARS Virus
aactgaaaactcgattctcctttgt

SEQ ID NO: 234303 - DNA, 25 bp, SARS Virus
actgaaaactcagttctcctttgtg

SEQ ID NO: 234304 - DNA, 25 bp, SARS Virus
ctgaaaactcaagtctcctttgtgt

SEQ ID NO: 234305 - DNA, 25 bp, SARS Virus
tgaaaactcaatgctcctttgtgtt

SEQ ID NO: 234306 - DNA, 25 bp, SARS Virus
gaaaactcaattgtcctttgtgttt

SEQ ID NO: 234307 - DNA, 25 bp, SARS Virus
aaaactcaattcgcctttgtgtttg

SEQ ID NO: 234308 - DNA, 25 bp, SARS Virus
aaactcaattctgctttgtgtttga

SEQ ID NO: 234309 - DNA, 25 bp, SARS Virus
aactcaattctcgtttgtgtttgaa

SEQ ID NO: 234310 - DNA, 25 bp, SARS Virus
actcaattctccgttgtgtttgaaa

SEQ ID NO: 234311 - DNA, 25 bp, SARS Virus
ctcaattctcctgtgtgtttgaaac

SEQ ID NO: 234312 - DNA, 25 bp, SARS Virus
tcaattctccttggtgtttgaaacc

SEQ ID NO: 234313 - DNA, 25 bp, SARS Virus
caattctcctttgtgtttgaaaccc

SEQ ID NO: 234314 - DNA, 25 bp, SARS Virus
aattctcctttgggtttgaaacccg

SEQ ID NO: 234315 - DNA, 25 bp, SARS Virus
attctcctttgtgtttgaaacccgt

SEQ ID NO: 234316 - DNA, 25 bp, SARS Virus
ttctcctttgtggttgaaacccgta

SEQ ID NO: 234317 - DNA, 25 bp, SARS Virus
tctcctttgtgtgtgaaacccgtaa

SEQ ID NO: 234318 - DNA, 25 bp, SARS Virus
ctcctttgtgttggaaacccgtaag

SEQ ID NO: 234319 - DNA, 25 bp, SARS Virus
tcctttgtgtttgaaacccgtaagg

SEQ ID NO: 234320 - DNA, 25 bp, SARS Virus
cctttgtgtttggaacccgtaaggg

SEQ ID NO: 234321 - DNA, 25 bp, SARS Virus
ctttgtgtttgagacccgtaagggg

SEQ ID NO: 234322 - DNA, 25 bp, SARS Virus
tttgtgtttgaagcccgtaagggga

SEQ ID NO: 234323 - DNA, 25 bp, SARS Virus
ttgtgtttgaaagccgtaaggggaa

SEQ ID NO: 234324 - DNA, 25 bp, SARS Virus
tgtgtttgaaacgcgtaaggggaaa

SEQ ID NO: 234325 - DNA, 25 bp, SARS Virus
gtgtttgaaaccggtaaggggaaac

SEQ ID NO: 234326 - DNA, 25 bp, SARS Virus
tgtttgaaacccgtaaggggaaact

SEQ ID NO: 234327 - DNA, 25 bp, SARS Virus
gtttgaaacccggaaggggaaactt

SEQ ID NO: 234328 - DNA, 25 bp, SARS Virus
tttgaaacccgtgaggggaaacttt

SEQ ID NO: 234329 - DNA, 25 bp, SARS Virus
ttgaaacccgtagggggaaactttc

SEQ ID NO: 234330 - DNA, 25 bp, SARS Virus
tgaaacccgtaaggggaaactttca

SEQ ID NO: 234331 - DNA, 25 bp, SARS Virus
gaaacccgtaaggggaaactttcac

SEQ ID NO: 234332 - DNA, 25 bp, SARS Virus
aaacccgtaaggggaaactttcaca

SEQ ID NO: 234333 - DNA, 25 bp, SARS Virus
aacccgtaaggggaaactttcacag

SEQ ID NO: 234334 - DNA, 25 bp, SARS Virus
acccgtaagggggaactttcacagt

SEQ ID NO: 234335 - DNA, 25 bp, SARS Virus
cccgtaaggggagactttcacagtt

SEQ ID NO: 234336 - DNA, 25 bp, SARS Virus
ccgtaaggggaagctttcacagttt

SEQ ID NO: 234337 - DNA, 25 bp, SARS Virus
cgtaaggggaaagtttcacagttta

SEQ ID NO: 234338 - DNA, 25 bp, SARS Virus
gtaaggggaaacgttcacagtttaa

SEQ ID NO: 234339 - DNA, 25 bp, SARS Virus
taaggggaaactgtcacagtttaaa

SEQ ID NO: 234340 - DNA, 25 bp, SARS Virus
aaggggaaacttgcacagtttaaag

SEQ ID NO: 234341 - DNA, 25 bp, SARS Virus
aggggaaactttgacagtttaaaga

SEQ ID NO: 234342 - DNA, 25 bp, SARS Virus
ggggaaactttcgcagtttaaagaa

SEQ ID NO: 234343 - DNA, 25 bp, SARS Virus
gggaaactttcagagtttaaagaac

SEQ ID NO: 234344 - DNA, 25 bp, SARS Virus
ggaaactttcacggtttaaagaacc

SEQ ID NO: 234345 - DNA, 25 bp, SARS Virus
gaaactttcacagtttaaagaaccg

SEQ ID NO: 234346 - DNA, 25 bp, SARS Virus
aaactttcacaggttaaagaaccgt

SEQ ID NO: 234347 - DNA, 25 bp, SARS Virus
aactttcacagtgtaaagaaccgtg

SEQ ID NO: 234348 - DNA, 25 bp, SARS Virus
actttcacagttgaaagaaccgtga

SEQ ID NO: 234349 - DNA, 25 bp, SARS Virus
ctttcacagtttgaagaaccgtgag

SEQ ID NO: 234350 - DNA, 25 bp, SARS Virus
tttcacagtttagagaaccgtgaga

SEQ ID NO: 234351 - DNA, 25 bp, SARS Virus
ttcacagtttaaggaaccgtgagaa

SEQ ID NO: 234352 - DNA, 25 bp, SARS Virus
tcacagtttaaagaaccgtgagaat

SEQ ID NO: 234353 - DNA, 25 bp, SARS Virus
cacagtttaaaggaccgtgagaatt

SEQ ID NO: 234354 - DNA, 25 bp, SARS Virus
acagtttaaagagccgtgagaatta

SEQ ID NO: 234355 - DNA, 25 bp, SARS Virus
cagtttaaagaagcgtgagaattaa

SEQ ID NO: 234356 - DNA, 25 bp, SARS Virus
agtttaaagaacggtgagaattaaa

SEQ ID NO: 234357 - DNA, 25 bp, SARS Virus
gtttaaagaaccgtgagaattaaag

SEQ ID NO: 234358 - DNA, 25 bp, SARS Virus
tttaaagaaccgggagaattaaagc

SEQ ID NO: 234359 - DNA, 25 bp, SARS Virus
ttaaagaaccgtgagaattaaagct

SEQ ID NO: 234360 - DNA, 25 bp, SARS Virus
taaagaaccgtgggaattaaagctt

SEQ ID NO: 234361 - DNA, 25 bp, SARS Virus
aaagaaccgtgagaattaaagcttc

SEQ ID NO: 234362 - DNA, 25 bp, SARS Virus
aagaaccgtgaggattaaagcttcc

SEQ ID NO: 234363 - DNA, 25 bp, SARS Virus
agaaccgtgagagttaaagcttccc

SEQ ID NO: 234364 - DNA, 25 bp, SARS Virus
gaaccgtgagaagtaaagcttccca

SEQ ID NO: 234365 - DNA, 25 bp, SARS Virus
aaccgtgagaatgaaagcttcccac

SEQ ID NO: 234366 - DNA, 25 bp, SARS Virus
accgtgagaattgaagcttcccaca

SEQ ID NO: 234367 - DNA, 25 bp, SARS Virus
ccgtgagaattagagcttcccacag

SEQ ID NO: 234368 - DNA, 25 bp, SARS Virus
cgtgagaattaaggcttcccacaga

SEQ ID NO: 234369 - DNA, 25 bp, SARS Virus
gtgagaattaaagcttcccacagac

SEQ ID NO: 234370 - DNA, 25 bp, SARS Virus
tgagaattaaaggttcccacagacc

SEQ ID NO: 234371 - DNA, 25 bp, SARS Virus
gagaattaaagcgtcccacagacca

SEQ ID NO: 234372 - DNA, 25 bp, SARS Virus
agaattaaagctgcccacagaccac

SEQ ID NO: 234373 - DNA, 25 bp, SARS Virus
gaattaaagcttgccacagaccacg

SEQ ID NO: 234374 - DNA, 25 bp, SARS Virus
aattaaagcttcgcacagaccacga

SEQ ID NO: 234375 - DNA, 25 bp, SARS Virus
attaaagcttccgacagaccacgag

SEQ ID NO: 234376 - DNA, 25 bp, SARS Virus
ttaaagcttcccgcagaccacgagc

SEQ ID NO: 234377 - DNA, 25 bp, SARS Virus
taaagcttcccagagaccacgagca

SEQ ID NO: 234378 - DNA, 25 bp, SARS Virus
aaagcttcccacggaccacgagcat

SEQ ID NO: 234379 - DNA, 25 bp, SARS Virus
aagcttcccacagaccacgagcatc

SEQ ID NO: 234380 - DNA, 25 bp, SARS Virus
agcttcccacaggccacgagcatcg

SEQ ID NO: 234381 - DNA, 25 bp, SARS Virus
gcttcccacagagcacgagcatcga

SEQ ID NO: 234382 - DNA, 25 bp, SARS Virus
cttcccacagacgacgagcatcgag

SEQ ID NO: 234383 - DNA, 25 bp, SARS Virus
ttcccacagaccgcgagcatcgaga

SEQ ID NO: 234384 - DNA, 25 bp, SARS Virus
tcccacagaccaggagcatcgagaa

SEQ ID NO: 234385 - DNA, 25 bp, SARS Virus
cccacagaccacgagcatcgagaat

SEQ ID NO: 234386 - DNA, 25 bp, SARS Virus
ccacagaccacgggcatcgagaata

SEQ ID NO: 234387 - DNA, 25 bp, SARS Virus
cacagaccacgagcatcgagaatag

SEQ ID NO: 234388 - DNA, 25 bp, SARS Virus
acagaccacgaggatcgagaatagt

SEQ ID NO: 234389 - DNA, 25 bp, SARS Virus
cagaccacgagcgtcgagaatagtc

SEQ ID NO: 234390 - DNA, 25 bp, SARS Virus
agaccacgagcagcgagaatagtct

SEQ ID NO: 234391 - DNA, 25 bp, SARS Virus
gaccacgagcatggagaatagtctc

SEQ ID NO: 234392 - DNA, 25 bp, SARS Virus
accacgagcatcgagaatagtctcg

SEQ ID NO: 234393 - DNA, 25 bp, SARS Virus
ccacgagcatcgggaatagtctcgc

SEQ ID NO: 234394 - DNA, 25 bp, SARS Virus
cacgagcatcgagaatagtctcgcg

SEQ ID NO: 234395 - DNA, 25 bp, SARS Virus
acgagcatcgaggatagtctcgcga

SEQ ID NO: 234396 - DNA, 25 bp, SARS Virus
cgagcatcgagagtagtctcgcgag

SEQ ID NO: 234397 - DNA, 25 bp, SARS Virus
gagcatcgagaagagtctcgcgagt

SEQ ID NO: 234398 - DNA, 25 bp, SARS Virus
agcatcgagaatggtctcgcgagtc

SEQ ID NO: 234399 - DNA, 25 bp, SARS Virus
gcatcgagaatagtctcgcgagtca

SEQ ID NO: 234400 - DNA, 25 bp, SARS Virus
catcgagaataggctcgcgagtcac

SEQ ID NO: 234401 - DNA, 25 bp, SARS Virus
atcgagaatagtgtcgcgagtcact

SEQ ID NO: 234402 - DNA, 25 bp, SARS Virus
tcgagaatagtcgcgcgagtcactt

SEQ ID NO: 234403 - DNA, 25 bp, SARS Virus
cgagaatagtctggcgagtcacttg

SEQ ID NO: 234404 - DNA, 25 bp, SARS Virus
gagaatagtctcgcgagtcacttgg

SEQ ID NO: 234405 - DNA, 25 bp, SARS Virus
agaatagtctcgggagtcacttggt

SEQ ID NO: 234406 - DNA, 25 bp, SARS Virus
gaatagtctcgcgagtcacttggtc

SEQ ID NO: 234407 - DNA, 25 bp, SARS Virus
aatagtctcgcgggtcacttggtcc

SEQ ID NO: 234408 - DNA, 25 bp, SARS Virus
atagtctcgcgagtcacttggtccg

SEQ ID NO: 234409 - DNA, 25 bp, SARS Virus
tagtctcgcgaggcacttggtccgt

SEQ ID NO: 234410 - DNA, 25 bp, SARS Virus
agtctcgcgagtgacttggtccgtt

SEQ ID NO: 234411 - DNA, 25 bp, SARS Virus
gtctcgcgagtcgcttggtccgtta

SEQ ID NO: 234412 - DNA, 25 bp, SARS Virus
tctcgcgagtcagttggtccgttaa

SEQ ID NO: 234413 - DNA, 25 bp, SARS Virus
ctcgcgagtcacgtggtccgttaaa

SEQ ID NO: 234414 - DNA, 25 bp, SARS Virus
tcgcgagtcactgggtccgttaaag

SEQ ID NO: 234415 - DNA, 25 bp, SARS Virus
cgcgagtcacttggtccgttaaagt

SEQ ID NO: 234416 - DNA, 25 bp, SARS Virus
gcgagtcacttggtccgttaaagta

SEQ ID NO: 234417 - DNA, 25 bp, SARS Virus
cgagtcacttgggccgttaaagtac

SEQ ID NO: 234418 - DNA, 25 bp, SARS Virus
gagtcacttggtgcgttaaagtacg

SEQ ID NO: 234419 - DNA, 25 bp, SARS Virus
agtcacttggtcggttaaagtacga

SEQ ID NO: 234420 - DNA, 25 bp, SARS Virus
gtcacttggtccgttaaagtacgag

SEQ ID NO: 234421 - DNA, 25 bp, SARS Virus
tcacttggtccggtaaagtacgagt

SEQ ID NO: 234422 - DNA, 25 bp, SARS Virus
cacttggtccgtgaaagtacgagta

SEQ ID NO: 234423 - DNA, 25 bp, SARS Virus
acttggtccgttgaagtacgagtac

SEQ ID NO: 234424 - DNA, 25 bp, SARS Virus
cttggtccgttagagtacgagtacc

SEQ ID NO: 234425 - DNA, 25 bp, SARS Virus
ttggtccgttaaggtacgagtacca

SEQ ID NO: 234426 - DNA, 25 bp, SARS Virus
tggtccgttaaagtacgagtaccag

SEQ ID NO: 234427 - DNA, 25 bp, SARS Virus
ggtccgttaaaggacgagtaccagt

SEQ ID NO: 234428 - DNA, 25 bp, SARS Virus
gtccgttaaagtgcgagtaccagtg

SEQ ID NO: 234429 - DNA, 25 bp, SARS Virus
tccgttaaagtaggagtaccagtgc

SEQ ID NO: 234430 - DNA, 25 bp, SARS Virus
ccgttaaagtacgagtaccagtgcc

SEQ ID NO: 234431 - DNA, 25 bp, SARS Virus
cgttaaagtacgggtaccagtgccg

SEQ ID NO: 234432 - DNA, 25 bp, SARS Virus
gttaaagtacgagtaccagtgccgt

SEQ ID NO: 234433 - DNA, 25 bp, SARS Virus
ttaaagtacgaggaccagtgccgtc

SEQ ID NO: 234434 - DNA, 25 bp, SARS Virus
taaagtacgagtgccagtgccgtcg

SEQ ID NO: 234435 - DNA, 25 bp, SARS Virus
aaagtacgagtagcagtgccgtcgt

SEQ ID NO: 234436 - DNA, 25 bp, SARS Virus
aagtacgagtacgagtgccgtcgtc

SEQ ID NO: 234437 - DNA, 25 bp, SARS Virus
agtacgagtaccggtgccgtcgtca

SEQ ID NO: 234438 - DNA, 25 bp, SARS Virus
gtacgagtaccagtgccgtcgtcat

SEQ ID NO: 234439 - DNA, 25 bp, SARS Virus
tacgagtaccagggccgtcgtcatc

SEQ ID NO: 234440 - DNA, 25 bp, SARS Virus
acgagtaccagtgccgtcgtcatct

SEQ ID NO: 234441 - DNA, 25 bp, SARS Virus
cgagtaccagtggcgtcgtcatctg

SEQ ID NO: 234442 - DNA, 25 bp, SARS Virus
gagtaccagtgcggtcgtcatctgt

SEQ ID NO: 234443 - DNA, 25 bp, SARS Virus
agtaccagtgccgtcgtcatctgtg

SEQ ID NO: 234444 - DNA, 25 bp, SARS Virus
gtaccagtgccggcgtcatctgtgg

SEQ ID NO: 234445 - DNA, 25 bp, SARS Virus
taccagtgccgtggtcatctgtgga

SEQ ID NO: 234446 - DNA, 25 bp, SARS Virus
accagtgccgtcgtcatctgtggag

SEQ ID NO: 234447 - DNA, 25 bp, SARS Virus
ccagtgccgtcggcatctgtggaga

SEQ ID NO: 234448 - DNA, 25 bp, SARS Virus
cagtgccgtcgtgatctgtggagag

SEQ ID NO: 234449 - DNA, 25 bp, SARS Virus
agtgccgtcgtcgtctgtggagaga

SEQ ID NO: 234450 - DNA, 25 bp, SARS Virus
gtgccgtcgtcagctgtggagagaa

SEQ ID NO: 234451 - DNA, 25 bp, SARS Virus
tgccgtcgtcatgtgtggagagaag

SEQ ID NO: 234452 - DNA, 25 bp, SARS Virus
gccgtcgtcatcggtggagagaagc

SEQ ID NO: 234453 - DNA, 25 bp, SARS Virus
ccgtcgtcatctgtggagagaagct

SEQ ID NO: 234454 - DNA, 25 bp, SARS Virus
cgtcgtcatctggggagagaagctg

SEQ ID NO: 234455 - DNA, 25 bp, SARS Virus
gtcgtcatctgtggagagaagctga

SEQ ID NO: 234456 - DNA, 25 bp, SARS Virus
tcgtcatctgtggagagaagctgag

SEQ ID NO: 234457 - DNA, 25 bp, SARS Virus
cgtcatctgtggggagaagctgagc

SEQ ID NO: 234458 - DNA, 25 bp, SARS Virus
gtcatctgtggagagaagctgagct

SEQ ID NO: 234459 - DNA, 25 bp, SARS Virus
tcatctgtggagggaagctgagcta

SEQ ID NO: 234460 - DNA, 25 bp, SARS Virus
catctgtggagagaagctgagctac

SEQ ID NO: 234461 - DNA, 25 bp, SARS Virus
atctgtggagaggagctgagctaca

SEQ ID NO: 234462 - DNA, 25 bp, SARS Virus
tctgtggagagaggctgagctacat

SEQ ID NO: 234463 - DNA, 25 bp, SARS Virus
ctgtggagagaagctgagctacatt

SEQ ID NO: 234464 - DNA, 25 bp, SARS Virus
tgtggagagaaggtgagctacatta

SEQ ID NO: 234465 - DNA, 25 bp, SARS Virus
gtggagagaagcggagctacattag

SEQ ID NO: 234466 - DNA, 25 bp, SARS Virus
tggagagaagctgagctacattagt

SEQ ID NO: 234467 - DNA, 25 bp, SARS Virus
ggagagaagctgggctacattagtt

SEQ ID NO: 234468 - DNA, 25 bp, SARS Virus
gagagaagctgagctacattagttc

SEQ ID NO: 234469 - DNA, 25 bp, SARS Virus
agagaagctgaggtacattagttca

SEQ ID NO: 234470 - DNA, 25 bp, SARS Virus
gagaagctgagcgacattagttcaa

SEQ ID NO: 234471 - DNA, 25 bp, SARS Virus
agaagctgagctgcattagttcaac

SEQ ID NO: 234472 - DNA, 25 bp, SARS Virus
gaagctgagctagattagttcaaca

SEQ ID NO: 234473 - DNA, 25 bp, SARS Virus
aagctgagctacgttagttcaacaa

SEQ ID NO: 234474 - DNA, 25 bp, SARS Virus
agctgagctacagtagttcaacaag

SEQ ID NO: 234475 - DNA, 25 bp, SARS Virus
gctgagctacatgagttcaacaagc

SEQ ID NO: 234476 - DNA, 25 bp, SARS Virus
ctgagctacattggttcaacaagcc

SEQ ID NO: 234477 - DNA, 25 bp, SARS Virus
tgagctacattagttcaacaagcct

SEQ ID NO: 234478 - DNA, 25 bp, SARS Virus
gagctacattaggtcaacaagcctt

SEQ ID NO: 234479 - DNA, 25 bp, SARS Virus
agctacattagtgcaacaagccttt

SEQ ID NO: 234480 - DNA, 25 bp, SARS Virus
gctacattagttgaacaagcctttc

SEQ ID NO: 234481 - DNA, 25 bp, SARS Virus
ctacattagttcgacaagcctttct

SEQ ID NO: 234482 - DNA, 25 bp, SARS Virus
tacattagttcagcaagcctttctc

SEQ ID NO: 234483 - DNA, 25 bp, SARS Virus
acattagttcaagaagcctttctca

SEQ ID NO: 234484 - DNA, 25 bp, SARS Virus
cattagttcaacgagcctttctcac

SEQ ID NO: 234485 - DNA, 25 bp, SARS Virus
attagttcaacaggcctttctcacg

SEQ ID NO: 234486 - DNA, 25 bp, SARS Virus
ttagttcaacaagcctttctcacgt

SEQ ID NO: 234487 - DNA, 25 bp, SARS Virus
tagttcaacaaggctttctcacgtg

SEQ ID NO: 234488 - DNA, 25 bp, SARS Virus
agttcaacaagcgtttctcacgtgt

SEQ ID NO: 234489 - DNA, 25 bp, SARS Virus
gttcaacaagccgttctcacgtgta

SEQ ID NO: 234490 - DNA, 25 bp, SARS Virus
ttcaacaagcctgtctcacgtgtaa

SEQ ID NO: 234491 - DNA, 25 bp, SARS Virus
tcaacaagccttgctcacgtgtaac

SEQ ID NO: 234492 - DNA, 25 bp, SARS Virus
caacaagcctttgtcacgtgtaact

SEQ ID NO: 234493 - DNA, 25 bp, SARS Virus
aacaagcctttcgcacgtgtaactg

SEQ ID NO: 234494 - DNA, 25 bp, SARS Virus
acaagcctttctgacgtgtaactga

SEQ ID NO: 234495 - DNA, 25 bp, SARS Virus
caagcctttctcgcgtgtaactgaa

SEQ ID NO: 234496 - DNA, 25 bp, SARS Virus
aagcctttctcaggtgtaactgaac

SEQ ID NO: 234497 - DNA, 25 bp, SARS Virus
agcctttctcacgtgtaactgaacg

SEQ ID NO: 234498 - DNA, 25 bp, SARS Virus
gcctttctcacgggtaactgaacgg

SEQ ID NO: 234499 - DNA, 25 bp, SARS Virus
cctttctcacgtgtaactgaacggg

SEQ ID NO: 234500 - DNA, 25 bp, SARS Virus
ctttctcacgtggaactgaacgggc

SEQ ID NO: 234501 - DNA, 25 bp, SARS Virus
tttctcacgtgtgactgaacgggcg

SEQ ID NO: 234502 - DNA, 25 bp, SARS Virus
ttctcacgtgtagctgaacgggcgc

SEQ ID NO: 234503 - DNA, 25 bp, SARS Virus
tctcacgtgtaagtgaacgggcgcg

SEQ ID NO: 234504 - DNA, 25 bp, SARS Virus
ctcacgtgtaacggaacgggcgcgc

SEQ ID NO: 234505 - DNA, 25 bp, SARS Virus
tcacgtgtaactgaacgggcgcgca

SEQ ID NO: 234506 - DNA, 25 bp, SARS Virus
cacgtgtaactggacgggcgcgcac

SEQ ID NO: 234507 - DNA, 25 bp, SARS Virus
acgtgtaactgagcgggcgcgcacg

SEQ ID NO: 234508 - DNA, 25 bp, SARS Virus
cgtgtaactgaaggggcgcgcacgc

SEQ ID NO: 234509 - DNA, 25 bp, SARS Virus
gtgtaactgaacgggcgcgcacgct

SEQ ID NO: 234510 - DNA, 25 bp, SARS Virus
tgtaactgaacgggcgcgcacgctc

SEQ ID NO: 234511 - DNA, 25 bp, SARS Virus
gtaactgaacgggcgcgcacgctct

SEQ ID NO: 234512 - DNA, 25 bp, SARS Virus
taactgaacgggggcgcacgctctt

SEQ ID NO: 234513 - DNA, 25 bp, SARS Virus
aactgaacgggcgcgcacgctcttt

SEQ ID NO: 234514 - DNA, 25 bp, SARS Virus
actgaacgggcgggcacgctctttt

SEQ ID NO: 234515 - DNA, 25 bp, SARS Virus
ctgaacgggcgcgcacgctctttta

SEQ ID NO: 234516 - DNA, 25 bp, SARS Virus
tgaacgggcgcggacgctcttttag

SEQ ID NO: 234517 - DNA, 25 bp, SARS Virus
gaacgggcgcgcgcgctcttttaga

SEQ ID NO: 234518 - DNA, 25 bp, SARS Virus
aacgggcgcgcaggctcttttagaa

SEQ ID NO: 234519 - DNA, 25 bp, SARS Virus
acgggcgcgcacgctcttttagaaa

SEQ ID NO: 234520 - DNA, 25 bp, SARS Virus
cgggcgcgcacggtcttttagaaac

SEQ ID NO: 234521 - DNA, 25 bp, SARS Virus
gggcgcgcacgcgcttttagaaact

SEQ ID NO: 234522 - DNA, 25 bp, SARS Virus
ggcgcgcacgctgttttagaaacta

SEQ ID NO: 234523 - DNA, 25 bp, SARS Virus
gcgcgcacgctcgtttagaaactac

SEQ ID NO: 234524 - DNA, 25 bp, SARS Virus
cgcgcacgctctgttagaaactacg

SEQ ID NO: 234525 - DNA, 25 bp, SARS Virus
gcgcacgctcttgtagaaactacgt

SEQ ID NO: 234526 - DNA, 25 bp, SARS Virus
cgcacgctctttgagaaactacgtt

SEQ ID NO: 234527 - DNA, 25 bp, SARS Virus
gcacgctcttttggaaactacgtta

SEQ ID NO: 234528 - DNA, 25 bp, SARS Virus
cacgctcttttagaaactacgttag

SEQ ID NO: 234529 - DNA, 25 bp, SARS Virus
acgctcttttaggaactacgttagt

SEQ ID NO: 234530 - DNA, 25 bp, SARS Virus
cgctcttttagagactacgttagtt

SEQ ID NO: 234531 - DNA, 25 bp, SARS Virus
gctcttttagaagctacgttagttc

SEQ ID NO: 234532 - DNA, 25 bp, SARS Virus
ctcttttagaaagtacgttagttct

SEQ ID NO: 234533 - DNA, 25 bp, SARS Virus
tcttttagaaacgacgttagttctc

SEQ ID NO: 234534 - DNA, 25 bp, SARS Virus
cttttagaaactgcgttagttctcc

SEQ ID NO: 234535 - DNA, 25 bp, SARS Virus
ttttagaaactaggttagttctccc

SEQ ID NO: 234536 - DNA, 25 bp, SARS Virus
tttagaaactacgttagttctccca

SEQ ID NO: 234537 - DNA, 25 bp, SARS Virus
ttagaaactacggtagttctcccat

SEQ ID NO: 234538 - DNA, 25 bp, SARS Virus
tagaaactacgtgagttctcccatg

SEQ ID NO: 234539 - DNA, 25 bp, SARS Virus
agaaactacgttggttctcccatgg

SEQ ID NO: 234540 - DNA, 25 bp, SARS Virus
gaaactacgttagttctcccatggg

SEQ ID NO: 234541 - DNA, 25 bp, SARS Virus
aaactacgttaggtctcccatgggt

SEQ ID NO: 234542 - DNA, 25 bp, SARS Virus
aactacgttagtgctcccatgggta

SEQ ID NO: 234543 - DNA, 25 bp, SARS Virus
actacgttagttgtcccatgggtag

SEQ ID NO: 234544 - DNA, 25 bp, SARS Virus
ctacgttagttcgcccatgggtaga

SEQ ID NO: 234545 - DNA, 25 bp, SARS Virus
tacgttagttctgccatgggtagac

SEQ ID NO: 234546 - DNA, 25 bp, SARS Virus
acgttagttctcgcatgggtagacc

SEQ ID NO: 234547 - DNA, 25 bp, SARS Virus
cgttagttctccgatgggtagaccc

SEQ ID NO: 234548 - DNA, 25 bp, SARS Virus
gttagttctcccgtgggtagacccg

SEQ ID NO: 234549 - DNA, 25 bp, SARS Virus
ttagttctcccaggggtagacccgg

SEQ ID NO: 234550 - DNA, 25 bp, SARS Virus
tagttctcccatgggtagacccggt

SEQ ID NO: 234551 - DNA, 25 bp, SARS Virus
agttctcccatgggtagacccggtg

SEQ ID NO: 234552 - DNA, 25 bp, SARS Virus
gttctcccatgggtagacccggtgt

SEQ ID NO: 234553 - DNA, 25 bp, SARS Virus
ttctcccatggggagacccggtgtc

SEQ ID NO: 234554 - DNA, 25 bp, SARS Virus
tctcccatgggtggacccggtgtct

SEQ ID NO: 234555 - DNA, 25 bp, SARS Virus
ctcccatgggtagacccggtgtctt

SEQ ID NO: 234556 - DNA, 25 bp, SARS Virus
tcccatgggtaggcccggtgtcttt

SEQ ID NO: 234557 - DNA, 25 bp, SARS Virus
cccatgggtagagccggtgtcttta

SEQ ID NO: 234558 - DNA, 25 bp, SARS Virus
ccatgggtagacgcggtgtctttaa

SEQ ID NO: 234559 - DNA, 25 bp, SARS Virus
catgggtagaccgggtgtctttaac

SEQ ID NO: 234560 - DNA, 25 bp, SARS Virus
atgggtagacccggtgtctttaaca

SEQ ID NO: 234561 - DNA, 25 bp, SARS Virus
tgggtagacccggtgtctttaacaa

SEQ ID NO: 234562 - DNA, 25 bp, SARS Virus
gggtagacccggggtctttaacaac

SEQ ID NO: 234563 - DNA, 25 bp, SARS Virus
ggtagacccggtgtctttaacaaca

SEQ ID NO: 234564 - DNA, 25 bp, SARS Virus
gtagacccggtggctttaacaacag

SEQ ID NO: 234565 - DNA, 25 bp, SARS Virus
tagacccggtgtgtttaacaacagc

SEQ ID NO: 234566 - DNA, 25 bp, SARS Virus
agacccggtgtcgttaacaacagct

SEQ ID NO: 234567 - DNA, 25 bp, SARS Virus
gacccggtgtctgtaacaacagctg

SEQ ID NO: 234568 - DNA, 25 bp, SARS Virus
acccggtgtcttgaacaacagctgt

SEQ ID NO: 234569 - DNA, 25 bp, SARS Virus
cccggtgtctttgacaacagctgta

SEQ ID NO: 234570 - DNA, 25 bp, SARS Virus
ccggtgtctttagcaacagctgtat

SEQ ID NO: 234571 - DNA, 25 bp, SARS Virus
cggtgtctttaagaacagctgtatc

SEQ ID NO: 234572 - DNA, 25 bp, SARS Virus
ggtgtctttaacgacagctgtatcg

SEQ ID NO: 234573 - DNA, 25 bp, SARS Virus
gtgtctttaacagcagctgtatcgc

SEQ ID NO: 234574 - DNA, 25 bp, SARS Virus
tgtctttaacaagagctgtatcgct

SEQ ID NO: 234575 - DNA, 25 bp, SARS Virus
gtctttaacaacggctgtatcgctc

SEQ ID NO: 234576 - DNA, 25 bp, SARS Virus
tctttaacaacagctgtatcgctca

SEQ ID NO: 234577 - DNA, 25 bp, SARS Virus
ctttaacaacaggtgtatcgctcac

SEQ ID NO: 234578 - DNA, 25 bp, SARS Virus
tttaacaacagcggtatcgctcact

SEQ ID NO: 234579 - DNA, 25 bp, SARS Virus
ttaacaacagctgtatcgctcactg

SEQ ID NO: 234580 - DNA, 25 bp, SARS Virus
taacaacagctggatcgctcactga

SEQ ID NO: 234581 - DNA, 25 bp, SARS Virus
aacaacagctgtgtcgctcactgac

SEQ ID NO: 234582 - DNA, 25 bp, SARS Virus
acaacagctgtagcgctcactgacg

SEQ ID NO: 234583 - DNA, 25 bp, SARS Virus
caacagctgtatggctcactgacgt

SEQ ID NO: 234584 - DNA, 25 bp, SARS Virus
aacagctgtatcgctcactgacgtg

SEQ ID NO: 234585 - DNA, 25 bp, SARS Virus
acagctgtatcggtcactgacgtgg

SEQ ID NO: 234586 - DNA, 25 bp, SARS Virus
cagctgtatcgcgcactgacgtgga

SEQ ID NO: 234587 - DNA, 25 bp, SARS Virus
agctgtatcgctgactgacgtggag

SEQ ID NO: 234588 - DNA, 25 bp, SARS Virus
gctgtatcgctcgctgacgtggagg

SEQ ID NO: 234589 - DNA, 25 bp, SARS Virus
ctgtatcgctcagtgacgtggaggt

SEQ ID NO: 234590 - DNA, 25 bp, SARS Virus
tgtatcgctcacggacgtggaggta

SEQ ID NO: 234591 - DNA, 25 bp, SARS Virus
gtatcgctcactgacgtggaggtaa

SEQ ID NO: 234592 - DNA, 25 bp, SARS Virus
tatcgctcactggcgtggaggtaac

SEQ ID NO: 234593 - DNA, 25 bp, SARS Virus
atcgctcactgaggtggaggtaact

SEQ ID NO: 234594 - DNA, 25 bp, SARS Virus
tcgctcactgacgtggaggtaactc

SEQ ID NO: 234595 - DNA, 25 bp, SARS Virus
cgctcactgacggggaggtaactcg

SEQ ID NO: 234596 - DNA, 25 bp, SARS Virus
gctcactgacgtggaggtaactcga

SEQ ID NO: 234597 - DNA, 25 bp, SARS Virus
ctcactgacgtggaggtaactcgag

SEQ ID NO: 234598 - DNA, 25 bp, SARS Virus
tcactgacgtgggggtaactcgagt

SEQ ID NO: 234599 - DNA, 25 bp, SARS Virus
cactgacgtggaggtaactcgagtg

SEQ ID NO: 234600 - DNA, 25 bp, SARS Virus
actgacgtggaggtaactcgagtgc

SEQ ID NO: 234601 - DNA, 25 bp, SARS Virus
ctgacgtggagggaactcgagtgct

SEQ ID NO: 234602 - DNA, 25 bp, SARS Virus
tgacgtggaggtgactcgagtgctc

SEQ ID NO: 234603 - DNA, 25 bp, SARS Virus
gacgtggaggtagctcgagtgctca

SEQ ID NO: 234604 - DNA, 25 bp, SARS Virus
acgtggaggtaagtcgagtgctcac

SEQ ID NO: 234605 - DNA, 25 bp, SARS Virus
cgtggaggtaacgcgagtgctcact

SEQ ID NO: 234606 - DNA, 25 bp, SARS Virus
gtggaggtaactggagtgctcactc

SEQ ID NO: 234607 - DNA, 25 bp, SARS Virus
tggaggtaactcgagtgctcactca

SEQ ID NO: 234608 - DNA, 25 bp, SARS Virus
ggaggtaactcgggtgctcactcaa

SEQ ID NO: 234609 - DNA, 25 bp, SARS Virus
gaggtaactcgagtgctcactcaag

SEQ ID NO: 234610 - DNA, 25 bp, SARS Virus
aggtaactcgagggctcactcaagt

SEQ ID NO: 234611 - DNA, 25 bp, SARS Virus
ggtaactcgagtgctcactcaagtg

SEQ ID NO: 234612 - DNA, 25 bp, SARS Virus
gtaactcgagtggtcactcaagtgc

SEQ ID NO: 234613 - DNA, 25 bp, SARS Virus
taactcgagtgcgcactcaagtgcc

SEQ ID NO: 234614 - DNA, 25 bp, SARS Virus
aactcgagtgctgactcaagtgcct

SEQ ID NO: 234615 - DNA, 25 bp, SARS Virus
actcgagtgctcgctcaagtgcctc

SEQ ID NO: 234616 - DNA, 25 bp, SARS Virus
ctcgagtgctcagtcaagtgcctca

SEQ ID NO: 234617 - DNA, 25 bp, SARS Virus
tcgagtgctcacgcaagtgcctcac

SEQ ID NO: 234618 - DNA, 25 bp, SARS Virus
cgagtgctcactgaagtgcctcacg

SEQ ID NO: 234619 - DNA, 25 bp, SARS Virus
gagtgctcactcgagtgcctcacgt

SEQ ID NO: 234620 - DNA, 25 bp, SARS Virus
agtgctcactcaggtgcctcacgtg

SEQ ID NO: 234621 - DNA, 25 bp, SARS Virus
gtgctcactcaagtgcctcacgtgg

SEQ ID NO: 234622 - DNA, 25 bp, SARS Virus
tgctcactcaagggcctcacgtggt

SEQ ID NO: 234623 - DNA, 25 bp, SARS Virus
gctcactcaagtgcctcacgtggtg

SEQ ID NO: 234624 - DNA, 25 bp, SARS Virus
ctcactcaagtggctcacgtggtga

SEQ ID NO: 234625 - DNA, 25 bp, SARS Virus
tcactcaagtgcgtcacgtggtgac

SEQ ID NO: 234626 - DNA, 25 bp, SARS Virus
cactcaagtgccgcacgtggtgacg

SEQ ID NO: 234627 - DNA, 25 bp, SARS Virus
actcaagtgcctgacgtggtgacgg

SEQ ID NO: 234628 - DNA, 25 bp, SARS Virus
ctcaagtgcctcgcgtggtgacggt

SEQ ID NO: 234629 - DNA, 25 bp, SARS Virus
tcaagtgcctcaggtggtgacggta

SEQ ID NO: 234630 - DNA, 25 bp, SARS Virus
caagtgcctcacgtggtgacggtac

SEQ ID NO: 234631 - DNA, 25 bp, SARS Virus
aagtgcctcacggggtgacggtacg

SEQ ID NO: 234632 - DNA, 25 bp, SARS Virus
agtgcctcacgtggtgacggtacga

SEQ ID NO: 234633 - DNA, 25 bp, SARS Virus
gtgcctcacgtggtgacggtacgaa

SEQ ID NO: 234634 - DNA, 25 bp, SARS Virus
tgcctcacgtggggacggtacgaat

SEQ ID NO: 234635 - DNA, 25 bp, SARS Virus
gcctcacgtggtgacggtacgaatc

SEQ ID NO: 234636 - DNA, 25 bp, SARS Virus
cctcacgtggtggcggtacgaatca

SEQ ID NO: 234637 - DNA, 25 bp, SARS Virus
ctcacgtggtgagggtacgaatcac

SEQ ID NO: 234638 - DNA, 25 bp, SARS Virus
tcacgtggtgacggtacgaatcaca

SEQ ID NO: 234639 - DNA, 25 bp, SARS Virus
cacgtggtgacggtacgaatcacaa

SEQ ID NO: 234640 - DNA, 25 bp, SARS Virus
acgtggtgacgggacgaatcacaag

SEQ ID NO: 234641 - DNA, 25 bp, SARS Virus
cgtggtgacggtgcgaatcacaagg

SEQ ID NO: 234642 - DNA, 25 bp, SARS Virus
gtggtgacggtaggaatcacaaggt

SEQ ID NO: 234643 - DNA, 25 bp, SARS Virus
tggtgacggtacgaatcacaaggtc

SEQ ID NO: 234644 - DNA, 25 bp, SARS Virus
ggtgacggtacggatcacaaggtca

SEQ ID NO: 234645 - DNA, 25 bp, SARS Virus
gtgacggtacgagtcacaaggtcaa

SEQ ID NO: 234646 - DNA, 25 bp, SARS Virus
tgacggtacgaagcacaaggtcaaa

SEQ ID NO: 234647 - DNA, 25 bp, SARS Virus
gacggtacgaatgacaaggtcaaaa

SEQ ID NO: 234648 - DNA, 25 bp, SARS Virus
acggtacgaatcgcaaggtcaaaac

SEQ ID NO: 234649 - DNA, 25 bp, SARS Virus
cggtacgaatcagaaggtcaaaaca

SEQ ID NO: 234650 - DNA, 25 bp, SARS Virus
ggtacgaatcacgaggtcaaaacaa

SEQ ID NO: 234651 - DNA, 25 bp, SARS Virus
gtacgaatcacagggtcaaaacaag

SEQ ID NO: 234652 - DNA, 25 bp, SARS Virus
tacgaatcacaaggtcaaaacaagt

SEQ ID NO: 234653 - DNA, 25 bp, SARS Virus
acgaatcacaaggtcaaaacaagta

SEQ ID NO: 234654 - DNA, 25 bp, SARS Virus
cgaatcacaagggcaaaacaagtat

SEQ ID NO: 234655 - DNA, 25 bp, SARS Virus
gaatcacaaggtgaaaacaagtatt

SEQ ID NO: 234656 - DNA, 25 bp, SARS Virus
aatcacaaggtcgaaacaagtatta

SEQ ID NO: 234657 - DNA, 25 bp, SARS Virus
atcacaaggtcagaacaagtattag

SEQ ID NO: 234658 - DNA, 25 bp, SARS Virus
tcacaaggtcaagacaagtattaga

SEQ ID NO: 234659 - DNA, 25 bp, SARS Virus
cacaaggtcaaagcaagtattagaa

SEQ ID NO: 234660 - DNA, 25 bp, SARS Virus
acaaggtcaaaagaagtattagaag

SEQ ID NO: 234661 - DNA, 25 bp, SARS Virus
caaggtcaaaacgagtattagaagt

SEQ ID NO: 234662 - DNA, 25 bp, SARS Virus
aaggtcaaaacaggtattagaagtt

SEQ ID NO: 234663 - DNA, 25 bp, SARS Virus
aggtcaaaacaagtattagaagtta

SEQ ID NO: 234664 - DNA, 25 bp, SARS Virus
ggtcaaaacaaggattagaagttac

SEQ ID NO: 234665 - DNA, 25 bp, SARS Virus
gtcaaaacaagtgttagaagttacc

SEQ ID NO: 234666 - DNA, 25 bp, SARS Virus
tcaaaacaagtagtagaagttaccc

SEQ ID NO: 234667 - DNA, 25 bp, SARS Virus
caaaacaagtatgagaagttaccct

SEQ ID NO: 234668 - DNA, 25 bp, SARS Virus
aaaacaagtattggaagttacccta

SEQ ID NO: 234669 - DNA, 25 bp, SARS Virus
aaacaagtattagaagttaccctag

SEQ ID NO: 234670 - DNA, 25 bp, SARS Virus
aacaagtattaggagttaccctagt

SEQ ID NO: 234671 - DNA, 25 bp, SARS Virus
acaagtattagaggttaccctagtc

SEQ ID NO: 234672 - DNA, 25 bp, SARS Virus
caagtattagaagttaccctagtca

SEQ ID NO: 234673 - DNA, 25 bp, SARS Virus
aagtattagaaggtaccctagtcac

SEQ ID NO: 234674 - DNA, 25 bp, SARS Virus
agtattagaagtgaccctagtcacg

SEQ ID NO: 234675 - DNA, 25 bp, SARS Virus
gtattagaagttgccctagtcacgg

SEQ ID NO: 234676 - DNA, 25 bp, SARS Virus
tattagaagttagcctagtcacggt

SEQ ID NO: 234677 - DNA, 25 bp, SARS Virus
attagaagttacgctagtcacggtt

SEQ ID NO: 234678 - DNA, 25 bp, SARS Virus
ttagaagttaccgtagtcacggttc

SEQ ID NO: 234679 - DNA, 25 bp, SARS Virus
tagaagttacccgagtcacggttcg

SEQ ID NO: 234680 - DNA, 25 bp, SARS Virus
agaagttaccctggtcacggttcga

SEQ ID NO: 234681 - DNA, 25 bp, SARS Virus
gaagttaccctagtcacggttcgag

SEQ ID NO: 234682 - DNA, 25 bp, SARS Virus
aagttaccctaggcacggttcgagc

SEQ ID NO: 234683 - DNA, 25 bp, SARS Virus
agttaccctagtgacggttcgagca

SEQ ID NO: 234684 - DNA, 25 bp, SARS Virus
gttaccctagtcgcggttcgagcag

SEQ ID NO: 234685 - DNA, 25 bp, SARS Virus
ttaccctagtcagggttcgagcagt

SEQ ID NO: 234686 - DNA, 25 bp, SARS Virus
taccctagtcacggttcgagcagtg

SEQ ID NO: 234687 - DNA, 25 bp, SARS Virus
accctagtcacggttcgagcagtgg

SEQ ID NO: 234688 - DNA, 25 bp, SARS Virus
ccctagtcacgggtcgagcagtgga

SEQ ID NO: 234689 - DNA, 25 bp, SARS Virus
cctagtcacggtgcgagcagtggat

SEQ ID NO: 234690 - DNA, 25 bp, SARS Virus
ctagtcacggttggagcagtggatt

SEQ ID NO: 234691 - DNA, 25 bp, SARS Virus
tagtcacggttcgagcagtggattc

SEQ ID NO: 234692 - DNA, 25 bp, SARS Virus
agtcacggttcgggcagtggattca

SEQ ID NO: 234693 - DNA, 25 bp, SARS Virus
gtcacggttcgagcagtggattcag

SEQ ID NO: 234694 - DNA, 25 bp, SARS Virus
tcacggttcgaggagtggattcagt

SEQ ID NO: 234695 - DNA, 25 bp, SARS Virus
cacggttcgagcggtggattcagta

SEQ ID NO: 234696 - DNA, 25 bp, SARS Virus
acggttcgagcagtggattcagtat

SEQ ID NO: 234697 - DNA, 25 bp, SARS Virus
cggttcgagcaggggattcagtatt

SEQ ID NO: 234698 - DNA, 25 bp, SARS Virus
ggttcgagcagtggattcagtattc

SEQ ID NO: 234699 - DNA, 25 bp, SARS Virus
gttcgagcagtggattcagtattct

SEQ ID NO: 234700 - DNA, 25 bp, SARS Virus
ttcgagcagtgggttcagtattctg

SEQ ID NO: 234701 - DNA, 25 bp, SARS Virus
tcgagcagtggagtcagtattctga

SEQ ID NO: 234702 - DNA, 25 bp, SARS Virus
cgagcagtggatgcagtattctgaa

SEQ ID NO: 234703 - DNA, 25 bp, SARS Virus
gagcagtggattgagtattctgaaa

SEQ ID NO: 234704 - DNA, 25 bp, SARS Virus
agcagtggattcggtattctgaaat

SEQ ID NO: 234705 - DNA, 25 bp, SARS Virus
gcagtggattcagtattctgaaatc

SEQ ID NO: 234706 - DNA, 25 bp, SARS Virus
cagtggattcaggattctgaaatct

SEQ ID NO: 234707 - DNA, 25 bp, SARS Virus
agtggattcagtgttctgaaatcta

SEQ ID NO: 234708 - DNA, 25 bp, SARS Virus
gtggattcagtagtctgaaatctag

SEQ ID NO: 234709 - DNA, 25 bp, SARS Virus
tggattcagtatgctgaaatctagc

SEQ ID NO: 234710 - DNA, 25 bp, SARS Virus
ggattcagtattgtgaaatctagct

SEQ ID NO: 234711 - DNA, 25 bp, SARS Virus
gattcagtattcggaaatctagcta

SEQ ID NO: 234712 - DNA, 25 bp, SARS Virus
attcagtattctgaaatctagctac

SEQ ID NO: 234713 - DNA, 25 bp, SARS Virus
ttcagtattctggaatctagctacg

SEQ ID NO: 234714 - DNA, 25 bp, SARS Virus
tcagtattctgagatctagctacgg

SEQ ID NO: 234715 - DNA, 25 bp, SARS Virus
cagtattctgaagtctagctacggt

SEQ ID NO: 234716 - DNA, 25 bp, SARS Virus
agtattctgaaagctagctacggta

SEQ ID NO: 234717 - DNA, 25 bp, SARS Virus
gtattctgaaatgtagctacggtat

SEQ ID NO: 234718 - DNA, 25 bp, SARS Virus
tattctgaaatcgagctacggtatc

SEQ ID NO: 234719 - DNA, 25 bp, SARS Virus
attctgaaatctggctacggtatcg

SEQ ID NO: 234720 - DNA, 25 bp, SARS Virus
ttctgaaatctagctacggtatcga

SEQ ID NO: 234721 - DNA, 25 bp, SARS Virus
tctgaaatctaggtacggtatcgat

SEQ ID NO: 234722 - DNA, 25 bp, SARS Virus
ctgaaatctagcgacggtatcgata

SEQ ID NO: 234723 - DNA, 25 bp, SARS Virus
tgaaatctagctgcggtatcgatac

SEQ ID NO: 234724 - DNA, 25 bp, SARS Virus
gaaatctagctagggtatcgatact

SEQ ID NO: 234725 - DNA, 25 bp, SARS Virus
aaatctagctacggtatcgatactg

SEQ ID NO: 234726 - DNA, 25 bp, SARS Virus
aatctagctacggtatcgatactgg

SEQ ID NO: 234727 - DNA, 25 bp, SARS Virus
atctagctacgggatcgatactggt

SEQ ID NO: 234728 - DNA, 25 bp, SARS Virus
tctagctacggtgtcgatactggtg

SEQ ID NO: 234729 - DNA, 25 bp, SARS Virus
ctagctacggtagcgatactggtgg

SEQ ID NO: 234730 - DNA, 25 bp, SARS Virus
tagctacggtatggatactggtggc

SEQ ID NO: 234731 - DNA, 25 bp, SARS Virus
agctacggtatcgatactggtggcc

SEQ ID NO: 234732 - DNA, 25 bp, SARS Virus
gctacggtatcggtactggtggccg

SEQ ID NO: 234733 - DNA, 25 bp, SARS Virus
ctacggtatcgagactggtggccga

SEQ ID NO: 234734 - DNA, 25 bp, SARS Virus
tacggtatcgatgctggtggccgag

SEQ ID NO: 234735 - DNA, 25 bp, SARS Virus
acggtatcgatagtggtggccgagg

SEQ ID NO: 234736 - DNA, 25 bp, SARS Virus
cggtatcgatacgggtggccgaggg

SEQ ID NO: 234737 - DNA, 25 bp, SARS Virus
ggtatcgatactggtggccgaggga

SEQ ID NO: 234738 - DNA, 25 bp, SARS Virus
gtatcgatactggtggccgagggaa

SEQ ID NO: 234739 - DNA, 25 bp, SARS Virus
tatcgatactgggggccgagggaat

SEQ ID NO: 234740 - DNA, 25 bp, SARS Virus
atcgatactggtggccgagggaata

SEQ ID NO: 234741 - DNA, 25 bp, SARS Virus
tcgatactggtggccgagggaataa

SEQ ID NO: 234742 - DNA, 25 bp, SARS Virus
cgatactggtgggcgagggaataat

SEQ ID NO: 234743 - DNA, 25 bp, SARS Virus
gatactggtggcggagggaataatg

SEQ ID NO: 234744 - DNA, 25 bp, SARS Virus
atactggtggccgagggaataatgg

SEQ ID NO: 234745 - DNA, 25 bp, SARS Virus
tactggtggccgggggaataatggc

SEQ ID NO: 234746 - DNA, 25 bp, SARS Virus
actggtggccgagggaataatggca

SEQ ID NO: 234747 - DNA, 25 bp, SARS Virus
ctggtggccgagggaataatggcaa

SEQ ID NO: 234748 - DNA, 25 bp, SARS Virus
tggtggccgagggaataatggcaag

SEQ ID NO: 234749 - DNA, 25 bp, SARS Virus
ggtggccgaggggataatggcaaga

SEQ ID NO: 234750 - DNA, 25 bp, SARS Virus
gtggccgagggagtaatggcaagaa

SEQ ID NO: 234751 - DNA, 25 bp, SARS Virus
tggccgagggaagaatggcaagaat

SEQ ID NO: 234752 - DNA, 25 bp, SARS Virus
ggccgagggaatgatggcaagaatg

SEQ ID NO: 234753 - DNA, 25 bp, SARS Virus
gccgagggaatagtggcaagaatgc

SEQ ID NO: 234754 - DNA, 25 bp, SARS Virus
ccgagggaataagggcaagaatgct

SEQ ID NO: 234755 - DNA, 25 bp, SARS Virus
cgagggaataatggcaagaatgctt

SEQ ID NO: 234756 - DNA, 25 bp, SARS Virus
gagggaataatggcaagaatgcttc

SEQ ID NO: 234757 - DNA, 25 bp, SARS Virus
agggaataatgggaagaatgcttct

SEQ ID NO: 234758 - DNA, 25 bp, SARS Virus
gggaataatggcgagaatgcttctt

SEQ ID NO: 234759 - DNA, 25 bp, SARS Virus
ggaataatggcaggaatgcttcttc

SEQ ID NO: 234760 - DNA, 25 bp, SARS Virus
gaataatggcaagaatgcttcttct

SEQ ID NO: 234761 - DNA, 25 bp, SARS Virus
aaaagaaaagttttgcaccaactta

SEQ ID NO: 234762 - DNA, 25 bp, SARS Virus
aaagaaaagttgtgcaccaacttac

SEQ ID NO: 234763 - DNA, 25 bp, SARS Virus
aagaaaagttgttcaccaacttact

SEQ ID NO: 234764 - DNA, 25 bp, SARS Virus
agaaaagttgtgtaccaacttactg

SEQ ID NO: 234765 - DNA, 25 bp, SARS Virus
gaaaagttgtgctccaacttactga

SEQ ID NO: 234766 - DNA, 25 bp, SARS Virus
aaaagttgtgcatcaacttactgaa

SEQ ID NO: 234767 - DNA, 25 bp, SARS Virus
aaagttgtgcactaacttactgaaa

SEQ ID NO: 234768 - DNA, 25 bp, SARS Virus
aagttgtgcacctacttactgaaac

SEQ ID NO: 234769 - DNA, 25 bp, SARS Virus
agttgtgcaccatcttactgaaact

SEQ ID NO: 234770 - DNA, 25 bp, SARS Virus
gttgtgcaccaatttactgaaactg

SEQ ID NO: 234771 - DNA, 25 bp, SARS Virus
ttgtgcaccaacttactgaaactga

SEQ ID NO: 234772 - DNA, 25 bp, SARS Virus
tgtgcaccaacttactgaaactgaa

SEQ ID NO: 234773 - DNA, 25 bp, SARS Virus
gtgcaccaactttctgaaactgaaa

SEQ ID NO: 234774 - DNA, 25 bp, SARS Virus
tgcaccaacttattgaaactgaaaa

SEQ ID NO: 234775 - DNA, 25 bp, SARS Virus
gcaccaacttactgaaactgaaaac

SEQ ID NO: 234776 - DNA, 25 bp, SARS Virus
caccaacttacttaaactgaaaact

SEQ ID NO: 234777 - DNA, 25 bp, SARS Virus
accaacttactgtaactgaaaactc

SEQ ID NO: 234778 - DNA, 25 bp, SARS Virus
ccaacttactgatactgaaaactca

SEQ ID NO: 234779 - DNA, 25 bp, SARS Virus
caacttactgaatctgaaaactcaa

SEQ ID NO: 234780 - DNA, 25 bp, SARS Virus
aacttactgaaattgaaaactcaat

SEQ ID NO: 234781 - DNA, 25 bp, SARS Virus
acttactgaaactgaaaactcaatt

SEQ ID NO: 234782 - DNA, 25 bp, SARS Virus
cttactgaaacttaaaactcaattc

SEQ ID NO: 234783 - DNA, 25 bp, SARS Virus
ttactgaaactgtaaactcaattct

SEQ ID NO: 234784 - DNA, 25 bp, SARS Virus
tactgaaactgataactcaattctc

SEQ ID NO: 234785 - DNA, 25 bp, SARS Virus
actgaaactgaatactcaattctcc

SEQ ID NO: 234786 - DNA, 25 bp, SARS Virus
ctgaaactgaaatctcaattctcct

SEQ ID NO: 234787 - DNA, 25 bp, SARS Virus
tgaaactgaaaattcaattctcctt

SEQ ID NO: 234788 - DNA, 25 bp, SARS Virus
gaaactgaaaactcaattctccttt

SEQ ID NO: 234789 - DNA, 25 bp, SARS Virus
aaactgaaaacttaattctcctttg

SEQ ID NO: 234790 - DNA, 25 bp, SARS Virus
aactgaaaactctattctcctttgt

SEQ ID NO: 234791 - DNA, 25 bp, SARS Virus
actgaaaactcatttctcctttgtg

SEQ ID NO: 234792 - DNA, 25 bp, SARS Virus
ctgaaaactcaattctcctttgtgt

SEQ ID NO: 234793 - DNA, 25 bp, SARS Virus
tgaaaactcaattctcctttgtgtt

SEQ ID NO: 234794 - DNA, 25 bp, SARS Virus
gaaaactcaattttcctttgtgttt

SEQ ID NO: 234795 - DNA, 25 bp, SARS Virus
aaaactcaattctcctttgtgtttg

SEQ ID NO: 234796 - DNA, 25 bp, SARS Virus
aaactcaattcttctttgtgtttga

SEQ ID NO: 234797 - DNA, 25 bp, SARS Virus
aactcaattctcttttgtgtttgaa

SEQ ID NO: 234798 - DNA, 25 bp, SARS Virus
actcaattctcctttgtgtttgaaa

SEQ ID NO: 234799 - DNA, 25 bp, SARS Virus
ctcaattctcctttgtgtttgaaac

SEQ ID NO: 234800 - DNA, 25 bp, SARS Virus
tcaattctcctttgtgtttgaaacc

SEQ ID NO: 234801 - DNA, 25 bp, SARS Virus
caattctcctttttgtttgaaaccc

SEQ ID NO: 234802 - DNA, 25 bp, SARS Virus
aattctcctttgtgtttgaaacccg

SEQ ID NO: 234803 - DNA, 25 bp, SARS Virus
attctcctttgtttttgaaacccgt

SEQ ID NO: 234804 - DNA, 25 bp, SARS Virus
ttctcctttgtgtttgaaacccgta

SEQ ID NO: 234805 - DNA, 25 bp, SARS Virus
tctcctttgtgtttgaaacccgtaa

SEQ ID NO: 234806 - DNA, 25 bp, SARS Virus
ctcctttgtgtttgaaacccgtaag

SEQ ID NO: 234807 - DNA, 25 bp, SARS Virus
tcctttgtgttttaaacccgtaagg

SEQ ID NO: 234808 - DNA, 25 bp, SARS Virus
cctttgtgtttgtaacccgtaaggg

SEQ ID NO: 234809 - DNA, 25 bp, SARS Virus
ctttgtgtttgatacccgtaagggg

SEQ ID NO: 234810 - DNA, 25 bp, SARS Virus
tttgtgtttgaatcccgtaagggga

SEQ ID NO: 234811 - DNA, 25 bp, SARS Virus
ttgtgtttgaaatccgtaaggggaa

SEQ ID NO: 234812 - DNA, 25 bp, SARS Virus
tgtgtttgaaactcgtaaggggaaa

SEQ ID NO: 234813 - DNA, 25 bp, SARS Virus
gtgtttgaaacctgtaaggggaaac

SEQ ID NO: 234814 - DNA, 25 bp, SARS Virus
tgtttgaaacccttaaggggaaact

SEQ ID NO: 234815 - DNA, 25 bp, SARS Virus
gtttgaaacccgtaaggggaaactt

SEQ ID NO: 234816 - DNA, 25 bp, SARS Virus
tttgaaacccgttaggggaaacttt

SEQ ID NO: 234817 - DNA, 25 bp, SARS Virus
ttgaaacccgtatggggaaactttc

SEQ ID NO: 234818 - DNA, 25 bp, SARS Virus
tgaaacccgtaatgggaaactttca

SEQ ID NO: 234819 - DNA, 25 bp, SARS Virus
gaaacccgtaagtggaaactttcac

SEQ ID NO: 234820 - DNA, 25 bp, SARS Virus
aaacccgtaaggtgaaactttcaca

SEQ ID NO: 234821 - DNA, 25 bp, SARS Virus
aacccgtaagggtaaactttcacag

SEQ ID NO: 234822 - DNA, 25 bp, SARS Virus
acccgtaaggggtaactttcacagt

SEQ ID NO: 234823 - DNA, 25 bp, SARS Virus
cccgtaaggggatactttcacagtt

SEQ ID NO: 234824 - DNA, 25 bp, SARS Virus
ccgtaaggggaatctttcacagttt

SEQ ID NO: 234825 - DNA, 25 bp, SARS Virus
cgtaaggggaaattttcacagttta

SEQ ID NO: 234826 - DNA, 25 bp, SARS Virus
gtaaggggaaactttcacagtttaa

SEQ ID NO: 234827 - DNA, 25 bp, SARS Virus
taaggggaaactttcacagtttaaa

SEQ ID NO: 234828 - DNA, 25 bp, SARS Virus
aaggggaaactttcacagtttaaag

SEQ ID NO: 234829 - DNA, 25 bp, SARS Virus
aggggaaacttttacagtttaaaga

SEQ ID NO: 234830 - DNA, 25 bp, SARS Virus
ggggaaactttctcagtttaaagaa

SEQ ID NO: 234831 - DNA, 25 bp, SARS Virus
gggaaactttcatagtttaaagaac

SEQ ID NO: 234832 - DNA, 25 bp, SARS Virus
ggaaactttcactgtttaaagaacc

SEQ ID NO: 234833 - DNA, 25 bp, SARS Virus
gaaactttcacattttaaagaaccg

SEQ ID NO: 234834 - DNA, 25 bp, SARS Virus
aaactttcacagtttaaagaaccgt

SEQ ID NO: 234835 - DNA, 25 bp, SARS Virus
aactttcacagtttaaagaaccgtg

SEQ ID NO: 234836 - DNA, 25 bp, SARS Virus
actttcacagtttaaagaaccgtga

SEQ ID NO: 234837 - DNA, 25 bp, SARS Virus
ctttcacagttttaagaaccgtgag

SEQ ID NO: 234838 - DNA, 25 bp, SARS Virus
tttcacagtttatagaaccgtgaga

SEQ ID NO: 234839 - DNA, 25 bp, SARS Virus
ttcacagtttaatgaaccgtgagaa

SEQ ID NO: 234840 - DNA, 25 bp, SARS Virus
tcacagtttaaataaccgtgagaat

SEQ ID NO: 234841 - DNA, 25 bp, SARS Virus
cacagtttaaagtaccgtgagaatt

SEQ ID NO: 234842 - DNA, 25 bp, SARS Virus
acagtttaaagatccgtgagaatta

SEQ ID NO: 234843 - DNA, 25 bp, SARS Virus
cagtttaaagaatcgtgagaattaa

SEQ ID NO: 234844 - DNA, 25 bp, SARS Virus
agtttaaagaactgtgagaattaaa

SEQ ID NO: 234845 - DNA, 25 bp, SARS Virus
gtttaaagaaccttgagaattaaag

SEQ ID NO: 234846 - DNA, 25 bp, SARS Virus
tttaaagaaccgtgagaattaaagc

SEQ ID NO: 234847 - DNA, 25 bp, SARS Virus
ttaaagaaccgttagaattaaagct

SEQ ID NO: 234848 - DNA, 25 bp, SARS Virus
taaagaaccgtgtgaattaaagctt

SEQ ID NO: 234849 - DNA, 25 bp, SARS Virus
aaagaaccgtgataattaaagcttc

SEQ ID NO: 234850 - DNA, 25 bp, SARS Virus
aagaaccgtgagtattaaagcttcc

SEQ ID NO: 234851 - DNA, 25 bp, SARS Virus
agaaccgtgagatttaaagcttccc

SEQ ID NO: 234852 - DNA, 25 bp, SARS Virus
gaaccgtgagaattaaagcttccca

SEQ ID NO: 234853 - DNA, 25 bp, SARS Virus
aaccgtgagaattaaagcttcccac

SEQ ID NO: 234854 - DNA, 25 bp, SARS Virus
accgtgagaatttaagcttcccaca

SEQ ID NO: 234855 - DNA, 25 bp, SARS Virus
ccgtgagaattatagcttcccacag

SEQ ID NO: 234856 - DNA, 25 bp, SARS Virus
cgtgagaattaatgcttcccacaga

SEQ ID NO: 234857 - DNA, 25 bp, SARS Virus
gtgagaattaaatcttcccacagac

SEQ ID NO: 234858 - DNA, 25 bp, SARS Virus
tgagaattaaagtttcccacagacc

SEQ ID NO: 234859 - DNA, 25 bp, SARS Virus
gagaattaaagcttcccacagacca

SEQ ID NO: 234860 - DNA, 25 bp, SARS Virus
agaattaaagcttcccacagaccac

SEQ ID NO: 234861 - DNA, 25 bp, SARS Virus
gaattaaagctttccacagaccacg

SEQ ID NO: 234862 - DNA, 25 bp, SARS Virus
aattaaagcttctcacagaccacga

SEQ ID NO: 234863 - DNA, 25 bp, SARS Virus
attaaagcttcctacagaccacgag

SEQ ID NO: 234864 - DNA, 25 bp, SARS Virus
ttaaagcttccctcagaccacgagc

SEQ ID NO: 234865 - DNA, 25 bp, SARS Virus
taaagcttcccatagaccacgagca

SEQ ID NO: 234866 - DNA, 25 bp, SARS Virus
aaagcttcccactgaccacgagcat

SEQ ID NO: 234867 - DNA, 25 bp, SARS Virus
aagcttcccacataccacgagcatc

SEQ ID NO: 234868 - DNA, 25 bp, SARS Virus
agcttcccacagtccacgagcatcg

SEQ ID NO: 234869 - DNA, 25 bp, SARS Virus
gcttcccacagatcacgagcatcga

SEQ ID NO: 234870 - DNA, 25 bp, SARS Virus
cttcccacagactacgagcatcgag

SEQ ID NO: 234871 - DNA, 25 bp, SARS Virus
ttcccacagacctcgagcatcgaga

SEQ ID NO: 234872 - DNA, 25 bp, SARS Virus
tcccacagaccatgagcatcgagaa

SEQ ID NO: 234873 - DNA, 25 bp, SARS Virus
cccacagaccactagcatcgagaat

SEQ ID NO: 234874 - DNA, 25 bp, SARS Virus
ccacagaccacgtgcatcgagaata

SEQ ID NO: 234875 - DNA, 25 bp, SARS Virus
cacagaccacgatcatcgagaatag

SEQ ID NO: 234876 - DNA, 25 bp, SARS Virus
acagaccacgagtatcgagaatagt

SEQ ID NO: 234877 - DNA, 25 bp, SARS Virus
cagaccacgagcttcgagaatagtc

SEQ ID NO: 234878 - DNA, 25 bp, SARS Virus
agaccacgagcatcgagaatagtct

SEQ ID NO: 234879 - DNA, 25 bp, SARS Virus
gaccacgagcattgagaatagtctc

SEQ ID NO: 234880 - DNA, 25 bp, SARS Virus
accacgagcatctagaatagtctcg

SEQ ID NO: 234881 - DNA, 25 bp, SARS Virus
ccacgagcatcgtgaatagtctcgc

SEQ ID NO: 234882 - DNA, 25 bp, SARS Virus
cacgagcatcgataatagtctcgcg

SEQ ID NO: 234883 - DNA, 25 bp, SARS Virus
acgagcatcgagtatagtctcgcga

SEQ ID NO: 234884 - DNA, 25 bp, SARS Virus
cgagcatcgagattagtctcgcgag

SEQ ID NO: 234885 - DNA, 25 bp, SARS Virus
gagcatcgagaatagtctcgcgagt

SEQ ID NO: 234886 - DNA, 25 bp, SARS Virus
agcatcgagaattgtctcgcgagtc

SEQ ID NO: 234887 - DNA, 25 bp, SARS Virus
gcatcgagaatattctcgcgagtca

SEQ ID NO: 234888 - DNA, 25 bp, SARS Virus
catcgagaatagtctcgcgagtcac

SEQ ID NO: 234889 - DNA, 25 bp, SARS Virus
atcgagaatagtttcgcgagtcact

SEQ ID NO: 234890 - DNA, 25 bp, SARS Virus
tcgagaatagtctcgcgagtcactt

SEQ ID NO: 234891 - DNA, 25 bp, SARS Virus
cgagaatagtcttgcgagtcacttg

SEQ ID NO: 234892 - DNA, 25 bp, SARS Virus
gagaatagtctctcgagtcacttgg

SEQ ID NO: 234893 - DNA, 25 bp, SARS Virus
agaatagtctcgtgagtcacttggt

SEQ ID NO: 234894 - DNA, 25 bp, SARS Virus
gaatagtctcgctagtcacttggtc

SEQ ID NO: 234895 - DNA, 25 bp, SARS Virus
aatagtctcgcgtgtcacttggtcc

SEQ ID NO: 234896 - DNA, 25 bp, SARS Virus
atagtctcgcgattcacttggtccg

SEQ ID NO: 234897 - DNA, 25 bp, SARS Virus
tagtctcgcgagtcacttggtccgt

SEQ ID NO: 234898 - DNA, 25 bp, SARS Virus
agtctcgcgagttacttggtccgtt

SEQ ID NO: 234899 - DNA, 25 bp, SARS Virus
gtctcgcgagtctcttggtccgtta

SEQ ID NO: 234900 - DNA, 25 bp, SARS Virus
tctcgcgagtcatttggtccgttaa

SEQ ID NO: 234901 - DNA, 25 bp, SARS Virus
ctcgcgagtcacttggtccgttaaa

SEQ ID NO: 234902 - DNA, 25 bp, SARS Virus
tcgcgagtcacttggtccgttaaag

SEQ ID NO: 234903 - DNA, 25 bp, SARS Virus
cgcgagtcactttgtccgttaaagt

SEQ ID NO: 234904 - DNA, 25 bp, SARS Virus
gcgagtcacttgttccgttaaagta

SEQ ID NO: 234905 - DNA, 25 bp, SARS Virus
cgagtcacttggtccgttaaagtac

SEQ ID NO: 234906 - DNA, 25 bp, SARS Virus
gagtcacttggttcgttaaagtacg

SEQ ID NO: 234907 - DNA, 25 bp, SARS Virus
agtcacttggtctgttaaagtacga

SEQ ID NO: 234908 - DNA, 25 bp, SARS Virus
gtcacttggtcctttaaagtacgag

SEQ ID NO: 234909 - DNA, 25 bp, SARS Virus
tcacttggtccgttaaagtacgagt

SEQ ID NO: 234910 - DNA, 25 bp, SARS Virus
cacttggtccgttaaagtacgagta

SEQ ID NO: 234911 - DNA, 25 bp, SARS Virus
acttggtccgtttaagtacgagtac

SEQ ID NO: 234912 - DNA, 25 bp, SARS Virus
cttggtccgttatagtacgagtacc

SEQ ID NO: 234913 - DNA, 25 bp, SARS Virus
ttggtccgttaatgtacgagtacca

SEQ ID NO: 234914 - DNA, 25 bp, SARS Virus
tggtccgttaaattacgagtaccag

SEQ ID NO: 234915 - DNA, 25 bp, SARS Virus
ggtccgttaaagtacgagtaccagt

SEQ ID NO: 234916 - DNA, 25 bp, SARS Virus
gtccgttaaagttcgagtaccagtg

SEQ ID NO: 234917 - DNA, 25 bp, SARS Virus
tccgttaaagtatgagtaccagtgc

SEQ ID NO: 234918 - DNA, 25 bp, SARS Virus
ccgttaaagtactagtaccagtgcc

SEQ ID NO: 234919 - DNA, 25 bp, SARS Virus
cgttaaagtacgtgtaccagtgccg

SEQ ID NO: 234920 - DNA, 25 bp, SARS Virus
gttaaagtacgattaccagtgccgt

SEQ ID NO: 234921 - DNA, 25 bp, SARS Virus
ttaaagtacgagtaccagtgccgtc

SEQ ID NO: 234922 - DNA, 25 bp, SARS Virus
taaagtacgagttccagtgccgtcg

SEQ ID NO: 234923 - DNA, 25 bp, SARS Virus
aaagtacgagtatcagtgccgtcgt

SEQ ID NO: 234924 - DNA, 25 bp, SARS Virus
aagtacgagtactagtgccgtcgtc

SEQ ID NO: 234925 - DNA, 25 bp, SARS Virus
agtacgagtacctgtgccgtcgtca

SEQ ID NO: 234926 - DNA, 25 bp, SARS Virus
gtacgagtaccattgccgtcgtcat

SEQ ID NO: 234927 - DNA, 25 bp, SARS Virus
tacgagtaccagtgccgtcgtcatc

SEQ ID NO: 234928 - DNA, 25 bp, SARS Virus
acgagtaccagttccgtcgtcatct

SEQ ID NO: 234929 - DNA, 25 bp, SARS Virus
cgagtaccagtgtcgtcgtcatctg

SEQ ID NO: 234930 - DNA, 25 bp, SARS Virus
gagtaccagtgctgtcgtcatctgt

SEQ ID NO: 234931 - DNA, 25 bp, SARS Virus
agtaccagtgccttcgtcatctgtg

SEQ ID NO: 234932 - DNA, 25 bp, SARS Virus
gtaccagtgccgtcgtcatctgtgg

SEQ ID NO: 234933 - DNA, 25 bp, SARS Virus
taccagtgccgttgtcatctgtgga

SEQ ID NO: 234934 - DNA, 25 bp, SARS Virus
accagtgccgtcttcatctgtggag

SEQ ID NO: 234935 - DNA, 25 bp, SARS Virus
ccagtgccgtcgtcatctgtggaga

SEQ ID NO: 234936 - DNA, 25 bp, SARS Virus
cagtgccgtcgttatctgtggagag

SEQ ID NO: 234937 - DNA, 25 bp, SARS Virus
agtgccgtcgtcttctgtggagaga

SEQ ID NO: 234938 - DNA, 25 bp, SARS Virus
gtgccgtcgtcatctgtggagagaa

SEQ ID NO: 234939 - DNA, 25 bp, SARS Virus
tgccgtcgtcatttgtggagagaag

SEQ ID NO: 234940 - DNA, 25 bp, SARS Virus
gccgtcgtcatctgtggagagaagc

SEQ ID NO: 234941 - DNA, 25 bp, SARS Virus
ccgtcgtcatctttggagagaagct

SEQ ID NO: 234942 - DNA, 25 bp, SARS Virus
cgtcgtcatctgtggagagaagctg

SEQ ID NO: 234943 - DNA, 25 bp, SARS Virus
gtcgtcatctgttgagagaagctga

SEQ ID NO: 234944 - DNA, 25 bp, SARS Virus
tcgtcatctgtgtagagaagctgag

SEQ ID NO: 234945 - DNA, 25 bp, SARS Virus
cgtcatctgtggtgagaagctgagc

SEQ ID NO: 234946 - DNA, 25 bp, SARS Virus
gtcatctgtggatagaagctgagct

SEQ ID NO: 234947 - DNA, 25 bp, SARS Virus
tcatctgtggagtgaagctgagcta

SEQ ID NO: 234948 - DNA, 25 bp, SARS Virus
catctgtggagataagctgagctac

SEQ ID NO: 234949 - DNA, 25 bp, SARS Virus
atctgtggagagtagctgagctaca

SEQ ID NO: 234950 - DNA, 25 bp, SARS Virus
tctgtggagagatgctgagctacat

SEQ ID NO: 234951 - DNA, 25 bp, SARS Virus
ctgtggagagaatctgagctacatt

SEQ ID NO: 234952 - DNA, 25 bp, SARS Virus
tgtggagagaagttgagctacatta

SEQ ID NO: 234953 - DNA, 25 bp, SARS Virus
gtggagagaagctgagctacattag

SEQ ID NO: 234954 - DNA, 25 bp, SARS Virus
tggagagaagcttagctacattagt

SEQ ID NO: 234955 - DNA, 25 bp, SARS Virus
ggagagaagctgtgctacattagtt

SEQ ID NO: 234956 - DNA, 25 bp, SARS Virus
gagagaagctgatctacattagttc

SEQ ID NO: 234957 - DNA, 25 bp, SARS Virus
agagaagctgagttacattagttca

SEQ ID NO: 234958 - DNA, 25 bp, SARS Virus
gagaagctgagctacattagttcaa

SEQ ID NO: 234959 - DNA, 25 bp, SARS Virus
agaagctgagcttcattagttcaac

SEQ ID NO: 234960 - DNA, 25 bp, SARS Virus
gaagctgagctatattagttcaaca

SEQ ID NO: 234961 - DNA, 25 bp, SARS Virus
aagctgagctactttagttcaacaa

SEQ ID NO: 234962 - DNA, 25 bp, SARS Virus
agctgagctacattagttcaacaag

SEQ ID NO: 234963 - DNA, 25 bp, SARS Virus
gctgagctacattagttcaacaagc

SEQ ID NO: 234964 - DNA, 25 bp, SARS Virus
ctgagctacatttgttcaacaagcc

SEQ ID NO: 234965 - DNA, 25 bp, SARS Virus
tgagctacattatttcaacaagcct

SEQ ID NO: 234966 - DNA, 25 bp, SARS Virus
gagctacattagttcaacaagcctt

SEQ ID NO: 234967 - DNA, 25 bp, SARS Virus
agctacattagttcaacaagccttt

SEQ ID NO: 234968 - DNA, 25 bp, SARS Virus
gctacattagtttaacaagcctttc

SEQ ID NO: 234969 - DNA, 25 bp, SARS Virus
ctacattagttctacaagcctttct

SEQ ID NO: 234970 - DNA, 25 bp, SARS Virus
tacattagttcatcaagcctttctc

SEQ ID NO: 234971 - DNA, 25 bp, SARS Virus
acattagttcaataagcctttctca

SEQ ID NO: 234972 - DNA, 25 bp, SARS Virus
cattagttcaactagcctttctcac

SEQ ID NO: 234973 - DNA, 25 bp, SARS Virus
attagttcaacatgcctttctcacg

SEQ ID NO: 234974 - DNA, 25 bp, SARS Virus
ttagttcaacaatcctttctcacgt

SEQ ID NO: 234975 - DNA, 25 bp, SARS Virus
tagttcaacaagtctttctcacgtg

SEQ ID NO: 234976 - DNA, 25 bp, SARS Virus
agttcaacaagcttttctcacgtgt

SEQ ID NO: 234977 - DNA, 25 bp, SARS Virus
gttcaacaagcctttctcacgtgta

SEQ ID NO: 234978 - DNA, 25 bp, SARS Virus
ttcaacaagcctttctcacgtgtaa

SEQ ID NO: 234979 - DNA, 25 bp, SARS Virus
tcaacaagcctttctcacgtgtaac

SEQ ID NO: 234980 - DNA, 25 bp, SARS Virus
caacaagcctttttcacgtgtaact

SEQ ID NO: 234981 - DNA, 25 bp, SARS Virus
aacaagcctttctcacgtgtaactg

SEQ ID NO: 234982 - DNA, 25 bp, SARS Virus
acaagcctttcttacgtgtaactga

SEQ ID NO: 234983 - DNA, 25 bp, SARS Virus
caagcctttctctcgtgtaactgaa

SEQ ID NO: 234984 - DNA, 25 bp, SARS Virus
aagcctttctcatgtgtaactgaac

SEQ ID NO: 234985 - DNA, 25 bp, SARS Virus
agcctttctcacttgtaactgaacg

SEQ ID NO: 234986 - DNA, 25 bp, SARS Virus
gcctttctcacgtgtaactgaacgg

SEQ ID NO: 234987 - DNA, 25 bp, SARS Virus
cctttctcacgtttaactgaacggg

SEQ ID NO: 234988 - DNA, 25 bp, SARS Virus
ctttctcacgtgtaactgaacgggc

SEQ ID NO: 234989 - DNA, 25 bp, SARS Virus
tttctcacgtgttactgaacgggcg

SEQ ID NO: 234990 - DNA, 25 bp, SARS Virus
ttctcacgtgtatctgaacgggcgc

SEQ ID NO: 234991 - DNA, 25 bp, SARS Virus
tctcacgtgtaattgaacgggcgcg

SEQ ID NO: 234992 - DNA, 25 bp, SARS Virus
ctcacgtgtaactgaacgggcgcgc

SEQ ID NO: 234993 - DNA, 25 bp, SARS Virus
tcacgtgtaacttaacgggcgcgca

SEQ ID NO: 234994 - DNA, 25 bp, SARS Virus
cacgtgtaactgtacgggcgcgcac

SEQ ID NO: 234995 - DNA, 25 bp, SARS Virus
acgtgtaactgatcgggcgcgcacg

SEQ ID NO: 234996 - DNA, 25 bp, SARS Virus
cgtgtaactgaatgggcgcgcacgc

SEQ ID NO: 234997 - DNA, 25 bp, SARS Virus
gtgtaactgaactggcgcgcacgct

SEQ ID NO: 234998 - DNA, 25 bp, SARS Virus
tgtaactgaacgtgcgcgcacgctc

SEQ ID NO: 234999 - DNA, 25 bp, SARS Virus
gtaactgaacggtcgcgcacgctct

SEQ ID NO: 235000 - DNA, 25 bp, SARS Virus
taactgaacgggtgcgcacgctctt

SEQ ID NO: 235001 - DNA, 25 bp, SARS Virus
aactgaacgggctcgcacgctcttt

SEQ ID NO: 235002 - DNA, 25 bp, SARS Virus
actgaacgggcgtgcacgctctttt

SEQ ID NO: 235003 - DNA, 25 bp, SARS Virus
ctgaacgggcgctcacgctctttta

SEQ ID NO: 235004 - DNA, 25 bp, SARS Virus
tgaacgggcgcgtacgctcttttag

SEQ ID NO: 235005 - DNA, 25 bp, SARS Virus
gaacgggcgcgctcgctcttttaga

SEQ ID NO: 235006 - DNA, 25 bp, SARS Virus
aacgggcgcgcatgctcttttagaa

SEQ ID NO: 235007 - DNA, 25 bp, SARS Virus
acgggcgcgcactctcttttagaaa

SEQ ID NO: 235008 - DNA, 25 bp, SARS Virus
cgggcgcgcacgttcttttagaaac

SEQ ID NO: 235009 - DNA, 25 bp, SARS Virus
gggcgcgcacgctcttttagaaact

SEQ ID NO: 235010 - DNA, 25 bp, SARS Virus
ggcgcgcacgcttttttagaaacta

SEQ ID NO: 235011 - DNA, 25 bp, SARS Virus
gcgcgcacgctcttttagaaactac

SEQ ID NO: 235012 - DNA, 25 bp, SARS Virus
cgcgcacgctcttttagaaactacg

SEQ ID NO: 235013 - DNA, 25 bp, SARS Virus
gcgcacgctcttttagaaactacgt

SEQ ID NO: 235014 - DNA, 25 bp, SARS Virus
cgcacgctcttttagaaactacgtt

SEQ ID NO: 235015 - DNA, 25 bp, SARS Virus
gcacgctctttttgaaactacgtta

SEQ ID NO: 235016 - DNA, 25 bp, SARS Virus
cacgctcttttataaactacgttag

SEQ ID NO: 235017 - DNA, 25 bp, SARS Virus
acgctcttttagtaactacgttagt

SEQ ID NO: 235018 - DNA, 25 bp, SARS Virus
cgctcttttagatactacgttagtt

SEQ ID NO: 235019 - DNA, 25 bp, SARS Virus
gctcttttagaatctacgttagttc

SEQ ID NO: 235020 - DNA, 25 bp, SARS Virus
ctcttttagaaattacgttagttct

SEQ ID NO: 235021 - DNA, 25 bp, SARS Virus
tcttttagaaactacgttagttctc

SEQ ID NO: 235022 - DNA, 25 bp, SARS Virus
cttttagaaacttcgttagttctcc

SEQ ID NO: 235023 - DNA, 25 bp, SARS Virus
ttttagaaactatgttagttctccc

SEQ ID NO: 235024 - DNA, 25 bp, SARS Virus
tttagaaactactttagttctccca

SEQ ID NO: 235025 - DNA, 25 bp, SARS Virus
ttagaaactacgttagttctcccat

SEQ ID NO: 235026 - DNA, 25 bp, SARS Virus
tagaaactacgttagttctcccatg

SEQ ID NO: 235027 - DNA, 25 bp, SARS Virus
agaaactacgtttgttctcccatgg

SEQ ID NO: 235028 - DNA, 25 bp, SARS Virus
gaaactacgttatttctcccatggg

SEQ ID NO: 235029 - DNA, 25 bp, SARS Virus
aaactacgttagttctcccatgggt

SEQ ID NO: 235030 - DNA, 25 bp, SARS Virus
aactacgttagttctcccatgggta

SEQ ID NO: 235031 - DNA, 25 bp, SARS Virus
actacgttagttttcccatgggtag

SEQ ID NO: 235032 - DNA, 25 bp, SARS Virus
ctacgttagttctcccatgggtaga

SEQ ID NO: 235033 - DNA, 25 bp, SARS Virus
tacgttagttcttccatgggtagac

SEQ ID NO: 235034 - DNA, 25 bp, SARS Virus
acgttagttctctcatgggtagacc

SEQ ID NO: 235035 - DNA, 25 bp, SARS Virus
cgttagttctcctatgggtagaccc

SEQ ID NO: 235036 - DNA, 25 bp, SARS Virus
gttagttctcccttgggtagacccg

SEQ ID NO: 235037 - DNA, 25 bp, SARS Virus
ttagttctcccatgggtagacccgg

SEQ ID NO: 235038 - DNA, 25 bp, SARS Virus
tagttctcccattggtagacccggt

SEQ ID NO: 235039 - DNA, 25 bp, SARS Virus
agttctcccatgtgtagacccggtg

SEQ ID NO: 235040 - DNA, 25 bp, SARS Virus
gttctcccatggttagacccggtgt

SEQ ID NO: 235041 - DNA, 25 bp, SARS Virus
ttctcccatgggtagacccggtgtc

SEQ ID NO: 235042 - DNA, 25 bp, SARS Virus
tctcccatgggttgacccggtgtct

SEQ ID NO: 235043 - DNA, 25 bp, SARS Virus
ctcccatgggtatacccggtgtctt

SEQ ID NO: 235044 - DNA, 25 bp, SARS Virus
tcccatgggtagtcccggtgtcttt

SEQ ID NO: 235045 - DNA, 25 bp, SARS Virus
cccatgggtagatccggtgtcttta

SEQ ID NO: 235046 - DNA, 25 bp, SARS Virus
ccatgggtagactcggtgtctttaa

SEQ ID NO: 235047 - DNA, 25 bp, SARS Virus
catgggtagacctggtgtctttaac

SEQ ID NO: 235048 - DNA, 25 bp, SARS Virus
atgggtagaccctgtgtctttaaca

SEQ ID NO: 235049 - DNA, 25 bp, SARS Virus
tgggtagacccgttgtctttaacaa

SEQ ID NO: 235050 - DNA, 25 bp, SARS Virus
gggtagacccggtgtctttaacaac

SEQ ID NO: 235051 - DNA, 25 bp, SARS Virus
ggtagacccggtttctttaacaaca

SEQ ID NO: 235052 - DNA, 25 bp, SARS Virus
gtagacccggtgtctttaacaacag

SEQ ID NO: 235053 - DNA, 25 bp, SARS Virus
tagacccggtgtttttaacaacagc

SEQ ID NO: 235054 - DNA, 25 bp, SARS Virus
agacccggtgtctttaacaacagct

SEQ ID NO: 235055 - DNA, 25 bp, SARS Virus
gacccggtgtctttaacaacagctg

SEQ ID NO: 235056 - DNA, 25 bp, SARS Virus
acccggtgtctttaacaacagctgt

SEQ ID NO: 235057 - DNA, 25 bp, SARS Virus
cccggtgtcttttacaacagctgta

SEQ ID NO: 235058 - DNA, 25 bp, SARS Virus
ccggtgtctttatcaacagctgtat

SEQ ID NO: 235059 - DNA, 25 bp, SARS Virus
cggtgtctttaataacagctgtatc

SEQ ID NO: 235060 - DNA, 25 bp, SARS Virus
ggtgtctttaactacagctgtatcg

SEQ ID NO: 235061 - DNA, 25 bp, SARS Virus
gtgtctttaacatcagctgtatcgc

SEQ ID NO: 235062 - DNA, 25 bp, SARS Virus
tgtctttaacaatagctgtatcgct

SEQ ID NO: 235063 - DNA, 25 bp, SARS Virus
gtctttaacaactgctgtatcgctc

SEQ ID NO: 235064 - DNA, 25 bp, SARS Virus
tctttaacaacatctgtatcgctca

SEQ ID NO: 235065 - DNA, 25 bp, SARS Virus
ctttaacaacagttgtatcgctcac

SEQ ID NO: 235066 - DNA, 25 bp, SARS Virus
tttaacaacagctgtatcgctcact

SEQ ID NO: 235067 - DNA, 25 bp, SARS Virus
ttaacaacagctttatcgctcactg

SEQ ID NO: 235068 - DNA, 25 bp, SARS Virus
taacaacagctgtatcgctcactga

SEQ ID NO: 235069 - DNA, 25 bp, SARS Virus
aacaacagctgtttcgctcactgac

SEQ ID NO: 235070 - DNA, 25 bp, SARS Virus
acaacagctgtatcgctcactgacg

SEQ ID NO: 235071 - DNA, 25 bp, SARS Virus
caacagctgtattgctcactgacgt

SEQ ID NO: 235072 - DNA, 25 bp, SARS Virus
aacagctgtatctctcactgacgtg

SEQ ID NO: 235073 - DNA, 25 bp, SARS Virus
acagctgtatcgttcactgacgtgg

SEQ ID NO: 235074 - DNA, 25 bp, SARS Virus
cagctgtatcgctcactgacgtgga

SEQ ID NO: 235075 - DNA, 25 bp, SARS Virus
agctgtatcgcttactgacgtggag

SEQ ID NO: 235076 - DNA, 25 bp, SARS Virus
gctgtatcgctctctgacgtggagg

SEQ ID NO: 235077 - DNA, 25 bp, SARS Virus
ctgtatcgctcattgacgtggaggt

SEQ ID NO: 235078 - DNA, 25 bp, SARS Virus
tgtatcgctcactgacgtggaggta

SEQ ID NO: 235079 - DNA, 25 bp, SARS Virus
gtatcgctcacttacgtggaggtaa

SEQ ID NO: 235080 - DNA, 25 bp, SARS Virus
tatcgctcactgtcgtggaggtaac

SEQ ID NO: 235081 - DNA, 25 bp, SARS Virus
atcgctcactgatgtggaggtaact

SEQ ID NO: 235082 - DNA, 25 bp, SARS Virus
tcgctcactgacttggaggtaactc

SEQ ID NO: 235083 - DNA, 25 bp, SARS Virus
cgctcactgacgtggaggtaactcg

SEQ ID NO: 235084 - DNA, 25 bp, SARS Virus
gctcactgacgttgaggtaactcga

SEQ ID NO: 235085 - DNA, 25 bp, SARS Virus
ctcactgacgtgtaggtaactcgag

SEQ ID NO: 235086 - DNA, 25 bp, SARS Virus
tcactgacgtggtggtaactcgagt

SEQ ID NO: 235087 - DNA, 25 bp, SARS Virus
cactgacgtggatgtaactcgagtg

SEQ ID NO: 235088 - DNA, 25 bp, SARS Virus
actgacgtggagttaactcgagtgc

SEQ ID NO: 235089 - DNA, 25 bp, SARS Virus
ctgacgtggaggtaactcgagtgct

SEQ ID NO: 235090 - DNA, 25 bp, SARS Virus
tgacgtggaggttactcgagtgctc

SEQ ID NO: 235091 - DNA, 25 bp, SARS Virus
gacgtggaggtatctcgagtgctca

SEQ ID NO: 235092 - DNA, 25 bp, SARS Virus
acgtggaggtaattcgagtgctcac

SEQ ID NO: 235093 - DNA, 25 bp, SARS Virus
cgtggaggtaactcgagtgctcact

SEQ ID NO: 235094 - DNA, 25 bp, SARS Virus
gtggaggtaacttgagtgctcactc

SEQ ID NO: 235095 - DNA, 25 bp, SARS Virus
tggaggtaactctagtgctcactca

SEQ ID NO: 235096 - DNA, 25 bp, SARS Virus
ggaggtaactcgtgtgctcactcaa

SEQ ID NO: 235097 - DNA, 25 bp, SARS Virus
gaggtaactcgattgctcactcaag

SEQ ID NO: 235098 - DNA, 25 bp, SARS Virus
aggtaactcgagtgctcactcaagt

SEQ ID NO: 235099 - DNA, 25 bp, SARS Virus
ggtaactcgagttctcactcaagtg

SEQ ID NO: 235100 - DNA, 25 bp, SARS Virus
gtaactcgagtgttcactcaagtgc

SEQ ID NO: 235101 - DNA, 25 bp, SARS Virus
taactcgagtgctcactcaagtgcc

SEQ ID NO: 235102 - DNA, 25 bp, SARS Virus
aactcgagtgcttactcaagtgcct

SEQ ID NO: 235103 - DNA, 25 bp, SARS Virus
actcgagtgctctctcaagtgcctc

SEQ ID NO: 235104 - DNA, 25 bp, SARS Virus
ctcgagtgctcattcaagtgcctca

SEQ ID NO: 235105 - DNA, 25 bp, SARS Virus
tcgagtgctcactcaagtgcctcac

SEQ ID NO: 235106 - DNA, 25 bp, SARS Virus
cgagtgctcacttaagtgcctcacg

SEQ ID NO: 235107 - DNA, 25 bp, SARS Virus
gagtgctcactctagtgcctcacgt

SEQ ID NO: 235108 - DNA, 25 bp, SARS Virus
agtgctcactcatgtgcctcacgtg

SEQ ID NO: 235109 - DNA, 25 bp, SARS Virus
gtgctcactcaattgcctcacgtgg

SEQ ID NO: 235110 - DNA, 25 bp, SARS Virus
tgctcactcaagtgcctcacgtggt

SEQ ID NO: 235111 - DNA, 25 bp, SARS Virus
gctcactcaagttcctcacgtggtg

SEQ ID NO: 235112 - DNA, 25 bp, SARS Virus
ctcactcaagtgtctcacgtggtga

SEQ ID NO: 235113 - DNA, 25 bp, SARS Virus
tcactcaagtgcttcacgtggtgac

SEQ ID NO: 235114 - DNA, 25 bp, SARS Virus
cactcaagtgcctcacgtggtgacg

SEQ ID NO: 235115 - DNA, 25 bp, SARS Virus
actcaagtgccttacgtggtgacgg

SEQ ID NO: 235116 - DNA, 25 bp, SARS Virus
ctcaagtgcctctcgtggtgacggt

SEQ ID NO: 235117 - DNA, 25 bp, SARS Virus
tcaagtgcctcatgtggtgacggta

SEQ ID NO: 235118 - DNA, 25 bp, SARS Virus
caagtgcctcacttggtgacggtac

SEQ ID NO: 235119 - DNA, 25 bp, SARS Virus
aagtgcctcacgtggtgacggtacg

SEQ ID NO: 235120 - DNA, 25 bp, SARS Virus
agtgcctcacgttgtgacggtacga

SEQ ID NO: 235121 - DNA, 25 bp, SARS Virus
gtgcctcacgtgttgacggtacgaa

SEQ ID NO: 235122 - DNA, 25 bp, SARS Virus
tgcctcacgtggtgacggtacgaat

SEQ ID NO: 235123 - DNA, 25 bp, SARS Virus
gcctcacgtggttacggtacgaatc

SEQ ID NO: 235124 - DNA, 25 bp, SARS Virus
cctcacgtggtgtcggtacgaatca

SEQ ID NO: 235125 - DNA, 25 bp, SARS Virus
ctcacgtggtgatggtacgaatcac

SEQ ID NO: 235126 - DNA, 25 bp, SARS Virus
tcacgtggtgactgtacgaatcaca

SEQ ID NO: 235127 - DNA, 25 bp, SARS Virus
cacgtggtgacgttacgaatcacaa

SEQ ID NO: 235128 - DNA, 25 bp, SARS Virus
acgtggtgacggtacgaatcacaag

SEQ ID NO: 235129 - DNA, 25 bp, SARS Virus
cgtggtgacggttcgaatcacaagg

SEQ ID NO: 235130 - DNA, 25 bp, SARS Virus
gtggtgacggtatgaatcacaaggt

SEQ ID NO: 235131 - DNA, 25 bp, SARS Virus
tggtgacggtactaatcacaaggtc

SEQ ID NO: 235132 - DNA, 25 bp, SARS Virus
ggtgacggtacgtatcacaaggtca

SEQ ID NO: 235133 - DNA, 25 bp, SARS Virus
gtgacggtacgattcacaaggtcaa

SEQ ID NO: 235134 - DNA, 25 bp, SARS Virus
tgacggtacgaatcacaaggtcaaa

SEQ ID NO: 235135 - DNA, 25 bp, SARS Virus
gacggtacgaattacaaggtcaaaa

SEQ ID NO: 235136 - DNA, 25 bp, SARS Virus
acggtacgaatctcaaggtcaaaac

SEQ ID NO: 235137 - DNA, 25 bp, SARS Virus
cggtacgaatcataaggtcaaaaca

SEQ ID NO: 235138 - DNA, 25 bp, SARS Virus
ggtacgaatcactaggtcaaaacaa

SEQ ID NO: 235139 - DNA, 25 bp, SARS Virus
gtacgaatcacatggtcaaaacaag

SEQ ID NO: 235140 - DNA, 25 bp, SARS Virus
tacgaatcacaatgtcaaaacaagt

SEQ ID NO: 235141 - DNA, 25 bp, SARS Virus
acgaatcacaagttcaaaacaagta

SEQ ID NO: 235142 - DNA, 25 bp, SARS Virus
cgaatcacaaggtcaaaacaagtat

SEQ ID NO: 235143 - DNA, 25 bp, SARS Virus
gaatcacaaggttaaaacaagtatt

SEQ ID NO: 235144 - DNA, 25 bp, SARS Virus
aatcacaaggtctaaacaagtatta

SEQ ID NO: 235145 - DNA, 25 bp, SARS Virus
atcacaaggtcataacaagtattag

SEQ ID NO: 235146 - DNA, 25 bp, SARS Virus
tcacaaggtcaatacaagtattaga

SEQ ID NO: 235147 - DNA, 25 bp, SARS Virus
cacaaggtcaaatcaagtattagaa

SEQ ID NO: 235148 - DNA, 25 bp, SARS Virus
acaaggtcaaaataagtattagaag

SEQ ID NO: 235149 - DNA, 25 bp, SARS Virus
caaggtcaaaactagtattagaagt

SEQ ID NO: 235150 - DNA, 25 bp, SARS Virus
aaggtcaaaacatgtattagaagtt

SEQ ID NO: 235151 - DNA, 25 bp, SARS Virus
aggtcaaaacaattattagaagtta

SEQ ID NO: 235152 - DNA, 25 bp, SARS Virus
ggtcaaaacaagtattagaagttac

SEQ ID NO: 235153 - DNA, 25 bp, SARS Virus
gtcaaaacaagttttagaagttacc

SEQ ID NO: 235154 - DNA, 25 bp, SARS Virus
tcaaaacaagtattagaagttaccc

SEQ ID NO: 235155 - DNA, 25 bp, SARS Virus
caaaacaagtattagaagttaccct

SEQ ID NO: 235156 - DNA, 25 bp, SARS Virus
aaaacaagtatttgaagttacccta

SEQ ID NO: 235157 - DNA, 25 bp, SARS Virus
aaacaagtattataagttaccctag

SEQ ID NO: 235158 - DNA, 25 bp, SARS Virus
aacaagtattagtagttaccctagt

SEQ ID NO: 235159 - DNA, 25 bp, SARS Virus
acaagtattagatgttaccctagtc

SEQ ID NO: 235160 - DNA, 25 bp, SARS Virus
caagtattagaatttaccctagtca

SEQ ID NO: 235161 - DNA, 25 bp, SARS Virus
aagtattagaagttaccctagtcac

SEQ ID NO: 235162 - DNA, 25 bp, SARS Virus
agtattagaagttaccctagtcacg

SEQ ID NO: 235163 - DNA, 25 bp, SARS Virus
gtattagaagtttccctagtcacgg

SEQ ID NO: 235164 - DNA, 25 bp, SARS Virus
tattagaagttatcctagtcacggt

SEQ ID NO: 235165 - DNA, 25 bp, SARS Virus
attagaagttactctagtcacggtt

SEQ ID NO: 235166 - DNA, 25 bp, SARS Virus
ttagaagttaccttagtcacggttc

SEQ ID NO: 235167 - DNA, 25 bp, SARS Virus
tagaagttaccctagtcacggttcg

SEQ ID NO: 235168 - DNA, 25 bp, SARS Virus
agaagttacccttgtcacggttcga

SEQ ID NO: 235169 - DNA, 25 bp, SARS Virus
gaagttaccctattcacggttcgag

SEQ ID NO: 235170 - DNA, 25 bp, SARS Virus
aagttaccctagtcacggttcgagc

SEQ ID NO: 235171 - DNA, 25 bp, SARS Virus
agttaccctagttacggttcgagca

SEQ ID NO: 235172 - DNA, 25 bp, SARS Virus
gttaccctagtctcggttcgagcag

SEQ ID NO: 235173 - DNA, 25 bp, SARS Virus
ttaccctagtcatggttcgagcagt

SEQ ID NO: 235174 - DNA, 25 bp, SARS Virus
taccctagtcactgttcgagcagtg

SEQ ID NO: 235175 - DNA, 25 bp, SARS Virus
accctagtcacgtttcgagcagtgg

SEQ ID NO: 235176 - DNA, 25 bp, SARS Virus
ccctagtcacggttcgagcagtgga

SEQ ID NO: 235177 - DNA, 25 bp, SARS Virus
cctagtcacggttcgagcagtggat

SEQ ID NO: 235178 - DNA, 25 bp, SARS Virus
ctagtcacggtttgagcagtggatt

SEQ ID NO: 235179 - DNA, 25 bp, SARS Virus
tagtcacggttctagcagtggattc

SEQ ID NO: 235180 - DNA, 25 bp, SARS Virus
agtcacggttcgtgcagtggattca

SEQ ID NO: 235181 - DNA, 25 bp, SARS Virus
gtcacggttcgatcagtggattcag

SEQ ID NO: 235182 - DNA, 25 bp, SARS Virus
tcacggttcgagtagtggattcagt

SEQ ID NO: 235183 - DNA, 25 bp, SARS Virus
cacggttcgagctgtggattcagta

SEQ ID NO: 235184 - DNA, 25 bp, SARS Virus
acggttcgagcattggattcagtat

SEQ ID NO: 235185 - DNA, 25 bp, SARS Virus
cggttcgagcagtggattcagtatt

SEQ ID NO: 235186 - DNA, 25 bp, SARS Virus
ggttcgagcagttgattcagtattc

SEQ ID NO: 235187 - DNA, 25 bp, SARS Virus
gttcgagcagtgtattcagtattct

SEQ ID NO: 235188 - DNA, 25 bp, SARS Virus
ttcgagcagtggtttcagtattctg

SEQ ID NO: 235189 - DNA, 25 bp, SARS Virus
tcgagcagtggattcagtattctga

SEQ ID NO: 235190 - DNA, 25 bp, SARS Virus
cgagcagtggattcagtattctgaa

SEQ ID NO: 235191 - DNA, 25 bp, SARS Virus
gagcagtggatttagtattctgaaa

SEQ ID NO: 235192 - DNA, 25 bp, SARS Virus
agcagtggattctgtattctgaaat

SEQ ID NO: 235193 - DNA, 25 bp, SARS Virus
gcagtggattcattattctgaaatc

SEQ ID NO: 235194 - DNA, 25 bp, SARS Virus
cagtggattcagtattctgaaatct

SEQ ID NO: 235195 - DNA, 25 bp, SARS Virus
agtggattcagttttctgaaatcta

SEQ ID NO: 235196 - DNA, 25 bp, SARS Virus
gtggattcagtattctgaaatctag

SEQ ID NO: 235197 - DNA, 25 bp, SARS Virus
tggattcagtattctgaaatctagc

SEQ ID NO: 235198 - DNA, 25 bp, SARS Virus
ggattcagtattttgaaatctagct

SEQ ID NO: 235199 - DNA, 25 bp, SARS Virus
gattcagtattctgaaatctagcta

SEQ ID NO: 235200 - DNA, 25 bp, SARS Virus
attcagtattcttaaatctagctac

SEQ ID NO: 235201 - DNA, 25 bp, SARS Virus
ttcagtattctgtaatctagctacg

SEQ ID NO: 235202 - DNA, 25 bp, SARS Virus
tcagtattctgatatctagctacgg

SEQ ID NO: 235203 - DNA, 25 bp, SARS Virus
cagtattctgaattctagctacggt

SEQ ID NO: 235204 - DNA, 25 bp, SARS Virus
agtattctgaaatctagctacggta

SEQ ID NO: 235205 - DNA, 25 bp, SARS Virus
gtattctgaaatttagctacggtat

SEQ ID NO: 235206 - DNA, 25 bp, SARS Virus
tattctgaaatctagctacggtatc

SEQ ID NO: 235207 - DNA, 25 bp, SARS Virus
attctgaaatcttgctacggtatcg

SEQ ID NO: 235208 - DNA, 25 bp, SARS Virus
ttctgaaatctatctacggtatcga

SEQ ID NO: 235209 - DNA, 25 bp, SARS Virus
tctgaaatctagttacggtatcgat

SEQ ID NO: 235210 - DNA, 25 bp, SARS Virus
ctgaaatctagctacggtatcgata

SEQ ID NO: 235211 - DNA, 25 bp, SARS Virus
tgaaatctagcttcggtatcgatac

SEQ ID NO: 235212 - DNA, 25 bp, SARS Virus
gaaatctagctatggtatcgatact

SEQ ID NO: 235213 - DNA, 25 bp, SARS Virus
aaatctagctactgtatcgatactg

SEQ ID NO: 235214 - DNA, 25 bp, SARS Virus
aatctagctacgttatcgatactgg

SEQ ID NO: 235215 - DNA, 25 bp, SARS Virus
atctagctacggtatcgatactggt

SEQ ID NO: 235216 - DNA, 25 bp, SARS Virus
tctagctacggtttcgatactggtg

SEQ ID NO: 235217 - DNA, 25 bp, SARS Virus
ctagctacggtatcgatactggtgg

SEQ ID NO: 235218 - DNA, 25 bp, SARS Virus
tagctacggtattgatactggtggc

SEQ ID NO: 235219 - DNA, 25 bp, SARS Virus
agctacggtatctatactggtggcc

SEQ ID NO: 235220 - DNA, 25 bp, SARS Virus
gctacggtatcgttactggtggccg

SEQ ID NO: 235221 - DNA, 25 bp, SARS Virus
ctacggtatcgatactggtggccga

SEQ ID NO: 235222 - DNA, 25 bp, SARS Virus
tacggtatcgattctggtggccgag

SEQ ID NO: 235223 - DNA, 25 bp, SARS Virus
acggtatcgatattggtggccgagg

SEQ ID NO: 235224 - DNA, 25 bp, SARS Virus
cggtatcgatactggtggccgaggg

SEQ ID NO: 235225 - DNA, 25 bp, SARS Virus
ggtatcgatacttgtggccgaggga

SEQ ID NO: 235226 - DNA, 25 bp, SARS Virus
gtatcgatactgttggccgagggaa

SEQ ID NO: 235227 - DNA, 25 bp, SARS Virus
tatcgatactggtggccgagggaat

SEQ ID NO: 235228 - DNA, 25 bp, SARS Virus
atcgatactggttgccgagggaata

SEQ ID NO: 235229 - DNA, 25 bp, SARS Virus
tcgatactggtgtccgagggaataa

SEQ ID NO: 235230 - DNA, 25 bp, SARS Virus
cgatactggtggtcgagggaataat

SEQ ID NO: 235231 - DNA, 25 bp, SARS Virus
gatactggtggctgagggaataatg

SEQ ID NO: 235232 - DNA, 25 bp, SARS Virus
atactggtggcctagggaataatgg

SEQ ID NO: 235233 - DNA, 25 bp, SARS Virus
tactggtggccgtgggaataatggc

SEQ ID NO: 235234 - DNA, 25 bp, SARS Virus
actggtggccgatggaataatggca

SEQ ID NO: 235235 - DNA, 25 bp, SARS Virus
ctggtggccgagtgaataatggcaa

SEQ ID NO: 235236 - DNA, 25 bp, SARS Virus
tggtggccgaggtaataatggcaag

SEQ ID NO: 235237 - DNA, 25 bp, SARS Virus
ggtggccgagggtataatggcaaga

SEQ ID NO: 235238 - DNA, 25 bp, SARS Virus
gtggccgagggattaatggcaagaa

SEQ ID NO: 235239 - DNA, 25 bp, SARS Virus
tggccgagggaataatggcaagaat

SEQ ID NO: 235240 - DNA, 25 bp, SARS Virus
ggccgagggaattatggcaagaatg

SEQ ID NO: 235241 - DNA, 25 bp, SARS Virus
gccgagggaatattggcaagaatgc

SEQ ID NO: 235242 - DNA, 25 bp, SARS Virus
ccgagggaataatggcaagaatgct

SEQ ID NO: 235243 - DNA, 25 bp, SARS Virus
cgagggaataattgcaagaatgctt

SEQ ID NO: 235244 - DNA, 25 bp, SARS Virus
gagggaataatgtcaagaatgcttc

SEQ ID NO: 235245 - DNA, 25 bp, SARS Virus
agggaataatggtaagaatgcttct

SEQ ID NO: 235246 - DNA, 25 bp, SARS Virus
gggaataatggctagaatgcttctt

SEQ ID NO: 235247 - DNA, 25 bp, SARS Virus
ggaataatggcatgaatgcttcttc

SEQ ID NO: 235248 - DNA, 25 bp, SARS Virus
gaataatggcaataatgcttcttct

SEQ ID NO: 235249 - DNA, 25 bp, SARS Virus
aataatggcaagaatgcttcttctt

SEQ ID NO: 235250 - DNA, 25 bp, SARS Virus
ataatggcaagaatgcttcttcttg

SEQ ID NO: 235251 - DNA, 25 bp, SARS Virus
taatggcaagaaagcttcttcttgt

SEQ ID NO: 235252 - DNA, 25 bp, SARS Virus
aatggcaagaatacttcttcttgta

SEQ ID NO: 235253 - DNA, 25 bp, SARS Virus
atggcaagaatgattcttcttgtaa

SEQ ID NO: 235254 - DNA, 25 bp, SARS Virus
tggcaagaatgcatcttcttgtaac

SEQ ID NO: 235255 - DNA, 25 bp, SARS Virus
ggcaagaatgctacttcttgtaacg

SEQ ID NO: 235256 - DNA, 25 bp, SARS Virus
gcaagaatgcttattcttgtaacgc

SEQ ID NO: 235257 - DNA, 25 bp, SARS Virus
caagaatgcttcatcttgtaacgcc

SEQ ID NO: 235258 - DNA, 25 bp, SARS Virus
aagaatgcttctacttgtaacgcca

SEQ ID NO: 235259 - DNA, 25 bp, SARS Virus
agaatgcttcttattgtaacgccat

SEQ ID NO: 235260 - DNA, 25 bp, SARS Virus
gaatgcttcttcatgtaacgccata

SEQ ID NO: 235261 - DNA, 25 bp, SARS Virus
aatgcttcttctagtaacgccatac

SEQ ID NO: 235262 - DNA, 25 bp, SARS Virus
atgcttcttcttataacgccatacg

SEQ ID NO: 235263 - DNA, 25 bp, SARS Virus
tgcttcttcttgaaacgccatacgt

SEQ ID NO: 235264 - DNA, 25 bp, SARS Virus
gcttcttcttgtaacgccatacgtt

SEQ ID NO: 235265 - DNA, 25 bp, SARS Virus
cttcttcttgtaacgccatacgtta

SEQ ID NO: 235266 - DNA, 25 bp, SARS Virus
ttcttcttgtaaagccatacgttaa

SEQ ID NO: 235267 - DNA, 25 bp, SARS Virus
tcttcttgtaacaccatacgttaac

SEQ ID NO: 235268 - DNA, 25 bp, SARS Virus
cttcttgtaacgacatacgttaacc

SEQ ID NO: 235269 - DNA, 25 bp, SARS Virus
ttcttgtaacgcaatacgttaaccc

SEQ ID NO: 235270 - DNA, 25 bp, SARS Virus
tcttgtaacgccatacgttaacccc

SEQ ID NO: 235271 - DNA, 25 bp, SARS Virus
cttgtaacgccaaacgttaacccca

SEQ ID NO: 235272 - DNA, 25 bp, SARS Virus
ttgtaacgccatacgttaaccccaa

SEQ ID NO: 235273 - DNA, 25 bp, SARS Virus
tgtaacgccataagttaaccccaaa

SEQ ID NO: 235274 - DNA, 25 bp, SARS Virus
gtaacgccatacattaaccccaaag

SEQ ID NO: 235275 - DNA, 25 bp, SARS Virus
taacgccatacgataaccccaaagc

SEQ ID NO: 235276 - DNA, 25 bp, SARS Virus
aacgccatacgtaaaccccaaagcg

SEQ ID NO: 235277 - DNA, 25 bp, SARS Virus
acgccatacgttaaccccaaagcgg

SEQ ID NO: 235278 - DNA, 25 bp, SARS Virus
cgccatacgttaaccccaaagcggg

SEQ ID NO: 235279 - DNA, 25 bp, SARS Virus
gccatacgttaaacccaaagcgggt

SEQ ID NO: 235280 - DNA, 25 bp, SARS Virus
ccatacgttaacaccaaagcgggtg

SEQ ID NO: 235281 - DNA, 25 bp, SARS Virus
catacgttaaccacaaagcgggtgt

SEQ ID NO: 235282 - DNA, 25 bp, SARS Virus
atacgttaacccaaaagcgggtgta

SEQ ID NO: 235283 - DNA, 25 bp, SARS Virus
tacgttaaccccaaagcgggtgtac

SEQ ID NO: 235284 - DNA, 25 bp, SARS Virus
acgttaaccccaaagcgggtgtaca

SEQ ID NO: 235285 - DNA, 25 bp, SARS Virus
cgttaaccccaaagcgggtgtacac

SEQ ID NO: 235286 - DNA, 25 bp, SARS Virus
gttaaccccaaaacgggtgtacacc

SEQ ID NO: 235287 - DNA, 25 bp, SARS Virus
ttaaccccaaagagggtgtacaccg

SEQ ID NO: 235288 - DNA, 25 bp, SARS Virus
taaccccaaagcaggtgtacaccgt

SEQ ID NO: 235289 - DNA, 25 bp, SARS Virus
aaccccaaagcgagtgtacaccgtg

SEQ ID NO: 235290 - DNA, 25 bp, SARS Virus
accccaaagcggatgtacaccgtgc

SEQ ID NO: 235291 - DNA, 25 bp, SARS Virus
ccccaaagcgggagtacaccgtgct

SEQ ID NO: 235292 - DNA, 25 bp, SARS Virus
cccaaagcgggtatacaccgtgctc

SEQ ID NO: 235293 - DNA, 25 bp, SARS Virus
ccaaagcgggtgaacaccgtgctca

SEQ ID NO: 235294 - DNA, 25 bp, SARS Virus
caaagcgggtgtacaccgtgctcat

SEQ ID NO: 235295 - DNA, 25 bp, SARS Virus
aaagcgggtgtaaaccgtgctcatg

SEQ ID NO: 235296 - DNA, 25 bp, SARS Virus
aagcgggtgtacaccgtgctcatga

SEQ ID NO: 235297 - DNA, 25 bp, SARS Virus
agcgggtgtacaacgtgctcatgag

SEQ ID NO: 235298 - DNA, 25 bp, SARS Virus
gcgggtgtacacagtgctcatgagg

SEQ ID NO: 235299 - DNA, 25 bp, SARS Virus
cgggtgtacaccatgctcatgaggg

SEQ ID NO: 235300 - DNA, 25 bp, SARS Virus
gggtgtacaccgagctcatgagggt

SEQ ID NO: 235301 - DNA, 25 bp, SARS Virus
ggtgtacaccgtactcatgagggtc

SEQ ID NO: 235302 - DNA, 25 bp, SARS Virus
gtgtacaccgtgatcatgagggtca

SEQ ID NO: 235303 - DNA, 25 bp, SARS Virus
tgtacaccgtgcacatgagggtcac

SEQ ID NO: 235304 - DNA, 25 bp, SARS Virus
gtacaccgtgctaatgagggtcaca

SEQ ID NO: 235305 - DNA, 25 bp, SARS Virus
tacaccgtgctcatgagggtcacaa

SEQ ID NO: 235306 - DNA, 25 bp, SARS Virus
acaccgtgctcaagagggtcacaat

SEQ ID NO: 235307 - DNA, 25 bp, SARS Virus
caccgtgctcataagggtcacaata

SEQ ID NO: 235308 - DNA, 25 bp, SARS Virus
accgtgctcatgagggtcacaatat

SEQ ID NO: 235309 - DNA, 25 bp, SARS Virus
ccgtgctcatgaaggtcacaatatg

SEQ ID NO: 235310 - DNA, 25 bp, SARS Virus
cgtgctcatgagagtcacaatatgg

SEQ ID NO: 235311 - DNA, 25 bp, SARS Virus
gtgctcatgaggatcacaatatggc

SEQ ID NO: 235312 - DNA, 25 bp, SARS Virus
tgctcatgagggacacaatatggcg

SEQ ID NO: 235313 - DNA, 25 bp, SARS Virus
gctcatgagggtaacaatatggcga

SEQ ID NO: 235314 - DNA, 25 bp, SARS Virus
ctcatgagggtcacaatatggcgat

SEQ ID NO: 235315 - DNA, 25 bp, SARS Virus
tcatgagggtcaaaatatggcgatg

SEQ ID NO: 235316 - DNA, 25 bp, SARS Virus
catgagggtcacaatatggcgatgc

SEQ ID NO: 235317 - DNA, 25 bp, SARS Virus
atgagggtcacaatatggcgatgct

SEQ ID NO: 235318 - DNA, 25 bp, SARS Virus
tgagggtcacaaaatggcgatgctg

SEQ ID NO: 235319 - DNA, 25 bp, SARS Virus
gagggtcacaatatggcgatgctgg

SEQ ID NO: 235320 - DNA, 25 bp, SARS Virus
agggtcacaataaggcgatgctggc

SEQ ID NO: 235321 - DNA, 25 bp, SARS Virus
gggtcacaatatagcgatgctggca

SEQ ID NO: 235322 - DNA, 25 bp, SARS Virus
ggtcacaatatgacgatgctggcat

SEQ ID NO: 235323 - DNA, 25 bp, SARS Virus
gtcacaatatggagatgctggcatg

SEQ ID NO: 235324 - DNA, 25 bp, SARS Virus
tcacaatatggcaatgctggcatga

SEQ ID NO: 235325 - DNA, 25 bp, SARS Virus
cacaatatggcgatgctggcatgac

SEQ ID NO: 235326 - DNA, 25 bp, SARS Virus
acaatatggcgaagctggcatgact

SEQ ID NO: 235327 - DNA, 25 bp, SARS Virus
caatatggcgatactggcatgactt

SEQ ID NO: 235328 - DNA, 25 bp, SARS Virus
aatatggcgatgatggcatgactta

SEQ ID NO: 235329 - DNA, 25 bp, SARS Virus
atatggcgatgcaggcatgacttac

SEQ ID NO: 235330 - DNA, 25 bp, SARS Virus
tatggcgatgctagcatgacttacg

SEQ ID NO: 235331 - DNA, 25 bp, SARS Virus
atggcgatgctgacatgacttacgg

SEQ ID NO: 235332 - DNA, 25 bp, SARS Virus
tggcgatgctggaatgacttacggc

SEQ ID NO: 235333 - DNA, 25 bp, SARS Virus
ggcgatgctggcatgacttacggca

SEQ ID NO: 235334 - DNA, 25 bp, SARS Virus
gcgatgctggcaagacttacggcag

SEQ ID NO: 235335 - DNA, 25 bp, SARS Virus
cgatgctggcataacttacggcagg

SEQ ID NO: 235336 - DNA, 25 bp, SARS Virus
gatgctggcatgacttacggcaggt

SEQ ID NO: 235337 - DNA, 25 bp, SARS Virus
atgctggcatgaattacggcaggta

SEQ ID NO: 235338 - DNA, 25 bp, SARS Virus
tgctggcatgacatacggcaggtaa

SEQ ID NO: 235339 - DNA, 25 bp, SARS Virus
gctggcatgactaacggcaggtaaa

SEQ ID NO: 235340 - DNA, 25 bp, SARS Virus
ctggcatgacttacggcaggtaaag

SEQ ID NO: 235341 - DNA, 25 bp, SARS Virus
tggcatgacttaaggcaggtaaaga

SEQ ID NO: 235342 - DNA, 25 bp, SARS Virus
ggcatgacttacagcaggtaaagac

SEQ ID NO: 235343 - DNA, 25 bp, SARS Virus
gcatgacttacgacaggtaaagacg

SEQ ID NO: 235344 - DNA, 25 bp, SARS Virus
catgacttacggaaggtaaagacgt

SEQ ID NO: 235345 - DNA, 25 bp, SARS Virus
atgacttacggcaggtaaagacgtt

SEQ ID NO: 235346 - DNA, 25 bp, SARS Virus
tgacttacggcaagtaaagacgttg

SEQ ID NO: 235347 - DNA, 25 bp, SARS Virus
gacttacggcagataaagacgttgg

SEQ ID NO: 235348 - DNA, 25 bp, SARS Virus
acttacggcaggaaaagacgttggt

SEQ ID NO: 235349 - DNA, 25 bp, SARS Virus
cttacggcaggtaaagacgttggtc

SEQ ID NO: 235350 - DNA, 25 bp, SARS Virus
ttacggcaggtaaagacgttggtcg

SEQ ID NO: 235351 - DNA, 25 bp, SARS Virus
tacggcaggtaaagacgttggtcga

SEQ ID NO: 235352 - DNA, 25 bp, SARS Virus
acggcaggtaaaaacgttggtcgag

SEQ ID NO: 235353 - DNA, 25 bp, SARS Virus
cggcaggtaaagacgttggtcgagt

SEQ ID NO: 235354 - DNA, 25 bp, SARS Virus
ggcaggtaaagaagttggtcgagtt

SEQ ID NO: 235355 - DNA, 25 bp, SARS Virus
gcaggtaaagacattggtcgagttg

SEQ ID NO: 235356 - DNA, 25 bp, SARS Virus
caggtaaagacgatggtcgagttgc

SEQ ID NO: 235357 - DNA, 25 bp, SARS Virus
aggtaaagacgtaggtcgagttgct

SEQ ID NO: 235358 - DNA, 25 bp, SARS Virus
ggtaaagacgttagtcgagttgctg

SEQ ID NO: 235359 - DNA, 25 bp, SARS Virus
gtaaagacgttgatcgagttgctgg

SEQ ID NO: 235360 - DNA, 25 bp, SARS Virus
taaagacgttggacgagttgctgga

SEQ ID NO: 235361 - DNA, 25 bp, SARS Virus
aaagacgttggtagagttgctggaa

SEQ ID NO: 235362 - DNA, 25 bp, SARS Virus
aagacgttggtcaagttgctggaac

SEQ ID NO: 235363 - DNA, 25 bp, SARS Virus
agacgttggtcgagttgctggaaca

SEQ ID NO: 235364 - DNA, 25 bp, SARS Virus
gacgttggtcgaattgctggaacac

SEQ ID NO: 235365 - DNA, 25 bp, SARS Virus
acgttggtcgagatgctggaacacc

SEQ ID NO: 235366 - DNA, 25 bp, SARS Virus
cgttggtcgagtagctggaacaccg

SEQ ID NO: 235367 - DNA, 25 bp, SARS Virus
gttggtcgagttactggaacaccgg

SEQ ID NO: 235368 - DNA, 25 bp, SARS Virus
ttggtcgagttgatggaacaccggc

SEQ ID NO: 235369 - DNA, 25 bp, SARS Virus
tggtcgagttgcaggaacaccggca

SEQ ID NO: 235370 - DNA, 25 bp, SARS Virus
ggtcgagttgctagaacaccggcac

SEQ ID NO: 235371 - DNA, 25 bp, SARS Virus
gtcgagttgctgaaacaccggcact

SEQ ID NO: 235372 - DNA, 25 bp, SARS Virus
tcgagttgctggaacaccggcacta

SEQ ID NO: 235373 - DNA, 25 bp, SARS Virus
cgagttgctggaacaccggcactaa

SEQ ID NO: 235374 - DNA, 25 bp, SARS Virus
gagttgctggaaaaccggcactaac

SEQ ID NO: 235375 - DNA, 25 bp, SARS Virus
agttgctggaacaccggcactaacc

SEQ ID NO: 235376 - DNA, 25 bp, SARS Virus
gttgctggaacaacggcactaacca

SEQ ID NO: 235377 - DNA, 25 bp, SARS Virus
ttgctggaacacaggcactaaccac

SEQ ID NO: 235378 - DNA, 25 bp, SARS Virus
tgctggaacaccagcactaaccacg

SEQ ID NO: 235379 - DNA, 25 bp, SARS Virus
gctggaacaccgacactaaccacga

SEQ ID NO: 235380 - DNA, 25 bp, SARS Virus
ctggaacaccggaactaaccacgaa

SEQ ID NO: 235381 - DNA, 25 bp, SARS Virus
tggaacaccggcactaaccacgaat

SEQ ID NO: 235382 - DNA, 25 bp, SARS Virus
ggaacaccggcaataaccacgaatt

SEQ ID NO: 235383 - DNA, 25 bp, SARS Virus
gaacaccggcacaaaccacgaattc

SEQ ID NO: 235384 - DNA, 25 bp, SARS Virus
aacaccggcactaaccacgaattcc

SEQ ID NO: 235385 - DNA, 25 bp, SARS Virus
acaccggcactaaccacgaattccg

SEQ ID NO: 235386 - DNA, 25 bp, SARS Virus
caccggcactaaacacgaattccgt

SEQ ID NO: 235387 - DNA, 25 bp, SARS Virus
accggcactaacaacgaattccgta

SEQ ID NO: 235388 - DNA, 25 bp, SARS Virus
ccggcactaaccacgaattccgtag

SEQ ID NO: 235389 - DNA, 25 bp, SARS Virus
cggcactaaccaagaattccgtagt

SEQ ID NO: 235390 - DNA, 25 bp, SARS Virus
ggcactaaccacaaattccgtagtc

SEQ ID NO: 235391 - DNA, 25 bp, SARS Virus
gcactaaccacgaattccgtagtct

SEQ ID NO: 235392 - DNA, 25 bp, SARS Virus
cactaaccacgaattccgtagtctt

SEQ ID NO: 235393 - DNA, 25 bp, SARS Virus
actaaccacgaaatccgtagtcttg

SEQ ID NO: 235394 - DNA, 25 bp, SARS Virus
ctaaccacgaataccgtagtcttgc

SEQ ID NO: 235395 - DNA, 25 bp, SARS Virus
taaccacgaattacgtagtcttgca

SEQ ID NO: 235396 - DNA, 25 bp, SARS Virus
aaccacgaattcagtagtcttgcaa

SEQ ID NO: 235397 - DNA, 25 bp, SARS Virus
accacgaattccatagtcttgcaaa

SEQ ID NO: 235398 - DNA, 25 bp, SARS Virus
ccacgaattccgaagtcttgcaaat

SEQ ID NO: 235399 - DNA, 25 bp, SARS Virus
cacgaattccgtagtcttgcaaatt

SEQ ID NO: 235400 - DNA, 25 bp, SARS Virus
acgaattccgtaatcttgcaaatta

SEQ ID NO: 235401 - DNA, 25 bp, SARS Virus
cgaattccgtagacttgcaaattac

SEQ ID NO: 235402 - DNA, 25 bp, SARS Virus
gaattccgtagtattgcaaattact

SEQ ID NO: 235403 - DNA, 25 bp, SARS Virus
aattccgtagtcatgcaaattactt

SEQ ID NO: 235404 - DNA, 25 bp, SARS Virus
attccgtagtctagcaaattacttg

SEQ ID NO: 235405 - DNA, 25 bp, SARS Virus
ttccgtagtcttacaaattacttgt

SEQ ID NO: 235406 - DNA, 25 bp, SARS Virus
tccgtagtcttgaaaattacttgtg

SEQ ID NO: 235407 - DNA, 25 bp, SARS Virus
ccgtagtcttgcaaattacttgtgt

SEQ ID NO: 235408 - DNA, 25 bp, SARS Virus
cgtagtcttgcaaattacttgtgta

SEQ ID NO: 235409 - DNA, 25 bp, SARS Virus
gtagtcttgcaaattacttgtgtat

SEQ ID NO: 235410 - DNA, 25 bp, SARS Virus
tagtcttgcaaaatacttgtgtatc

SEQ ID NO: 235411 - DNA, 25 bp, SARS Virus
agtcttgcaaataacttgtgtatcc

SEQ ID NO: 235412 - DNA, 25 bp, SARS Virus
gtcttgcaaattacttgtgtatccc

SEQ ID NO: 235413 - DNA, 25 bp, SARS Virus
tcttgcaaattaattgtgtatcccg

SEQ ID NO: 235414 - DNA, 25 bp, SARS Virus
cttgcaaattacatgtgtatcccga

SEQ ID NO: 235415 - DNA, 25 bp, SARS Virus
ttgcaaattactagtgtatcccgac

SEQ ID NO: 235416 - DNA, 25 bp, SARS Virus
tgcaaattacttatgtatcccgaca

SEQ ID NO: 235417 - DNA, 25 bp, SARS Virus
gcaaattacttgagtatcccgacaa

SEQ ID NO: 235418 - DNA, 25 bp, SARS Virus
caaattacttgtatatcccgacaag

SEQ ID NO: 235419 - DNA, 25 bp, SARS Virus
aaattacttgtgaatcccgacaagt

SEQ ID NO: 235420 - DNA, 25 bp, SARS Virus
aattacttgtgtatcccgacaagtt

SEQ ID NO: 235421 - DNA, 25 bp, SARS Virus
attacttgtgtaacccgacaagttc

SEQ ID NO: 235422 - DNA, 25 bp, SARS Virus
ttacttgtgtataccgacaagttcg

SEQ ID NO: 235423 - DNA, 25 bp, SARS Virus
tacttgtgtatcacgacaagttcga

SEQ ID NO: 235424 - DNA, 25 bp, SARS Virus
acttgtgtatccagacaagttcgac

SEQ ID NO: 235425 - DNA, 25 bp, SARS Virus
cttgtgtatcccaacaagttcgacc

SEQ ID NO: 235426 - DNA, 25 bp, SARS Virus
ttgtgtatcccgacaagttcgaccc

SEQ ID NO: 235427 - DNA, 25 bp, SARS Virus
tgtgtatcccgaaaagttcgacccc

SEQ ID NO: 235428 - DNA, 25 bp, SARS Virus
gtgtatcccgacaagttcgaccccg

SEQ ID NO: 235429 - DNA, 25 bp, SARS Virus
tgtatcccgacaagttcgaccccgt

SEQ ID NO: 235430 - DNA, 25 bp, SARS Virus
gtatcccgacaaattcgaccccgtc

SEQ ID NO: 235431 - DNA, 25 bp, SARS Virus
tatcccgacaagatcgaccccgtca

SEQ ID NO: 235432 - DNA, 25 bp, SARS Virus
atcccgacaagtacgaccccgtcat

SEQ ID NO: 235433 - DNA, 25 bp, SARS Virus
tcccgacaagttagaccccgtcatg

SEQ ID NO: 235434 - DNA, 25 bp, SARS Virus
cccgacaagttcaaccccgtcatgc

SEQ ID NO: 235435 - DNA, 25 bp, SARS Virus
ccgacaagttcgaccccgtcatgcg

SEQ ID NO: 235436 - DNA, 25 bp, SARS Virus
cgacaagttcgaacccgtcatgcgg

SEQ ID NO: 235437 - DNA, 25 bp, SARS Virus
gacaagttcgacaccgtcatgcgga

SEQ ID NO: 235438 - DNA, 25 bp, SARS Virus
acaagttcgaccacgtcatgcggaa

SEQ ID NO: 235439 - DNA, 25 bp, SARS Virus
caagttcgacccagtcatgcggaaa

SEQ ID NO: 235440 - DNA, 25 bp, SARS Virus
aagttcgaccccatcatgcggaaaa

SEQ ID NO: 235441 - DNA, 25 bp, SARS Virus
agttcgaccccgacatgcggaaaaa

SEQ ID NO: 235442 - DNA, 25 bp, SARS Virus
gttcgaccccgtaatgcggaaaaag

SEQ ID NO: 235443 - DNA, 25 bp, SARS Virus
ttcgaccccgtcatgcggaaaaagg

SEQ ID NO: 235444 - DNA, 25 bp, SARS Virus
tcgaccccgtcaagcggaaaaaggt

SEQ ID NO: 235445 - DNA, 25 bp, SARS Virus
cgaccccgtcatacggaaaaaggtc

SEQ ID NO: 235446 - DNA, 25 bp, SARS Virus
gaccccgtcatgaggaaaaaggtcg

SEQ ID NO: 235447 - DNA, 25 bp, SARS Virus
accccgtcatgcagaaaaaggtcga

SEQ ID NO: 235448 - DNA, 25 bp, SARS Virus
ccccgtcatgcgaaaaaaggtcgag

SEQ ID NO: 235449 - DNA, 25 bp, SARS Virus
cccgtcatgcggaaaaaggtcgaga

SEQ ID NO: 235450 - DNA, 25 bp, SARS Virus
ccgtcatgcggaaaaaggtcgagat

SEQ ID NO: 235451 - DNA, 25 bp, SARS Virus
cgtcatgcggaaaaaggtcgagatg

SEQ ID NO: 235452 - DNA, 25 bp, SARS Virus
gtcatgcggaaaaaggtcgagatga

SEQ ID NO: 235453 - DNA, 25 bp, SARS Virus
tcatgcggaaaaaggtcgagatgat

SEQ ID NO: 235454 - DNA, 25 bp, SARS Virus
catgcggaaaaaagtcgagatgatc

SEQ ID NO: 235455 - DNA, 25 bp, SARS Virus
atgcggaaaaagatcgagatgatct

SEQ ID NO: 235456 - DNA, 25 bp, SARS Virus
tgcggaaaaaggacgagatgatctg

SEQ ID NO: 235457 - DNA, 25 bp, SARS Virus
gcggaaaaaggtagagatgatctgg

SEQ ID NO: 235458 - DNA, 25 bp, SARS Virus
cggaaaaaggtcaagatgatctggt

SEQ ID NO: 235459 - DNA, 25 bp, SARS Virus
ggaaaaaggtcgagatgatctggtg

SEQ ID NO: 235460 - DNA, 25 bp, SARS Virus
gaaaaaggtcgaaatgatctggtgt

SEQ ID NO: 235461 - DNA, 25 bp, SARS Virus
aaaaaggtcgagatgatctggtgtt

SEQ ID NO: 235462 - DNA, 25 bp, SARS Virus
aaaaggtcgagaagatctggtgttc

SEQ ID NO: 235463 - DNA, 25 bp, SARS Virus
aaaggtcgagataatctggtgttca

SEQ ID NO: 235464 - DNA, 25 bp, SARS Virus
aaggtcgagatgatctggtgttcac

SEQ ID NO: 235465 - DNA, 25 bp, SARS Virus
aggtcgagatgaactggtgttcacg

SEQ ID NO: 235466 - DNA, 25 bp, SARS Virus
ggtcgagatgatatggtgttcacgg

SEQ ID NO: 235467 - DNA, 25 bp, SARS Virus
gtcgagatgatcaggtgttcacggt

SEQ ID NO: 235468 - DNA, 25 bp, SARS Virus
tcgagatgatctagtgttcacggta

SEQ ID NO: 235469 - DNA, 25 bp, SARS Virus
cgagatgatctgatgttcacggtaa

SEQ ID NO: 235470 - DNA, 25 bp, SARS Virus
gagatgatctggagttcacggtaaa

SEQ ID NO: 235471 - DNA, 25 bp, SARS Virus
agatgatctggtattcacggtaaaa

SEQ ID NO: 235472 - DNA, 25 bp, SARS Virus
gatgatctggtgatcacggtaaaaa

SEQ ID NO: 235473 - DNA, 25 bp, SARS Virus
atgatctggtgtacacggtaaaaac

SEQ ID NO: 235474 - DNA, 25 bp, SARS Virus
tgatctggtgttaacggtaaaaact

SEQ ID NO: 235475 - DNA, 25 bp, SARS Virus
gatctggtgttcacggtaaaaactc

SEQ ID NO: 235476 - DNA, 25 bp, SARS Virus
atctggtgttcaaggtaaaaactcc

SEQ ID NO: 235477 - DNA, 25 bp, SARS Virus
tctggtgttcacagtaaaaactcca

SEQ ID NO: 235478 - DNA, 25 bp, SARS Virus
ctggtgttcacgataaaaactccac

SEQ ID NO: 235479 - DNA, 25 bp, SARS Virus
tggtgttcacggaaaaaactccaca

SEQ ID NO: 235480 - DNA, 25 bp, SARS Virus
ggtgttcacggtaaaaactccacaa

SEQ ID NO: 235481 - DNA, 25 bp, SARS Virus
gtgttcacggtaaaaactccacaag

SEQ ID NO: 235482 - DNA, 25 bp, SARS Virus
tgttcacggtaaaaactccacaagt

SEQ ID NO: 235483 - DNA, 25 bp, SARS Virus
gttcacggtaaaaactccacaagtg

SEQ ID NO: 235484 - DNA, 25 bp, SARS Virus
ttcacggtaaaaactccacaagtgc

SEQ ID NO: 235485 - DNA, 25 bp, SARS Virus
tcacggtaaaaaatccacaagtgca

SEQ ID NO: 235486 - DNA, 25 bp, SARS Virus
cacggtaaaaacaccacaagtgcac

SEQ ID NO: 235487 - DNA, 25 bp, SARS Virus
acggtaaaaactacacaagtgcacg

SEQ ID NO: 235488 - DNA, 25 bp, SARS Virus
cggtaaaaactcaacaagtgcacgg

SEQ ID NO: 235489 - DNA, 25 bp, SARS Virus
ggtaaaaactccacaagtgcacgga

SEQ ID NO: 235490 - DNA, 25 bp, SARS Virus
gtaaaaactccaaaagtgcacggag

SEQ ID NO: 235491 - DNA, 25 bp, SARS Virus
taaaaactccacaagtgcacggagg

SEQ ID NO: 235492 - DNA, 25 bp, SARS Virus
aaaaactccacaagtgcacggaggc

SEQ ID NO: 235493 - DNA, 25 bp, SARS Virus
aaaactccacaaatgcacggaggct

SEQ ID NO: 235494 - DNA, 25 bp, SARS Virus
aaactccacaagagcacggaggcta

SEQ ID NO: 235495 - DNA, 25 bp, SARS Virus
aactccacaagtacacggaggctat

SEQ ID NO: 235496 - DNA, 25 bp, SARS Virus
actccacaagtgaacggaggctatc

SEQ ID NO: 235497 - DNA, 25 bp, SARS Virus
ctccacaagtgcacggaggctatcc

SEQ ID NO: 235498 - DNA, 25 bp, SARS Virus
tccacaagtgcaaggaggctatccc

SEQ ID NO: 235499 - DNA, 25 bp, SARS Virus
ccacaagtgcacagaggctatcccg

SEQ ID NO: 235500 - DNA, 25 bp, SARS Virus
cacaagtgcacgaaggctatcccgg

SEQ ID NO: 235501 - DNA, 25 bp, SARS Virus
acaagtgcacggaggctatcccgga

SEQ ID NO: 235502 - DNA, 25 bp, SARS Virus
caagtgcacggaagctatcccggag

SEQ ID NO: 235503 - DNA, 25 bp, SARS Virus
aagtgcacggagactatcccggaga

SEQ ID NO: 235504 - DNA, 25 bp, SARS Virus
agtgcacggaggatatcccggagaa

SEQ ID NO: 235505 - DNA, 25 bp, SARS Virus
gtgcacggaggcaatcccggagaag

SEQ ID NO: 235506 - DNA, 25 bp, SARS Virus
tgcacggaggctatcccggagaagg

SEQ ID NO: 235507 - DNA, 25 bp, SARS Virus
gcacggaggctaacccggagaaggt

SEQ ID NO: 235508 - DNA, 25 bp, SARS Virus
cacggaggctataccggagaaggtg

SEQ ID NO: 235509 - DNA, 25 bp, SARS Virus
acggaggctatcacggagaaggtgt

SEQ ID NO: 235510 - DNA, 25 bp, SARS Virus
cggaggctatccaggagaaggtgtc

SEQ ID NO: 235511 - DNA, 25 bp, SARS Virus
ggaggctatcccagagaaggtgtct

SEQ ID NO: 235512 - DNA, 25 bp, SARS Virus
gaggctatcccgaagaaggtgtctc

SEQ ID NO: 235513 - DNA, 25 bp, SARS Virus
aggctatcccggagaaggtgtctca

SEQ ID NO: 235514 - DNA, 25 bp, SARS Virus
ggctatcccggaaaaggtgtctcag

SEQ ID NO: 235515 - DNA, 25 bp, SARS Virus
gctatcccggagaaggtgtctcagg

SEQ ID NO: 235516 - DNA, 25 bp, SARS Virus
ctatcccggagaaggtgtctcaggg

SEQ ID NO: 235517 - DNA, 25 bp, SARS Virus
tatcccggagaaagtgtctcagggg

SEQ ID NO: 235518 - DNA, 25 bp, SARS Virus
atcccggagaagatgtctcaggggc

SEQ ID NO: 235519 - DNA, 25 bp, SARS Virus
tcccggagaaggagtctcaggggct

SEQ ID NO: 235520 - DNA, 25 bp, SARS Virus
cccggagaaggtatctcaggggctt

SEQ ID NO: 235521 - DNA, 25 bp, SARS Virus
ccggagaaggtgactcaggggcttc

SEQ ID NO: 235522 - DNA, 25 bp, SARS Virus
cggagaaggtgtatcaggggcttcg

SEQ ID NO: 235523 - DNA, 25 bp, SARS Virus
ggagaaggtgtcacaggggcttcgg

SEQ ID NO: 235524 - DNA, 25 bp, SARS Virus
gagaaggtgtctaaggggcttcggt

SEQ ID NO: 235525 - DNA, 25 bp, SARS Virus
agaaggtgtctcaggggcttcggtg

SEQ ID NO: 235526 - DNA, 25 bp, SARS Virus
gaaggtgtctcaagggcttcggtgc

SEQ ID NO: 235527 - DNA, 25 bp, SARS Virus
aaggtgtctcagaggcttcggtgcg

SEQ ID NO: 235528 - DNA, 25 bp, SARS Virus
aggtgtctcaggagcttcggtgcgt

SEQ ID NO: 235529 - DNA, 25 bp, SARS Virus
ggtgtctcagggacttcggtgcgtg

SEQ ID NO: 235530 - DNA, 25 bp, SARS Virus
gtgtctcaggggattcggtgcgtga

SEQ ID NO: 235531 - DNA, 25 bp, SARS Virus
tgtctcaggggcatcggtgcgtgat

SEQ ID NO: 235532 - DNA, 25 bp, SARS Virus
gtctcaggggctacggtgcgtgatc

SEQ ID NO: 235533 - DNA, 25 bp, SARS Virus
tctcaggggcttaggtgcgtgatcg

SEQ ID NO: 235534 - DNA, 25 bp, SARS Virus
ctcaggggcttcagtgcgtgatcgt

SEQ ID NO: 235535 - DNA, 25 bp, SARS Virus
tcaggggcttcgatgcgtgatcgtg

SEQ ID NO: 235536 - DNA, 25 bp, SARS Virus
caggggcttcggagcgtgatcgtgc

SEQ ID NO: 235537 - DNA, 25 bp, SARS Virus
aggggcttcggtacgtgatcgtgca

SEQ ID NO: 235538 - DNA, 25 bp, SARS Virus
ggggcttcggtgagtgatcgtgcag

SEQ ID NO: 235539 - DNA, 25 bp, SARS Virus
gggcttcggtgcatgatcgtgcaga

SEQ ID NO: 235540 - DNA, 25 bp, SARS Virus
ggcttcggtgcgagatcgtgcagag

SEQ ID NO: 235541 - DNA, 25 bp, SARS Virus
gcttcggtgcgtaatcgtgcagaga

SEQ ID NO: 235542 - DNA, 25 bp, SARS Virus
cttcggtgcgtgatcgtgcagagat

SEQ ID NO: 235543 - DNA, 25 bp, SARS Virus
ttcggtgcgtgaacgtgcagagatt

SEQ ID NO: 235544 - DNA, 25 bp, SARS Virus
tcggtgcgtgatagtgcagagattg

SEQ ID NO: 235545 - DNA, 25 bp, SARS Virus
cggtgcgtgatcatgcagagattgg

SEQ ID NO: 235546 - DNA, 25 bp, SARS Virus
ggtgcgtgatcgagcagagattgga

SEQ ID NO: 235547 - DNA, 25 bp, SARS Virus
gtgcgtgatcgtacagagattggac

SEQ ID NO: 235548 - DNA, 25 bp, SARS Virus
tgcgtgatcgtgaagagattggact

SEQ ID NO: 235549 - DNA, 25 bp, SARS Virus
gcgtgatcgtgcagagattggactt

SEQ ID NO: 235550 - DNA, 25 bp, SARS Virus
cgtgatcgtgcaaagattggacttc

SEQ ID NO: 235551 - DNA, 25 bp, SARS Virus
gtgatcgtgcagagattggacttcc

SEQ ID NO: 235552 - DNA, 25 bp, SARS Virus
tgatcgtgcagaaattggacttcct

SEQ ID NO: 235553 - DNA, 25 bp, SARS Virus
gatcgtgcagagattggacttcctg

SEQ ID NO: 235554 - DNA, 25 bp, SARS Virus
atcgtgcagagaatggacttcctgt

SEQ ID NO: 235555 - DNA, 25 bp, SARS Virus
tcgtgcagagataggacttcctgtc

SEQ ID NO: 235556 - DNA, 25 bp, SARS Virus
cgtgcagagattagacttcctgtcc

SEQ ID NO: 235557 - DNA, 25 bp, SARS Virus
gtgcagagattgaacttcctgtccg

SEQ ID NO: 235558 - DNA, 25 bp, SARS Virus
tgcagagattggacttcctgtccgt

SEQ ID NO: 235559 - DNA, 25 bp, SARS Virus
gcagagattggaattcctgtccgtt

SEQ ID NO: 235560 - DNA, 25 bp, SARS Virus
cagagattggacatcctgtccgttt

SEQ ID NO: 235561 - DNA, 25 bp, SARS Virus
agagattggactacctgtccgtttg

SEQ ID NO: 235562 - DNA, 25 bp, SARS Virus
gagattggacttactgtccgtttga

SEQ ID NO: 235563 - DNA, 25 bp, SARS Virus
agattggacttcatgtccgtttgac

SEQ ID NO: 235564 - DNA, 25 bp, SARS Virus
gattggacttccagtccgtttgact

SEQ ID NO: 235565 - DNA, 25 bp, SARS Virus
attggacttcctatccgtttgactc

SEQ ID NO: 235566 - DNA, 25 bp, SARS Virus
ttggacttcctgaccgtttgactca

SEQ ID NO: 235567 - DNA, 25 bp, SARS Virus
tggacttcctgtacgtttgactcaa

SEQ ID NO: 235568 - DNA, 25 bp, SARS Virus
ggacttcctgtcagtttgactcaac

SEQ ID NO: 235569 - DNA, 25 bp, SARS Virus
gacttcctgtccatttgactcaacc

SEQ ID NO: 235570 - DNA, 25 bp, SARS Virus
acttcctgtccgattgactcaacct

SEQ ID NO: 235571 - DNA, 25 bp, SARS Virus
cttcctgtccgtatgactcaacctg

SEQ ID NO: 235572 - DNA, 25 bp, SARS Virus
ttcctgtccgttagactcaacctgc

SEQ ID NO: 235573 - DNA, 25 bp, SARS Virus
tcctgtccgtttaactcaacctgca

SEQ ID NO: 235574 - DNA, 25 bp, SARS Virus
cctgtccgtttgactcaacctgcac

SEQ ID NO: 235575 - DNA, 25 bp, SARS Virus
ctgtccgtttgaatcaacctgcaca

SEQ ID NO: 235576 - DNA, 25 bp, SARS Virus
tgtccgtttgacacaacctgcacac

SEQ ID NO: 235577 - DNA, 25 bp, SARS Virus
gtccgtttgactaaacctgcacaca

SEQ ID NO: 235578 - DNA, 25 bp, SARS Virus
tccgtttgactcaacctgcacacaa

SEQ ID NO: 235579 - DNA, 25 bp, SARS Virus
ccgtttgactcaacctgcacacaaa

SEQ ID NO: 235580 - DNA, 25 bp, SARS Virus
cgtttgactcaaactgcacacaaaa

SEQ ID NO: 235581 - DNA, 25 bp, SARS Virus
gtttgactcaacatgcacacaaaag

SEQ ID NO: 235582 - DNA, 25 bp, SARS Virus
tttgactcaaccagcacacaaaaga

SEQ ID NO: 235583 - DNA, 25 bp, SARS Virus
ttgactcaacctacacacaaaagag

SEQ ID NO: 235584 - DNA, 25 bp, SARS Virus
tgactcaacctgaacacaaaagagc

SEQ ID NO: 235585 - DNA, 25 bp, SARS Virus
gactcaacctgcacacaaaagagca

SEQ ID NO: 235586 - DNA, 25 bp, SARS Virus
actcaacctgcaaacaaaagagcaa

SEQ ID NO: 235587 - DNA, 25 bp, SARS Virus
ctcaacctgcacacaaaagagcaac

SEQ ID NO: 235588 - DNA, 25 bp, SARS Virus
tcaacctgcacaaaaaagagcaact

SEQ ID NO: 235589 - DNA, 25 bp, SARS Virus
caacctgcacacaaaagagcaactg

SEQ ID NO: 235590 - DNA, 25 bp, SARS Virus
aacctgcacacaaaagagcaactgt

SEQ ID NO: 235591 - DNA, 25 bp, SARS Virus
acctgcacacaaaagagcaactgtg

SEQ ID NO: 235592 - DNA, 25 bp, SARS Virus
cctgcacacaaaagagcaactgtgg

SEQ ID NO: 235593 - DNA, 25 bp, SARS Virus
ctgcacacaaaaaagcaactgtggt

SEQ ID NO: 235594 - DNA, 25 bp, SARS Virus
tgcacacaaaagagcaactgtggtt

SEQ ID NO: 235595 - DNA, 25 bp, SARS Virus
gcacacaaaagaacaactgtggttc

SEQ ID NO: 235596 - DNA, 25 bp, SARS Virus
cacacaaaagagaaactgtggttct

SEQ ID NO: 235597 - DNA, 25 bp, SARS Virus
acacaaaagagcaactgtggttctt

SEQ ID NO: 235598 - DNA, 25 bp, SARS Virus
cacaaaagagcaactgtggttcttg

SEQ ID NO: 235599 - DNA, 25 bp, SARS Virus
acaaaagagcaaatgtggttcttgt

SEQ ID NO: 235600 - DNA, 25 bp, SARS Virus
caaaagagcaacagtggttcttgtt

SEQ ID NO: 235601 - DNA, 25 bp, SARS Virus
aaaagagcaactatggttcttgttc

SEQ ID NO: 235602 - DNA, 25 bp, SARS Virus
aaagagcaactgaggttcttgttcc

SEQ ID NO: 235603 - DNA, 25 bp, SARS Virus
aagagcaactgtagttcttgttccg

SEQ ID NO: 235604 - DNA, 25 bp, SARS Virus
agagcaactgtgattcttgttccga

SEQ ID NO: 235605 - DNA, 25 bp, SARS Virus
gagcaactgtggatcttgttccgag

SEQ ID NO: 235606 - DNA, 25 bp, SARS Virus
agcaactgtggtacttgttccgaga

SEQ ID NO: 235607 - DNA, 25 bp, SARS Virus
gcaactgtggttattgttccgagag

SEQ ID NO: 235608 - DNA, 25 bp, SARS Virus
caactgtggttcatgttccgagagg

SEQ ID NO: 235609 - DNA, 25 bp, SARS Virus
aactgtggttctagttccgagaggt

SEQ ID NO: 235610 - DNA, 25 bp, SARS Virus
actgtggttcttattccgagaggta

SEQ ID NO: 235611 - DNA, 25 bp, SARS Virus
ctgtggttcttgatccgagaggtag

SEQ ID NO: 235612 - DNA, 25 bp, SARS Virus
tgtggttcttgtaccgagaggtaga

SEQ ID NO: 235613 - DNA, 25 bp, SARS Virus
gtggttcttgttacgagaggtagaa

SEQ ID NO: 235614 - DNA, 25 bp, SARS Virus
tggttcttgttcagagaggtagaat

SEQ ID NO: 235615 - DNA, 25 bp, SARS Virus
ggttcttgttccaagaggtagaatg

SEQ ID NO: 235616 - DNA, 25 bp, SARS Virus
gttcttgttccgagaggtagaatgg

SEQ ID NO: 235617 - DNA, 25 bp, SARS Virus
ttcttgttccgaaaggtagaatgga

SEQ ID NO: 235618 - DNA, 25 bp, SARS Virus
tcttgttccgagaggtagaatggaa

SEQ ID NO: 235619 - DNA, 25 bp, SARS Virus
cttgttccgagaagtagaatggaaa

SEQ ID NO: 235620 - DNA, 25 bp, SARS Virus
ttgttccgagagatagaatggaaag

SEQ ID NO: 235621 - DNA, 25 bp, SARS Virus
tgttccgagaggaagaatggaaagc

SEQ ID NO: 235622 - DNA, 25 bp, SARS Virus
gttccgagaggtagaatggaaagcc

SEQ ID NO: 235623 - DNA, 25 bp, SARS Virus
ttccgagaggtaaaatggaaagcca

SEQ ID NO: 235624 - DNA, 25 bp, SARS Virus
tccgagaggtagaatggaaagccag

SEQ ID NO: 235625 - DNA, 25 bp, SARS Virus
ccgagaggtagaatggaaagccagt

SEQ ID NO: 235626 - DNA, 25 bp, SARS Virus
cgagaggtagaaaggaaagccagtg

SEQ ID NO: 235627 - DNA, 25 bp, SARS Virus
gagaggtagaatagaaagccagtgt

SEQ ID NO: 235628 - DNA, 25 bp, SARS Virus
agaggtagaatgaaaagccagtgtg

SEQ ID NO: 235629 - DNA, 25 bp, SARS Virus
gaggtagaatggaaagccagtgtgg

SEQ ID NO: 235630 - DNA, 25 bp, SARS Virus
aggtagaatggaaagccagtgtggg

SEQ ID NO: 235631 - DNA, 25 bp, SARS Virus
ggtagaatggaaagccagtgtgggc

SEQ ID NO: 235632 - DNA, 25 bp, SARS Virus
gtagaatggaaaaccagtgtgggcc

SEQ ID NO: 235633 - DNA, 25 bp, SARS Virus
tagaatggaaagacagtgtgggcct

SEQ ID NO: 235634 - DNA, 25 bp, SARS Virus
agaatggaaagcaagtgtgggcctg

SEQ ID NO: 235635 - DNA, 25 bp, SARS Virus
gaatggaaagccagtgtgggcctgc

SEQ ID NO: 235636 - DNA, 25 bp, SARS Virus
aatggaaagccaatgtgggcctgct

SEQ ID NO: 235637 - DNA, 25 bp, SARS Virus
atggaaagccagagtgggcctgctt

SEQ ID NO: 235638 - DNA, 25 bp, SARS Virus
tggaaagccagtatgggcctgcttt

SEQ ID NO: 235639 - DNA, 25 bp, SARS Virus
ggaaagccagtgagggcctgctttg

SEQ ID NO: 235640 - DNA, 25 bp, SARS Virus
gaaagccagtgtaggcctgctttgg

SEQ ID NO: 235641 - DNA, 25 bp, SARS Virus
aaagccagtgtgagcctgctttgga

SEQ ID NO: 235642 - DNA, 25 bp, SARS Virus
aagccagtgtggacctgctttggat

SEQ ID NO: 235643 - DNA, 25 bp, SARS Virus
agccagtgtgggactgctttggatc

SEQ ID NO: 235644 - DNA, 25 bp, SARS Virus
gccagtgtgggcatgctttggatcc

SEQ ID NO: 235645 - DNA, 25 bp, SARS Virus
ccagtgtgggccagctttggatcca

SEQ ID NO: 235646 - DNA, 25 bp, SARS Virus
cagtgtgggcctactttggatccat

SEQ ID NO: 235647 - DNA, 25 bp, SARS Virus
agtgtgggcctgatttggatccata

SEQ ID NO: 235648 - DNA, 25 bp, SARS Virus
gtgtgggcctgcattggatccatac

SEQ ID NO: 235649 - DNA, 25 bp, SARS Virus
tgtgggcctgctatggatccatacg

SEQ ID NO: 235650 - DNA, 25 bp, SARS Virus
gtgggcctgcttaggatccatacga

SEQ ID NO: 235651 - DNA, 25 bp, SARS Virus
tgggcctgctttagatccatacgac

SEQ ID NO: 235652 - DNA, 25 bp, SARS Virus
gggcctgctttgaatccatacgact

SEQ ID NO: 235653 - DNA, 25 bp, SARS Virus
ggcctgctttggatccatacgacta

SEQ ID NO: 235654 - DNA, 25 bp, SARS Virus
gcctgctttggaaccatacgactac

SEQ ID NO: 235655 - DNA, 25 bp, SARS Virus
cctgctttggatacatacgactact

SEQ ID NO: 235656 - DNA, 25 bp, SARS Virus
ctgctttggatcaatacgactacta

SEQ ID NO: 235657 - DNA, 25 bp, SARS Virus
tgctttggatccatacgactactag

SEQ ID NO: 235658 - DNA, 25 bp, SARS Virus
gctttggatccaaacgactactagc

SEQ ID NO: 235659 - DNA, 25 bp, SARS Virus
ctttggatccatacgactactagct

SEQ ID NO: 235660 - DNA, 25 bp, SARS Virus
tttggatccataagactactagctg

SEQ ID NO: 235661 - DNA, 25 bp, SARS Virus
ttggatccatacaactactagctga

SEQ ID NO: 235662 - DNA, 25 bp, SARS Virus
tggatccatacgactactagctgac

SEQ ID NO: 235663 - DNA, 25 bp, SARS Virus
ggatccatacgaatactagctgacg

SEQ ID NO: 235664 - DNA, 25 bp, SARS Virus
gatccatacgacaactagctgacgt

SEQ ID NO: 235665 - DNA, 25 bp, SARS Virus
atccatacgactactagctgacgtt

SEQ ID NO: 235666 - DNA, 25 bp, SARS Virus
tccatacgactaatagctgacgttg

SEQ ID NO: 235667 - DNA, 25 bp, SARS Virus
ccatacgactacaagctgacgttgt

SEQ ID NO: 235668 - DNA, 25 bp, SARS Virus
catacgactactagctgacgttgtg

SEQ ID NO: 235669 - DNA, 25 bp, SARS Virus
atacgactactaactgacgttgtgc

SEQ ID NO: 235670 - DNA, 25 bp, SARS Virus
tacgactactagatgacgttgtgcc

SEQ ID NO: 235671 - DNA, 25 bp, SARS Virus
acgactactagcagacgttgtgcct

SEQ ID NO: 235672 - DNA, 25 bp, SARS Virus
cgactactagctaacgttgtgcctg

SEQ ID NO: 235673 - DNA, 25 bp, SARS Virus
gactactagctgacgttgtgcctgc

SEQ ID NO: 235674 - DNA, 25 bp, SARS Virus
actactagctgaagttgtgcctgct

SEQ ID NO: 235675 - DNA, 25 bp, SARS Virus
ctactagctgacattgtgcctgctt

SEQ ID NO: 235676 - DNA, 25 bp, SARS Virus
tactagctgacgatgtgcctgcttt

SEQ ID NO: 235677 - DNA, 25 bp, SARS Virus
actagctgacgtagtgcctgctttg

SEQ ID NO: 235678 - DNA, 25 bp, SARS Virus
ctagctgacgttatgcctgctttgg

SEQ ID NO: 235679 - DNA, 25 bp, SARS Virus
tagctgacgttgagcctgctttggc

SEQ ID NO: 235680 - DNA, 25 bp, SARS Virus
agctgacgttgtacctgctttggca

SEQ ID NO: 235681 - DNA, 25 bp, SARS Virus
gctgacgttgtgactgctttggcat

SEQ ID NO: 235682 - DNA, 25 bp, SARS Virus
ctgacgttgtgcatgctttggcatt

SEQ ID NO: 235683 - DNA, 25 bp, SARS Virus
tgacgttgtgccagctttggcattc

SEQ ID NO: 235684 - DNA, 25 bp, SARS Virus
gacgttgtgcctactttggcattcg

SEQ ID NO: 235685 - DNA, 25 bp, SARS Virus
acgttgtgcctgatttggcattcgt

SEQ ID NO: 235686 - DNA, 25 bp, SARS Virus
cgttgtgcctgcattggcattcgtc

SEQ ID NO: 235687 - DNA, 25 bp, SARS Virus
gttgtgcctgctatggcattcgtca

SEQ ID NO: 235688 - DNA, 25 bp, SARS Virus
ttgtgcctgcttaggcattcgtcag

SEQ ID NO: 235689 - DNA, 25 bp, SARS Virus
tgtgcctgctttagcattcgtcaga

SEQ ID NO: 235690 - DNA, 25 bp, SARS Virus
gtgcctgctttgacattcgtcagac

SEQ ID NO: 235691 - DNA, 25 bp, SARS Virus
tgcctgctttggaattcgtcagacg

SEQ ID NO: 235692 - DNA, 25 bp, SARS Virus
gcctgctttggcattcgtcagacgt

SEQ ID NO: 235693 - DNA, 25 bp, SARS Virus
cctgctttggcaatcgtcagacgtc

SEQ ID NO: 235694 - DNA, 25 bp, SARS Virus
ctgctttggcatacgtcagacgtct

SEQ ID NO: 235695 - DNA, 25 bp, SARS Virus
tgctttggcattagtcagacgtctt

SEQ ID NO: 235696 - DNA, 25 bp, SARS Virus
gctttggcattcatcagacgtcttc

SEQ ID NO: 235697 - DNA, 25 bp, SARS Virus
ctttggcattcgacagacgtcttct

SEQ ID NO: 235698 - DNA, 25 bp, SARS Virus
tttggcattcgtaagacgtcttctc

SEQ ID NO: 235699 - DNA, 25 bp, SARS Virus
ttggcattcgtcagacgtcttctcc

SEQ ID NO: 235700 - DNA, 25 bp, SARS Virus
tggcattcgtcaaacgtcttctccc

SEQ ID NO: 235701 - DNA, 25 bp, SARS Virus
ggcattcgtcagacgtcttctccct

SEQ ID NO: 235702 - DNA, 25 bp, SARS Virus
gcattcgtcagaagtcttctccctg

SEQ ID NO: 235703 - DNA, 25 bp, SARS Virus
cattcgtcagacatcttctccctgc

SEQ ID NO: 235704 - DNA, 25 bp, SARS Virus
attcgtcagacgacttctccctgct

SEQ ID NO: 235705 - DNA, 25 bp, SARS Virus
ttcgtcagacgtattctccctgctc

SEQ ID NO: 235706 - DNA, 25 bp, SARS Virus
tcgtcagacgtcatctccctgctca

SEQ ID NO: 235707 - DNA, 25 bp, SARS Virus
cgtcagacgtctactccctgctcaa

SEQ ID NO: 235708 - DNA, 25 bp, SARS Virus
gtcagacgtcttatccctgctcaat

SEQ ID NO: 235709 - DNA, 25 bp, SARS Virus
tcagacgtcttcaccctgctcaatg

SEQ ID NO: 235710 - DNA, 25 bp, SARS Virus
cagacgtcttctacctgctcaatga

SEQ ID NO: 235711 - DNA, 25 bp, SARS Virus
agacgtcttctcactgctcaatgag

SEQ ID NO: 235712 - DNA, 25 bp, SARS Virus
gacgtcttctccatgctcaatgagc

SEQ ID NO: 235713 - DNA, 25 bp, SARS Virus
acgtcttctcccagctcaatgagca

SEQ ID NO: 235714 - DNA, 25 bp, SARS Virus
cgtcttctccctactcaatgagcaa

SEQ ID NO: 235715 - DNA, 25 bp, SARS Virus
gtcttctccctgatcaatgagcaaa

SEQ ID NO: 235716 - DNA, 25 bp, SARS Virus
tcttctccctgcacaatgagcaaag

SEQ ID NO: 235717 - DNA, 25 bp, SARS Virus
cttctccctgctaaatgagcaaaga

SEQ ID NO: 235718 - DNA, 25 bp, SARS Virus
ttctccctgctcaatgagcaaagaa

SEQ ID NO: 235719 - DNA, 25 bp, SARS Virus
tctccctgctcaatgagcaaagaac

SEQ ID NO: 235720 - DNA, 25 bp, SARS Virus
ctccctgctcaaagagcaaagaaca

SEQ ID NO: 235721 - DNA, 25 bp, SARS Virus
tccctgctcaataagcaaagaacag

SEQ ID NO: 235722 - DNA, 25 bp, SARS Virus
ccctgctcaatgagcaaagaacagt

SEQ ID NO: 235723 - DNA, 25 bp, SARS Virus
cctgctcaatgaacaaagaacagtt

SEQ ID NO: 235724 - DNA, 25 bp, SARS Virus
ctgctcaatgagaaaagaacagttg

SEQ ID NO: 235725 - DNA, 25 bp, SARS Virus
tgctcaatgagcaaagaacagttgc

SEQ ID NO: 235726 - DNA, 25 bp, SARS Virus
gctcaatgagcaaagaacagttgct

SEQ ID NO: 235727 - DNA, 25 bp, SARS Virus
ctcaatgagcaaagaacagttgctg

SEQ ID NO: 235728 - DNA, 25 bp, SARS Virus
tcaatgagcaaaaaacagttgctgt

SEQ ID NO: 235729 - DNA, 25 bp, SARS Virus
caatgagcaaagaacagttgctgtc

SEQ ID NO: 235730 - DNA, 25 bp, SARS Virus
aatgagcaaagaacagttgctgtca

SEQ ID NO: 235731 - DNA, 25 bp, SARS Virus
atgagcaaagaaaagttgctgtcat

SEQ ID NO: 235732 - DNA, 25 bp, SARS Virus
tgagcaaagaacagttgctgtcatt

SEQ ID NO: 235733 - DNA, 25 bp, SARS Virus
gagcaaagaacaattgctgtcattt

SEQ ID NO: 235734 - DNA, 25 bp, SARS Virus
agcaaagaacagatgctgtcatttt

SEQ ID NO: 235735 - DNA, 25 bp, SARS Virus
gcaaagaacagtagctgtcatttta

SEQ ID NO: 235736 - DNA, 25 bp, SARS Virus
caaagaacagttactgtcattttaa

SEQ ID NO: 235737 - DNA, 25 bp, SARS Virus
aataatggcaagcatgcttcttctt

SEQ ID NO: 235738 - DNA, 25 bp, SARS Virus
ataatggcaagactgcttcttcttg

SEQ ID NO: 235739 - DNA, 25 bp, SARS Virus
taatggcaagaacgcttcttcttgt

SEQ ID NO: 235740 - DNA, 25 bp, SARS Virus
aatggcaagaatccttcttcttgta

SEQ ID NO: 235741 - DNA, 25 bp, SARS Virus
atggcaagaatgcttcttcttgtaa

SEQ ID NO: 235742 - DNA, 25 bp, SARS Virus
tggcaagaatgcctcttcttgtaac

SEQ ID NO: 235743 - DNA, 25 bp, SARS Virus
ggcaagaatgctccttcttgtaacg

SEQ ID NO: 235744 - DNA, 25 bp, SARS Virus
gcaagaatgcttcttcttgtaacgc

SEQ ID NO: 235745 - DNA, 25 bp, SARS Virus
caagaatgcttcctcttgtaacgcc

SEQ ID NO: 235746 - DNA, 25 bp, SARS Virus
aagaatgcttctccttgtaacgcca

SEQ ID NO: 235747 - DNA, 25 bp, SARS Virus
agaatgcttcttcttgtaacgccat

SEQ ID NO: 235748 - DNA, 25 bp, SARS Virus
gaatgcttcttcctgtaacgccata

SEQ ID NO: 235749 - DNA, 25 bp, SARS Virus
aatgcttcttctcgtaacgccatac

SEQ ID NO: 235750 - DNA, 25 bp, SARS Virus
atgcttcttcttctaacgccatacg

SEQ ID NO: 235751 - DNA, 25 bp, SARS Virus
tgcttcttcttgcaacgccatacgt

SEQ ID NO: 235752 - DNA, 25 bp, SARS Virus
gcttcttcttgtcacgccatacgtt

SEQ ID NO: 235753 - DNA, 25 bp, SARS Virus
cttcttcttgtaccgccatacgtta

SEQ ID NO: 235754 - DNA, 25 bp, SARS Virus
ttcttcttgtaacgccatacgttaa

SEQ ID NO: 235755 - DNA, 25 bp, SARS Virus
tcttcttgtaaccccatacgttaac

SEQ ID NO: 235756 - DNA, 25 bp, SARS Virus
cttcttgtaacgccatacgttaacc

SEQ ID NO: 235757 - DNA, 25 bp, SARS Virus
ttcttgtaacgccatacgttaaccc

SEQ ID NO: 235758 - DNA, 25 bp, SARS Virus
tcttgtaacgccctacgttaacccc

SEQ ID NO: 235759 - DNA, 25 bp, SARS Virus
cttgtaacgccacacgttaacccca

SEQ ID NO: 235760 - DNA, 25 bp, SARS Virus
ttgtaacgccatccgttaaccccaa

SEQ ID NO: 235761 - DNA, 25 bp, SARS Virus
tgtaacgccatacgttaaccccaaa

SEQ ID NO: 235762 - DNA, 25 bp, SARS Virus
gtaacgccataccttaaccccaaag

SEQ ID NO: 235763 - DNA, 25 bp, SARS Virus
taacgccatacgctaaccccaaagc

SEQ ID NO: 235764 - DNA, 25 bp, SARS Virus
aacgccatacgtcaaccccaaagcg

SEQ ID NO: 235765 - DNA, 25 bp, SARS Virus
acgccatacgttcaccccaaagcgg

SEQ ID NO: 235766 - DNA, 25 bp, SARS Virus
cgccatacgttacccccaaagcggg

SEQ ID NO: 235767 - DNA, 25 bp, SARS Virus
gccatacgttaaccccaaagcgggt

SEQ ID NO: 235768 - DNA, 25 bp, SARS Virus
ccatacgttaaccccaaagcgggtg

SEQ ID NO: 235769 - DNA, 25 bp, SARS Virus
catacgttaaccccaaagcgggtgt

SEQ ID NO: 235770 - DNA, 25 bp, SARS Virus
atacgttaaccccaaagcgggtgta

SEQ ID NO: 235771 - DNA, 25 bp, SARS Virus
tacgttaacccccaagcgggtgtac

SEQ ID NO: 235772 - DNA, 25 bp, SARS Virus
acgttaaccccacagcgggtgtaca

SEQ ID NO: 235773 - DNA, 25 bp, SARS Virus
cgttaaccccaacgcgggtgtacac

SEQ ID NO: 235774 - DNA, 25 bp, SARS Virus
gttaaccccaaaccgggtgtacacc

SEQ ID NO: 235775 - DNA, 25 bp, SARS Virus
ttaaccccaaagcgggtgtacaccg

SEQ ID NO: 235776 - DNA, 25 bp, SARS Virus
taaccccaaagccggtgtacaccgt

SEQ ID NO: 235777 - DNA, 25 bp, SARS Virus
aaccccaaagcgcgtgtacaccgtg

SEQ ID NO: 235778 - DNA, 25 bp, SARS Virus
accccaaagcggctgtacaccgtgc

SEQ ID NO: 235779 - DNA, 25 bp, SARS Virus
ccccaaagcgggcgtacaccgtgct

SEQ ID NO: 235780 - DNA, 25 bp, SARS Virus
cccaaagcgggtctacaccgtgctc

SEQ ID NO: 235781 - DNA, 25 bp, SARS Virus
ccaaagcgggtgcacaccgtgctca

SEQ ID NO: 235782 - DNA, 25 bp, SARS Virus
caaagcgggtgtccaccgtgctcat

SEQ ID NO: 235783 - DNA, 25 bp, SARS Virus
aaagcgggtgtacaccgtgctcatg

SEQ ID NO: 235784 - DNA, 25 bp, SARS Virus
aagcgggtgtaccccgtgctcatga

SEQ ID NO: 235785 - DNA, 25 bp, SARS Virus
agcgggtgtacaccgtgctcatgag

SEQ ID NO: 235786 - DNA, 25 bp, SARS Virus
gcgggtgtacaccgtgctcatgagg

SEQ ID NO: 235787 - DNA, 25 bp, SARS Virus
cgggtgtacaccctgctcatgaggg

SEQ ID NO: 235788 - DNA, 25 bp, SARS Virus
gggtgtacaccgcgctcatgagggt

SEQ ID NO: 235789 - DNA, 25 bp, SARS Virus
ggtgtacaccgtcctcatgagggtc

SEQ ID NO: 235790 - DNA, 25 bp, SARS Virus
gtgtacaccgtgctcatgagggtca

SEQ ID NO: 235791 - DNA, 25 bp, SARS Virus
tgtacaccgtgcccatgagggtcac

SEQ ID NO: 235792 - DNA, 25 bp, SARS Virus
gtacaccgtgctcatgagggtcaca

SEQ ID NO: 235793 - DNA, 25 bp, SARS Virus
tacaccgtgctcctgagggtcacaa

SEQ ID NO: 235794 - DNA, 25 bp, SARS Virus
acaccgtgctcacgagggtcacaat

SEQ ID NO: 235795 - DNA, 25 bp, SARS Virus
caccgtgctcatcagggtcacaata

SEQ ID NO: 235796 - DNA, 25 bp, SARS Virus
accgtgctcatgcgggtcacaatat

SEQ ID NO: 235797 - DNA, 25 bp, SARS Virus
ccgtgctcatgacggtcacaatatg

SEQ ID NO: 235798 - DNA, 25 bp, SARS Virus
cgtgctcatgagcgtcacaatatgg

SEQ ID NO: 235799 - DNA, 25 bp, SARS Virus
gtgctcatgaggctcacaatatggc

SEQ ID NO: 235800 - DNA, 25 bp, SARS Virus
tgctcatgagggccacaatatggcg

SEQ ID NO: 235801 - DNA, 25 bp, SARS Virus
gctcatgagggtcacaatatggcga

SEQ ID NO: 235802 - DNA, 25 bp, SARS Virus
ctcatgagggtcccaatatggcgat

SEQ ID NO: 235803 - DNA, 25 bp, SARS Virus
tcatgagggtcacaatatggcgatg

SEQ ID NO: 235804 - DNA, 25 bp, SARS Virus
catgagggtcaccatatggcgatgc

SEQ ID NO: 235805 - DNA, 25 bp, SARS Virus
atgagggtcacactatggcgatgct

SEQ ID NO: 235806 - DNA, 25 bp, SARS Virus
tgagggtcacaacatggcgatgctg

SEQ ID NO: 235807 - DNA, 25 bp, SARS Virus
gagggtcacaatctggcgatgctgg

SEQ ID NO: 235808 - DNA, 25 bp, SARS Virus
agggtcacaatacggcgatgctggc

SEQ ID NO: 235809 - DNA, 25 bp, SARS Virus
gggtcacaatatcgcgatgctggca

SEQ ID NO: 235810 - DNA, 25 bp, SARS Virus
ggtcacaatatgccgatgctggcat

SEQ ID NO: 235811 - DNA, 25 bp, SARS Virus
gtcacaatatggcgatgctggcatg

SEQ ID NO: 235812 - DNA, 25 bp, SARS Virus
tcacaatatggccatgctggcatga

SEQ ID NO: 235813 - DNA, 25 bp, SARS Virus
cacaatatggcgctgctggcatgac

SEQ ID NO: 235814 - DNA, 25 bp, SARS Virus
acaatatggcgacgctggcatgact

SEQ ID NO: 235815 - DNA, 25 bp, SARS Virus
caatatggcgatcctggcatgactt

SEQ ID NO: 235816 - DNA, 25 bp, SARS Virus
aatatggcgatgctggcatgactta

SEQ ID NO: 235817 - DNA, 25 bp, SARS Virus
atatggcgatgccggcatgacttac

SEQ ID NO: 235818 - DNA, 25 bp, SARS Virus
tatggcgatgctcgcatgacttacg

SEQ ID NO: 235819 - DNA, 25 bp, SARS Virus
atggcgatgctgccatgacttacgg

SEQ ID NO: 235820 - DNA, 25 bp, SARS Virus
tggcgatgctggcatgacttacggc

SEQ ID NO: 235821 - DNA, 25 bp, SARS Virus
ggcgatgctggcctgacttacggca

SEQ ID NO: 235822 - DNA, 25 bp, SARS Virus
gcgatgctggcacgacttacggcag

SEQ ID NO: 235823 - DNA, 25 bp, SARS Virus
cgatgctggcatcacttacggcagg

SEQ ID NO: 235824 - DNA, 25 bp, SARS Virus
gatgctggcatgccttacggcaggt

SEQ ID NO: 235825 - DNA, 25 bp, SARS Virus
atgctggcatgacttacggcaggta

SEQ ID NO: 235826 - DNA, 25 bp, SARS Virus
tgctggcatgacctacggcaggtaa

SEQ ID NO: 235827 - DNA, 25 bp, SARS Virus
gctggcatgactcacggcaggtaaa

SEQ ID NO: 235828 - DNA, 25 bp, SARS Virus
ctggcatgacttccggcaggtaaag

SEQ ID NO: 235829 - DNA, 25 bp, SARS Virus
tggcatgacttacggcaggtaaaga

SEQ ID NO: 235830 - DNA, 25 bp, SARS Virus
ggcatgacttaccgcaggtaaagac

SEQ ID NO: 235831 - DNA, 25 bp, SARS Virus
gcatgacttacgccaggtaaagacg

SEQ ID NO: 235832 - DNA, 25 bp, SARS Virus
catgacttacggcaggtaaagacgt

SEQ ID NO: 235833 - DNA, 25 bp, SARS Virus
atgacttacggccggtaaagacgtt

SEQ ID NO: 235834 - DNA, 25 bp, SARS Virus
tgacttacggcacgtaaagacgttg

SEQ ID NO: 235835 - DNA, 25 bp, SARS Virus
gacttacggcagctaaagacgttgg

SEQ ID NO: 235836 - DNA, 25 bp, SARS Virus
acttacggcaggcaaagacgttggt

SEQ ID NO: 235837 - DNA, 25 bp, SARS Virus
cttacggcaggtcaagacgttggtc

SEQ ID NO: 235838 - DNA, 25 bp, SARS Virus
ttacggcaggtacagacgttggtcg

SEQ ID NO: 235839 - DNA, 25 bp, SARS Virus
tacggcaggtaacgacgttggtcga

SEQ ID NO: 235840 - DNA, 25 bp, SARS Virus
acggcaggtaaacacgttggtcgag

SEQ ID NO: 235841 - DNA, 25 bp, SARS Virus
cggcaggtaaagccgttggtcgagt

SEQ ID NO: 235842 - DNA, 25 bp, SARS Virus
ggcaggtaaagacgttggtcgagtt

SEQ ID NO: 235843 - DNA, 25 bp, SARS Virus
gcaggtaaagaccttggtcgagttg

SEQ ID NO: 235844 - DNA, 25 bp, SARS Virus
caggtaaagacgctggtcgagttgc

SEQ ID NO: 235845 - DNA, 25 bp, SARS Virus
aggtaaagacgtcggtcgagttgct

SEQ ID NO: 235846 - DNA, 25 bp, SARS Virus
ggtaaagacgttcgtcgagttgctg

SEQ ID NO: 235847 - DNA, 25 bp, SARS Virus
gtaaagacgttgctcgagttgctgg

SEQ ID NO: 235848 - DNA, 25 bp, SARS Virus
taaagacgttggccgagttgctgga

SEQ ID NO: 235849 - DNA, 25 bp, SARS Virus
aaagacgttggtcgagttgctggaa

SEQ ID NO: 235850 - DNA, 25 bp, SARS Virus
aagacgttggtccagttgctggaac

SEQ ID NO: 235851 - DNA, 25 bp, SARS Virus
agacgttggtcgcgttgctggaaca

SEQ ID NO: 235852 - DNA, 25 bp, SARS Virus
gacgttggtcgacttgctggaacac

SEQ ID NO: 235853 - DNA, 25 bp, SARS Virus
acgttggtcgagctgctggaacacc

SEQ ID NO: 235854 - DNA, 25 bp, SARS Virus
cgttggtcgagtcgctggaacaccg

SEQ ID NO: 235855 - DNA, 25 bp, SARS Virus
gttggtcgagttcctggaacaccgg

SEQ ID NO: 235856 - DNA, 25 bp, SARS Virus
ttggtcgagttgctggaacaccggc

SEQ ID NO: 235857 - DNA, 25 bp, SARS Virus
tggtcgagttgccggaacaccggca

SEQ ID NO: 235858 - DNA, 25 bp, SARS Virus
ggtcgagttgctcgaacaccggcac

SEQ ID NO: 235859 - DNA, 25 bp, SARS Virus
gtcgagttgctgcaacaccggcact

SEQ ID NO: 235860 - DNA, 25 bp, SARS Virus
tcgagttgctggcacaccggcacta

SEQ ID NO: 235861 - DNA, 25 bp, SARS Virus
cgagttgctggaccaccggcactaa

SEQ ID NO: 235862 - DNA, 25 bp, SARS Virus
gagttgctggaacaccggcactaac

SEQ ID NO: 235863 - DNA, 25 bp, SARS Virus
agttgctggaaccccggcactaacc

SEQ ID NO: 235864 - DNA, 25 bp, SARS Virus
gttgctggaacaccggcactaacca

SEQ ID NO: 235865 - DNA, 25 bp, SARS Virus
ttgctggaacaccggcactaaccac

SEQ ID NO: 235866 - DNA, 25 bp, SARS Virus
tgctggaacacccgcactaaccacg

SEQ ID NO: 235867 - DNA, 25 bp, SARS Virus
gctggaacaccgccactaaccacga

SEQ ID NO: 235868 - DNA, 25 bp, SARS Virus
ctggaacaccggcactaaccacgaa

SEQ ID NO: 235869 - DNA, 25 bp, SARS Virus
tggaacaccggccctaaccacgaat

SEQ ID NO: 235870 - DNA, 25 bp, SARS Virus
ggaacaccggcactaaccacgaatt

SEQ ID NO: 235871 - DNA, 25 bp, SARS Virus
gaacaccggcaccaaccacgaattc

SEQ ID NO: 235872 - DNA, 25 bp, SARS Virus
aacaccggcactcaccacgaattcc

SEQ ID NO: 235873 - DNA, 25 bp, SARS Virus
acaccggcactacccacgaattccg

SEQ ID NO: 235874 - DNA, 25 bp, SARS Virus
caccggcactaaccacgaattccgt

SEQ ID NO: 235875 - DNA, 25 bp, SARS Virus
accggcactaaccacgaattccgta

SEQ ID NO: 235876 - DNA, 25 bp, SARS Virus
ccggcactaaccccgaattccgtag

SEQ ID NO: 235877 - DNA, 25 bp, SARS Virus
cggcactaaccacgaattccgtagt

SEQ ID NO: 235878 - DNA, 25 bp, SARS Virus
ggcactaaccaccaattccgtagtc

SEQ ID NO: 235879 - DNA, 25 bp, SARS Virus
gcactaaccacgcattccgtagtct

SEQ ID NO: 235880 - DNA, 25 bp, SARS Virus
cactaaccacgacttccgtagtctt

SEQ ID NO: 235881 - DNA, 25 bp, SARS Virus
actaaccacgaactccgtagtcttg

SEQ ID NO: 235882 - DNA, 25 bp, SARS Virus
ctaaccacgaatcccgtagtcttgc

SEQ ID NO: 235883 - DNA, 25 bp, SARS Virus
taaccacgaattccgtagtcttgca

SEQ ID NO: 235884 - DNA, 25 bp, SARS Virus
aaccacgaattccgtagtcttgcaa

SEQ ID NO: 235885 - DNA, 25 bp, SARS Virus
accacgaattccctagtcttgcaaa

SEQ ID NO: 235886 - DNA, 25 bp, SARS Virus
ccacgaattccgcagtcttgcaaat

SEQ ID NO: 235887 - DNA, 25 bp, SARS Virus
cacgaattccgtcgtcttgcaaatt

SEQ ID NO: 235888 - DNA, 25 bp, SARS Virus
acgaattccgtactcttgcaaatta

SEQ ID NO: 235889 - DNA, 25 bp, SARS Virus
cgaattccgtagccttgcaaattac

SEQ ID NO: 235890 - DNA, 25 bp, SARS Virus
gaattccgtagtcttgcaaattact

SEQ ID NO: 235891 - DNA, 25 bp, SARS Virus
aattccgtagtcctgcaaattactt

SEQ ID NO: 235892 - DNA, 25 bp, SARS Virus
attccgtagtctcgcaaattacttg

SEQ ID NO: 235893 - DNA, 25 bp, SARS Virus
ttccgtagtcttccaaattacttgt

SEQ ID NO: 235894 - DNA, 25 bp, SARS Virus
tccgtagtcttgcaaattacttgtg

SEQ ID NO: 235895 - DNA, 25 bp, SARS Virus
ccgtagtcttgccaattacttgtgt

SEQ ID NO: 235896 - DNA, 25 bp, SARS Virus
cgtagtcttgcacattacttgtgta

SEQ ID NO: 235897 - DNA, 25 bp, SARS Virus
gtagtcttgcaacttacttgtgtat

SEQ ID NO: 235898 - DNA, 25 bp, SARS Virus
tagtcttgcaaactacttgtgtatc

SEQ ID NO: 235899 - DNA, 25 bp, SARS Virus
agtcttgcaaatcacttgtgtatcc

SEQ ID NO: 235900 - DNA, 25 bp, SARS Virus
gtcttgcaaattccttgtgtatccc

SEQ ID NO: 235901 - DNA, 25 bp, SARS Virus
tcttgcaaattacttgtgtatcccg

SEQ ID NO: 235902 - DNA, 25 bp, SARS Virus
cttgcaaattacctgtgtatcccga

SEQ ID NO: 235903 - DNA, 25 bp, SARS Virus
ttgcaaattactcgtgtatcccgac

SEQ ID NO: 235904 - DNA, 25 bp, SARS Virus
tgcaaattacttctgtatcccgaca

SEQ ID NO: 235905 - DNA, 25 bp, SARS Virus
gcaaattacttgcgtatcccgacaa

SEQ ID NO: 235906 - DNA, 25 bp, SARS Virus
caaattacttgtctatcccgacaag

SEQ ID NO: 235907 - DNA, 25 bp, SARS Virus
aaattacttgtgcatcccgacaagt

SEQ ID NO: 235908 - DNA, 25 bp, SARS Virus
aattacttgtgtctcccgacaagtt

SEQ ID NO: 235909 - DNA, 25 bp, SARS Virus
attacttgtgtaccccgacaagttc

SEQ ID NO: 235910 - DNA, 25 bp, SARS Virus
ttacttgtgtatcccgacaagttcg

SEQ ID NO: 235911 - DNA, 25 bp, SARS Virus
tacttgtgtatcccgacaagttcga

SEQ ID NO: 235912 - DNA, 25 bp, SARS Virus
acttgtgtatcccgacaagttcgac

SEQ ID NO: 235913 - DNA, 25 bp, SARS Virus
cttgtgtatccccacaagttcgacc

SEQ ID NO: 235914 - DNA, 25 bp, SARS Virus
ttgtgtatcccgccaagttcgaccc

SEQ ID NO: 235915 - DNA, 25 bp, SARS Virus
tgtgtatcccgacaagttcgacccc

SEQ ID NO: 235916 - DNA, 25 bp, SARS Virus
gtgtatcccgaccagttcgaccccg

SEQ ID NO: 235917 - DNA, 25 bp, SARS Virus
tgtatcccgacacgttcgaccccgt

SEQ ID NO: 235918 - DNA, 25 bp, SARS Virus
gtatcccgacaacttcgaccccgtc

SEQ ID NO: 235919 - DNA, 25 bp, SARS Virus
tatcccgacaagctcgaccccgtca

SEQ ID NO: 235920 - DNA, 25 bp, SARS Virus
atcccgacaagtccgaccccgtcat

SEQ ID NO: 235921 - DNA, 25 bp, SARS Virus
tcccgacaagttcgaccccgtcatg

SEQ ID NO: 235922 - DNA, 25 bp, SARS Virus
cccgacaagttccaccccgtcatgc

SEQ ID NO: 235923 - DNA, 25 bp, SARS Virus
ccgacaagttcgcccccgtcatgcg

SEQ ID NO: 235924 - DNA, 25 bp, SARS Virus
cgacaagttcgaccccgtcatgcgg

SEQ ID NO: 235925 - DNA, 25 bp, SARS Virus
gacaagttcgaccccgtcatgcgga

SEQ ID NO: 235926 - DNA, 25 bp, SARS Virus
acaagttcgaccccgtcatgcggaa

SEQ ID NO: 235927 - DNA, 25 bp, SARS Virus
caagttcgaccccgtcatgcggaaa

SEQ ID NO: 235928 - DNA, 25 bp, SARS Virus
aagttcgaccccctcatgcggaaaa

SEQ ID NO: 235929 - DNA, 25 bp, SARS Virus
agttcgaccccgccatgcggaaaaa

SEQ ID NO: 235930 - DNA, 25 bp, SARS Virus
gttcgaccccgtcatgcggaaaaag

SEQ ID NO: 235931 - DNA, 25 bp, SARS Virus
ttcgaccccgtcctgcggaaaaagg

SEQ ID NO: 235932 - DNA, 25 bp, SARS Virus
tcgaccccgtcacgcggaaaaaggt

SEQ ID NO: 235933 - DNA, 25 bp, SARS Virus
cgaccccgtcatccggaaaaaggtc

SEQ ID NO: 235934 - DNA, 25 bp, SARS Virus
gaccccgtcatgcggaaaaaggtcg

SEQ ID NO: 235935 - DNA, 25 bp, SARS Virus
accccgtcatgccgaaaaaggtcga

SEQ ID NO: 235936 - DNA, 25 bp, SARS Virus
ccccgtcatgcgcaaaaaggtcgag

SEQ ID NO: 235937 - DNA, 25 bp, SARS Virus
cccgtcatgcggcaaaaggtcgaga

SEQ ID NO: 235938 - DNA, 25 bp, SARS Virus
ccgtcatgcggacaaaggtcgagat

SEQ ID NO: 235939 - DNA, 25 bp, SARS Virus
cgtcatgcggaacaaggtcgagatg

SEQ ID NO: 235940 - DNA, 25 bp, SARS Virus
gtcatgcggaaacaggtcgagatga

SEQ ID NO: 235941 - DNA, 25 bp, SARS Virus
tcatgcggaaaacggtcgagatgat

SEQ ID NO: 235942 - DNA, 25 bp, SARS Virus
catgcggaaaaacgtcgagatgatc

SEQ ID NO: 235943 - DNA, 25 bp, SARS Virus
atgcggaaaaagctcgagatgatct

SEQ ID NO: 235944 - DNA, 25 bp, SARS Virus
tgcggaaaaaggccgagatgatctg

SEQ ID NO: 235945 - DNA, 25 bp, SARS Virus
gcggaaaaaggtcgagatgatctgg

SEQ ID NO: 235946 - DNA, 25 bp, SARS Virus
cggaaaaaggtccagatgatctggt

SEQ ID NO: 235947 - DNA, 25 bp, SARS Virus
ggaaaaaggtcgcgatgatctggtg

SEQ ID NO: 235948 - DNA, 25 bp, SARS Virus
gaaaaaggtcgacatgatctggtgt

SEQ ID NO: 235949 - DNA, 25 bp, SARS Virus
aaaaaggtcgagctgatctggtgtt

SEQ ID NO: 235950 - DNA, 25 bp, SARS Virus
aaaaggtcgagacgatctggtgttc

SEQ ID NO: 235951 - DNA, 25 bp, SARS Virus
aaaggtcgagatcatctggtgttca

SEQ ID NO: 235952 - DNA, 25 bp, SARS Virus
aaggtcgagatgctctggtgttcac

SEQ ID NO: 235953 - DNA, 25 bp, SARS Virus
aggtcgagatgacctggtgttcacg

SEQ ID NO: 235954 - DNA, 25 bp, SARS Virus
ggtcgagatgatctggtgttcacgg

SEQ ID NO: 235955 - DNA, 25 bp, SARS Virus
gtcgagatgatccggtgttcacggt

SEQ ID NO: 235956 - DNA, 25 bp, SARS Virus
tcgagatgatctcgtgttcacggta

SEQ ID NO: 235957 - DNA, 25 bp, SARS Virus
cgagatgatctgctgttcacggtaa

SEQ ID NO: 235958 - DNA, 25 bp, SARS Virus
gagatgatctggcgttcacggtaaa

SEQ ID NO: 235959 - DNA, 25 bp, SARS Virus
agatgatctggtcttcacggtaaaa

SEQ ID NO: 235960 - DNA, 25 bp, SARS Virus
gatgatctggtgctcacggtaaaaa

SEQ ID NO: 235961 - DNA, 25 bp, SARS Virus
atgatctggtgtccacggtaaaaac

SEQ ID NO: 235962 - DNA, 25 bp, SARS Virus
tgatctggtgttcacggtaaaaact

SEQ ID NO: 235963 - DNA, 25 bp, SARS Virus
gatctggtgttcccggtaaaaactc

SEQ ID NO: 235964 - DNA, 25 bp, SARS Virus
atctggtgttcacggtaaaaactcc

SEQ ID NO: 235965 - DNA, 25 bp, SARS Virus
tctggtgttcaccgtaaaaactcca

SEQ ID NO: 235966 - DNA, 25 bp, SARS Virus
ctggtgttcacgctaaaaactccac

SEQ ID NO: 235967 - DNA, 25 bp, SARS Virus
tggtgttcacggcaaaaactccaca

SEQ ID NO: 235968 - DNA, 25 bp, SARS Virus
ggtgttcacggtcaaaactccacaa

SEQ ID NO: 235969 - DNA, 25 bp, SARS Virus
gtgttcacggtacaaactccacaag

SEQ ID NO: 235970 - DNA, 25 bp, SARS Virus
tgttcacggtaacaactccacaagt

SEQ ID NO: 235971 - DNA, 25 bp, SARS Virus
gttcacggtaaacactccacaagtg

SEQ ID NO: 235972 - DNA, 25 bp, SARS Virus
ttcacggtaaaacctccacaagtgc

SEQ ID NO: 235973 - DNA, 25 bp, SARS Virus
tcacggtaaaaactccacaagtgca

SEQ ID NO: 235974 - DNA, 25 bp, SARS Virus
cacggtaaaaaccccacaagtgcac

SEQ ID NO: 235975 - DNA, 25 bp, SARS Virus
acggtaaaaactccacaagtgcacg

SEQ ID NO: 235976 - DNA, 25 bp, SARS Virus
cggtaaaaactccacaagtgcacgg

SEQ ID NO: 235977 - DNA, 25 bp, SARS Virus
ggtaaaaactccccaagtgcacgga

SEQ ID NO: 235978 - DNA, 25 bp, SARS Virus
gtaaaaactccacaagtgcacggag

SEQ ID NO: 235979 - DNA, 25 bp, SARS Virus
taaaaactccaccagtgcacggagg

SEQ ID NO: 235980 - DNA, 25 bp, SARS Virus
aaaaactccacacgtgcacggaggc

SEQ ID NO: 235981 - DNA, 25 bp, SARS Virus
aaaactccacaactgcacggaggct

SEQ ID NO: 235982 - DNA, 25 bp, SARS Virus
aaactccacaagcgcacggaggcta

SEQ ID NO: 235983 - DNA, 25 bp, SARS Virus
aactccacaagtccacggaggctat

SEQ ID NO: 235984 - DNA, 25 bp, SARS Virus
actccacaagtgcacggaggctatc

SEQ ID NO: 235985 - DNA, 25 bp, SARS Virus
ctccacaagtgcccggaggctatcc

SEQ ID NO: 235986 - DNA, 25 bp, SARS Virus
tccacaagtgcacggaggctatccc

SEQ ID NO: 235987 - DNA, 25 bp, SARS Virus
ccacaagtgcaccgaggctatcccg

SEQ ID NO: 235988 - DNA, 25 bp, SARS Virus
cacaagtgcacgcaggctatcccgg

SEQ ID NO: 235989 - DNA, 25 bp, SARS Virus
acaagtgcacggcggctatcccgga

SEQ ID NO: 235990 - DNA, 25 bp, SARS Virus
caagtgcacggacgctatcccggag

SEQ ID NO: 235991 - DNA, 25 bp, SARS Virus
aagtgcacggagcctatcccggaga

SEQ ID NO: 235992 - DNA, 25 bp, SARS Virus
agtgcacggaggctatcccggagaa

SEQ ID NO: 235993 - DNA, 25 bp, SARS Virus
gtgcacggaggccatcccggagaag

SEQ ID NO: 235994 - DNA, 25 bp, SARS Virus
tgcacggaggctctcccggagaagg

SEQ ID NO: 235995 - DNA, 25 bp, SARS Virus
gcacggaggctaccccggagaaggt

SEQ ID NO: 235996 - DNA, 25 bp, SARS Virus
cacggaggctatcccggagaaggtg

SEQ ID NO: 235997 - DNA, 25 bp, SARS Virus
acggaggctatcccggagaaggtgt

SEQ ID NO: 235998 - DNA, 25 bp, SARS Virus
cggaggctatcccggagaaggtgtc

SEQ ID NO: 235999 - DNA, 25 bp, SARS Virus
ggaggctatccccgagaaggtgtct

SEQ ID NO: 236000 - DNA, 25 bp, SARS Virus
gaggctatcccgcagaaggtgtctc

SEQ ID NO: 236001 - DNA, 25 bp, SARS Virus
aggctatcccggcgaaggtgtctca

SEQ ID NO: 236002 - DNA, 25 bp, SARS Virus
ggctatcccggacaaggtgtctcag

SEQ ID NO: 236003 - DNA, 25 bp, SARS Virus
gctatcccggagcaggtgtctcagg

SEQ ID NO: 236004 - DNA, 25 bp, SARS Virus
ctatcccggagacggtgtctcaggg

SEQ ID NO: 236005 - DNA, 25 bp, SARS Virus
tatcccggagaacgtgtctcagggg

SEQ ID NO: 236006 - DNA, 25 bp, SARS Virus
atcccggagaagctgtctcaggggc

SEQ ID NO: 236007 - DNA, 25 bp, SARS Virus
tcccggagaaggcgtctcaggggct

SEQ ID NO: 236008 - DNA, 25 bp, SARS Virus
cccggagaaggtctctcaggggctt

SEQ ID NO: 236009 - DNA, 25 bp, SARS Virus
ccggagaaggtgcctcaggggcttc

SEQ ID NO: 236010 - DNA, 25 bp, SARS Virus
cggagaaggtgtctcaggggcttcg

SEQ ID NO: 236011 - DNA, 25 bp, SARS Virus
ggagaaggtgtcccaggggcttcgg

SEQ ID NO: 236012 - DNA, 25 bp, SARS Virus
gagaaggtgtctcaggggcttcggt

SEQ ID NO: 236013 - DNA, 25 bp, SARS Virus
agaaggtgtctccggggcttcggtg

SEQ ID NO: 236014 - DNA, 25 bp, SARS Virus
gaaggtgtctcacgggcttcggtgc

SEQ ID NO: 236015 - DNA, 25 bp, SARS Virus
aaggtgtctcagcggcttcggtgcg

SEQ ID NO: 236016 - DNA, 25 bp, SARS Virus
aggtgtctcaggcgcttcggtgcgt

SEQ ID NO: 236017 - DNA, 25 bp, SARS Virus
ggtgtctcagggccttcggtgcgtg

SEQ ID NO: 236018 - DNA, 25 bp, SARS Virus
gtgtctcaggggcttcggtgcgtga

SEQ ID NO: 236019 - DNA, 25 bp, SARS Virus
tgtctcaggggcctcggtgcgtgat

SEQ ID NO: 236020 - DNA, 25 bp, SARS Virus
gtctcaggggctccggtgcgtgatc

SEQ ID NO: 236021 - DNA, 25 bp, SARS Virus
tctcaggggcttcggtgcgtgatcg

SEQ ID NO: 236022 - DNA, 25 bp, SARS Virus
ctcaggggcttccgtgcgtgatcgt

SEQ ID NO: 236023 - DNA, 25 bp, SARS Virus
tcaggggcttcgctgcgtgatcgtg

SEQ ID NO: 236024 - DNA, 25 bp, SARS Virus
caggggcttcggcgcgtgatcgtgc

SEQ ID NO: 236025 - DNA, 25 bp, SARS Virus
aggggcttcggtccgtgatcgtgca

SEQ ID NO: 236026 - DNA, 25 bp, SARS Virus
ggggcttcggtgcgtgatcgtgcag

SEQ ID NO: 236027 - DNA, 25 bp, SARS Virus
gggcttcggtgcctgatcgtgcaga

SEQ ID NO: 236028 - DNA, 25 bp, SARS Virus
ggcttcggtgcgcgatcgtgcagag

SEQ ID NO: 236029 - DNA, 25 bp, SARS Virus
gcttcggtgcgtcatcgtgcagaga

SEQ ID NO: 236030 - DNA, 25 bp, SARS Virus
cttcggtgcgtgctcgtgcagagat

SEQ ID NO: 236031 - DNA, 25 bp, SARS Virus
ttcggtgcgtgaccgtgcagagatt

SEQ ID NO: 236032 - DNA, 25 bp, SARS Virus
tcggtgcgtgatcgtgcagagattg

SEQ ID NO: 236033 - DNA, 25 bp, SARS Virus
cggtgcgtgatcctgcagagattgg

SEQ ID NO: 236034 - DNA, 25 bp, SARS Virus
ggtgcgtgatcgcgcagagattgga

SEQ ID NO: 236035 - DNA, 25 bp, SARS Virus
gtgcgtgatcgtccagagattggac

SEQ ID NO: 236036 - DNA, 25 bp, SARS Virus
tgcgtgatcgtgcagagattggact

SEQ ID NO: 236037 - DNA, 25 bp, SARS Virus
gcgtgatcgtgccgagattggactt

SEQ ID NO: 236038 - DNA, 25 bp, SARS Virus
cgtgatcgtgcacagattggacttc

SEQ ID NO: 236039 - DNA, 25 bp, SARS Virus
gtgatcgtgcagcgattggacttcc

SEQ ID NO: 236040 - DNA, 25 bp, SARS Virus
tgatcgtgcagacattggacttcct

SEQ ID NO: 236041 - DNA, 25 bp, SARS Virus
gatcgtgcagagcttggacttcctg

SEQ ID NO: 236042 - DNA, 25 bp, SARS Virus
atcgtgcagagactggacttcctgt

SEQ ID NO: 236043 - DNA, 25 bp, SARS Virus
tcgtgcagagatcggacttcctgtc

SEQ ID NO: 236044 - DNA, 25 bp, SARS Virus
cgtgcagagattcgacttcctgtcc

SEQ ID NO: 236045 - DNA, 25 bp, SARS Virus
gtgcagagattgcacttcctgtccg

SEQ ID NO: 236046 - DNA, 25 bp, SARS Virus
tgcagagattggccttcctgtccgt

SEQ ID NO: 236047 - DNA, 25 bp, SARS Virus
gcagagattggacttcctgtccgtt

SEQ ID NO: 236048 - DNA, 25 bp, SARS Virus
cagagattggacctcctgtccgttt

SEQ ID NO: 236049 - DNA, 25 bp, SARS Virus
agagattggactccctgtccgtttg

SEQ ID NO: 236050 - DNA, 25 bp, SARS Virus
gagattggacttcctgtccgtttga

SEQ ID NO: 236051 - DNA, 25 bp, SARS Virus
agattggacttcctgtccgtttgac

SEQ ID NO: 236052 - DNA, 25 bp, SARS Virus
gattggacttcccgtccgtttgact

SEQ ID NO: 236053 - DNA, 25 bp, SARS Virus
attggacttcctctccgtttgactc

SEQ ID NO: 236054 - DNA, 25 bp, SARS Virus
ttggacttcctgcccgtttgactca

SEQ ID NO: 236055 - DNA, 25 bp, SARS Virus
tggacttcctgtccgtttgactcaa

SEQ ID NO: 236056 - DNA, 25 bp, SARS Virus
ggacttcctgtccgtttgactcaac

SEQ ID NO: 236057 - DNA, 25 bp, SARS Virus
gacttcctgtccctttgactcaacc

SEQ ID NO: 236058 - DNA, 25 bp, SARS Virus
acttcctgtccgcttgactcaacct

SEQ ID NO: 236059 - DNA, 25 bp, SARS Virus
cttcctgtccgtctgactcaacctg

SEQ ID NO: 236060 - DNA, 25 bp, SARS Virus
ttcctgtccgttcgactcaacctgc

SEQ ID NO: 236061 - DNA, 25 bp, SARS Virus
tcctgtccgtttcactcaacctgca

SEQ ID NO: 236062 - DNA, 25 bp, SARS Virus
cctgtccgtttgcctcaacctgcac

SEQ ID NO: 236063 - DNA, 25 bp, SARS Virus
ctgtccgtttgactcaacctgcaca

SEQ ID NO: 236064 - DNA, 25 bp, SARS Virus
tgtccgtttgacccaacctgcacac

SEQ ID NO: 236065 - DNA, 25 bp, SARS Virus
gtccgtttgactcaacctgcacaca

SEQ ID NO: 236066 - DNA, 25 bp, SARS Virus
tccgtttgactccacctgcacacaa

SEQ ID NO: 236067 - DNA, 25 bp, SARS Virus
ccgtttgactcaccctgcacacaaa

SEQ ID NO: 236068 - DNA, 25 bp, SARS Virus
cgtttgactcaacctgcacacaaaa

SEQ ID NO: 236069 - DNA, 25 bp, SARS Virus
gtttgactcaacctgcacacaaaag

SEQ ID NO: 236070 - DNA, 25 bp, SARS Virus
tttgactcaacccgcacacaaaaga

SEQ ID NO: 236071 - DNA, 25 bp, SARS Virus
ttgactcaacctccacacaaaagag

SEQ ID NO: 236072 - DNA, 25 bp, SARS Virus
tgactcaacctgcacacaaaagagc

SEQ ID NO: 236073 - DNA, 25 bp, SARS Virus
gactcaacctgcccacaaaagagca

SEQ ID NO: 236074 - DNA, 25 bp, SARS Virus
actcaacctgcacacaaaagagcaa

SEQ ID NO: 236075 - DNA, 25 bp, SARS Virus
ctcaacctgcacccaaaagagcaac

SEQ ID NO: 236076 - DNA, 25 bp, SARS Virus
tcaacctgcacacaaaagagcaact

SEQ ID NO: 236077 - DNA, 25 bp, SARS Virus
caacctgcacaccaaagagcaactg

SEQ ID NO: 236078 - DNA, 25 bp, SARS Virus
aacctgcacacacaagagcaactgt

SEQ ID NO: 236079 - DNA, 25 bp, SARS Virus
acctgcacacaacagagcaactgtg

SEQ ID NO: 236080 - DNA, 25 bp, SARS Virus
cctgcacacaaacgagcaactgtgg

SEQ ID NO: 236081 - DNA, 25 bp, SARS Virus
ctgcacacaaaacagcaactgtggt

SEQ ID NO: 236082 - DNA, 25 bp, SARS Virus
tgcacacaaaagcgcaactgtggtt

SEQ ID NO: 236083 - DNA, 25 bp, SARS Virus
gcacacaaaagaccaactgtggttc

SEQ ID NO: 236084 - DNA, 25 bp, SARS Virus
cacacaaaagagcaactgtggttct

SEQ ID NO: 236085 - DNA, 25 bp, SARS Virus
acacaaaagagccactgtggttctt

SEQ ID NO: 236086 - DNA, 25 bp, SARS Virus
cacaaaagagcacctgtggttcttg

SEQ ID NO: 236087 - DNA, 25 bp, SARS Virus
acaaaagagcaactgtggttcttgt

SEQ ID NO: 236088 - DNA, 25 bp, SARS Virus
caaaagagcaaccgtggttcttgtt

SEQ ID NO: 236089 - DNA, 25 bp, SARS Virus
aaaagagcaactctggttcttgttc

SEQ ID NO: 236090 - DNA, 25 bp, SARS Virus
aaagagcaactgcggttcttgttcc

SEQ ID NO: 236091 - DNA, 25 bp, SARS Virus
aagagcaactgtcgttcttgttccg

SEQ ID NO: 236092 - DNA, 25 bp, SARS Virus
agagcaactgtgcttcttgttccga

SEQ ID NO: 236093 - DNA, 25 bp, SARS Virus
gagcaactgtggctcttgttccgag

SEQ ID NO: 236094 - DNA, 25 bp, SARS Virus
agcaactgtggtccttgttccgaga

SEQ ID NO: 236095 - DNA, 25 bp, SARS Virus
gcaactgtggttcttgttccgagag

SEQ ID NO: 236096 - DNA, 25 bp, SARS Virus
caactgtggttcctgttccgagagg

SEQ ID NO: 236097 - DNA, 25 bp, SARS Virus
aactgtggttctcgttccgagaggt

SEQ ID NO: 236098 - DNA, 25 bp, SARS Virus
actgtggttcttcttccgagaggta

SEQ ID NO: 236099 - DNA, 25 bp, SARS Virus
ctgtggttcttgctccgagaggtag

SEQ ID NO: 236100 - DNA, 25 bp, SARS Virus
tgtggttcttgtcccgagaggtaga

SEQ ID NO: 236101 - DNA, 25 bp, SARS Virus
gtggttcttgttccgagaggtagaa

SEQ ID NO: 236102 - DNA, 25 bp, SARS Virus
tggttcttgttccgagaggtagaat

SEQ ID NO: 236103 - DNA, 25 bp, SARS Virus
ggttcttgttcccagaggtagaatg

SEQ ID NO: 236104 - DNA, 25 bp, SARS Virus
gttcttgttccgcgaggtagaatgg

SEQ ID NO: 236105 - DNA, 25 bp, SARS Virus
ttcttgttccgacaggtagaatgga

SEQ ID NO: 236106 - DNA, 25 bp, SARS Virus
tcttgttccgagcggtagaatggaa

SEQ ID NO: 236107 - DNA, 25 bp, SARS Virus
cttgttccgagacgtagaatggaaa

SEQ ID NO: 236108 - DNA, 25 bp, SARS Virus
ttgttccgagagctagaatggaaag

SEQ ID NO: 236109 - DNA, 25 bp, SARS Virus
tgttccgagaggcagaatggaaagc

SEQ ID NO: 236110 - DNA, 25 bp, SARS Virus
gttccgagaggtcgaatggaaagcc

SEQ ID NO: 236111 - DNA, 25 bp, SARS Virus
ttccgagaggtacaatggaaagcca

SEQ ID NO: 236112 - DNA, 25 bp, SARS Virus
tccgagaggtagcatggaaagccag

SEQ ID NO: 236113 - DNA, 25 bp, SARS Virus
ccgagaggtagactggaaagccagt

SEQ ID NO: 236114 - DNA, 25 bp, SARS Virus
cgagaggtagaacggaaagccagtg

SEQ ID NO: 236115 - DNA, 25 bp, SARS Virus
gagaggtagaatcgaaagccagtgt

SEQ ID NO: 236116 - DNA, 25 bp, SARS Virus
agaggtagaatgcaaagccagtgtg

SEQ ID NO: 236117 - DNA, 25 bp, SARS Virus
gaggtagaatggcaagccagtgtgg

SEQ ID NO: 236118 - DNA, 25 bp, SARS Virus
aggtagaatggacagccagtgtggg

SEQ ID NO: 236119 - DNA, 25 bp, SARS Virus
ggtagaatggaacgccagtgtgggc

SEQ ID NO: 236120 - DNA, 25 bp, SARS Virus
gtagaatggaaacccagtgtgggcc

SEQ ID NO: 236121 - DNA, 25 bp, SARS Virus
tagaatggaaagccagtgtgggcct

SEQ ID NO: 236122 - DNA, 25 bp, SARS Virus
agaatggaaagccagtgtgggcctg

SEQ ID NO: 236123 - DNA, 25 bp, SARS Virus
gaatggaaagcccgtgtgggcctgc

SEQ ID NO: 236124 - DNA, 25 bp, SARS Virus
aatggaaagccactgtgggcctgct

SEQ ID NO: 236125 - DNA, 25 bp, SARS Virus
atggaaagccagcgtgggcctgctt

SEQ ID NO: 236126 - DNA, 25 bp, SARS Virus
tggaaagccagtctgggcctgcttt

SEQ ID NO: 236127 - DNA, 25 bp, SARS Virus
ggaaagccagtgcgggcctgctttg

SEQ ID NO: 236128 - DNA, 25 bp, SARS Virus
gaaagccagtgtcggcctgctttgg

SEQ ID NO: 236129 - DNA, 25 bp, SARS Virus
aaagccagtgtgcgcctgctttgga

SEQ ID NO: 236130 - DNA, 25 bp, SARS Virus
aagccagtgtggccctgctttggat

SEQ ID NO: 236131 - DNA, 25 bp, SARS Virus
agccagtgtgggcctgctttggatc

SEQ ID NO: 236132 - DNA, 25 bp, SARS Virus
gccagtgtgggcctgctttggatcc

SEQ ID NO: 236133 - DNA, 25 bp, SARS Virus
ccagtgtgggcccgctttggatcca

SEQ ID NO: 236134 - DNA, 25 bp, SARS Virus
cagtgtgggcctcctttggatccat

SEQ ID NO: 236135 - DNA, 25 bp, SARS Virus
agtgtgggcctgctttggatccata

SEQ ID NO: 236136 - DNA, 25 bp, SARS Virus
gtgtgggcctgccttggatccatac

SEQ ID NO: 236137 - DNA, 25 bp, SARS Virus
tgtgggcctgctctggatccatacg

SEQ ID NO: 236138 - DNA, 25 bp, SARS Virus
gtgggcctgcttcggatccatacga

SEQ ID NO: 236139 - DNA, 25 bp, SARS Virus
tgggcctgctttcgatccatacgac

SEQ ID NO: 236140 - DNA, 25 bp, SARS Virus
gggcctgctttgcatccatacgact

SEQ ID NO: 236141 - DNA, 25 bp, SARS Virus
ggcctgctttggctccatacgacta

SEQ ID NO: 236142 - DNA, 25 bp, SARS Virus
gcctgctttggacccatacgactac

SEQ ID NO: 236143 - DNA, 25 bp, SARS Virus
cctgctttggatccatacgactact

SEQ ID NO: 236144 - DNA, 25 bp, SARS Virus
ctgctttggatccatacgactacta

SEQ ID NO: 236145 - DNA, 25 bp, SARS Virus
tgctttggatccctacgactactag

SEQ ID NO: 236146 - DNA, 25 bp, SARS Virus
gctttggatccacacgactactagc

SEQ ID NO: 236147 - DNA, 25 bp, SARS Virus
ctttggatccatccgactactagct

SEQ ID NO: 236148 - DNA, 25 bp, SARS Virus
tttggatccatacgactactagctg

SEQ ID NO: 236149 - DNA, 25 bp, SARS Virus
ttggatccataccactactagctga

SEQ ID NO: 236150 - DNA, 25 bp, SARS Virus
tggatccatacgcctactagctgac

SEQ ID NO: 236151 - DNA, 25 bp, SARS Virus
ggatccatacgactactagctgacg

SEQ ID NO: 236152 - DNA, 25 bp, SARS Virus
gatccatacgaccactagctgacgt

SEQ ID NO: 236153 - DNA, 25 bp, SARS Virus
atccatacgactcctagctgacgtt

SEQ ID NO: 236154 - DNA, 25 bp, SARS Virus
tccatacgactactagctgacgttg

SEQ ID NO: 236155 - DNA, 25 bp, SARS Virus
ccatacgactaccagctgacgttgt

SEQ ID NO: 236156 - DNA, 25 bp, SARS Virus
catacgactactcgctgacgttgtg

SEQ ID NO: 236157 - DNA, 25 bp, SARS Virus
atacgactactacctgacgttgtgc

SEQ ID NO: 236158 - DNA, 25 bp, SARS Virus
tacgactactagctgacgttgtgcc

SEQ ID NO: 236159 - DNA, 25 bp, SARS Virus
acgactactagccgacgttgtgcct

SEQ ID NO: 236160 - DNA, 25 bp, SARS Virus
cgactactagctcacgttgtgcctg

SEQ ID NO: 236161 - DNA, 25 bp, SARS Virus
gactactagctgccgttgtgcctgc

SEQ ID NO: 236162 - DNA, 25 bp, SARS Virus
actactagctgacgttgtgcctgct

SEQ ID NO: 236163 - DNA, 25 bp, SARS Virus
ctactagctgaccttgtgcctgctt

SEQ ID NO: 236164 - DNA, 25 bp, SARS Virus
tactagctgacgctgtgcctgcttt

SEQ ID NO: 236165 - DNA, 25 bp, SARS Virus
actagctgacgtcgtgcctgctttg

SEQ ID NO: 236166 - DNA, 25 bp, SARS Virus
ctagctgacgttctgcctgctttgg

SEQ ID NO: 236167 - DNA, 25 bp, SARS Virus
tagctgacgttgcgcctgctttggc

SEQ ID NO: 236168 - DNA, 25 bp, SARS Virus
agctgacgttgtccctgctttggca

SEQ ID NO: 236169 - DNA, 25 bp, SARS Virus
gctgacgttgtgcctgctttggcat

SEQ ID NO: 236170 - DNA, 25 bp, SARS Virus
ctgacgttgtgcctgctttggcatt

SEQ ID NO: 236171 - DNA, 25 bp, SARS Virus
tgacgttgtgcccgctttggcattc

SEQ ID NO: 236172 - DNA, 25 bp, SARS Virus
gacgttgtgcctcctttggcattcg

SEQ ID NO: 236173 - DNA, 25 bp, SARS Virus
acgttgtgcctgctttggcattcgt

SEQ ID NO: 236174 - DNA, 25 bp, SARS Virus
cgttgtgcctgccttggcattcgtc

SEQ ID NO: 236175 - DNA, 25 bp, SARS Virus
gttgtgcctgctctggcattcgtca

SEQ ID NO: 236176 - DNA, 25 bp, SARS Virus
ttgtgcctgcttcggcattcgtcag

SEQ ID NO: 236177 - DNA, 25 bp, SARS Virus
tgtgcctgctttcgcattcgtcaga

SEQ ID NO: 236178 - DNA, 25 bp, SARS Virus
gtgcctgctttgccattcgtcagac

SEQ ID NO: 236179 - DNA, 25 bp, SARS Virus
tgcctgctttggcattcgtcagacg

SEQ ID NO: 236180 - DNA, 25 bp, SARS Virus
gcctgctttggccttcgtcagacgt

SEQ ID NO: 236181 - DNA, 25 bp, SARS Virus
cctgctttggcactcgtcagacgtc

SEQ ID NO: 236182 - DNA, 25 bp, SARS Virus
ctgctttggcatccgtcagacgtct

SEQ ID NO: 236183 - DNA, 25 bp, SARS Virus
tgctttggcattcgtcagacgtctt

SEQ ID NO: 236184 - DNA, 25 bp, SARS Virus
gctttggcattcctcagacgtcttc

SEQ ID NO: 236185 - DNA, 25 bp, SARS Virus
ctttggcattcgccagacgtcttct

SEQ ID NO: 236186 - DNA, 25 bp, SARS Virus
tttggcattcgtcagacgtcttctc

SEQ ID NO: 236187 - DNA, 25 bp, SARS Virus
ttggcattcgtccgacgtcttctcc

SEQ ID NO: 236188 - DNA, 25 bp, SARS Virus
tggcattcgtcacacgtcttctccc

SEQ ID NO: 236189 - DNA, 25 bp, SARS Virus
ggcattcgtcagccgtcttctccct

SEQ ID NO: 236190 - DNA, 25 bp, SARS Virus
gcattcgtcagacgtcttctccctg

SEQ ID NO: 236191 - DNA, 25 bp, SARS Virus
cattcgtcagacctcttctccctgc

SEQ ID NO: 236192 - DNA, 25 bp, SARS Virus
attcgtcagacgccttctccctgct

SEQ ID NO: 236193 - DNA, 25 bp, SARS Virus
ttcgtcagacgtcttctccctgctc

SEQ ID NO: 236194 - DNA, 25 bp, SARS Virus
tcgtcagacgtcctctccctgctca

SEQ ID NO: 236195 - DNA, 25 bp, SARS Virus
cgtcagacgtctcctccctgctcaa

SEQ ID NO: 236196 - DNA, 25 bp, SARS Virus
gtcagacgtcttctccctgctcaat

SEQ ID NO: 236197 - DNA, 25 bp, SARS Virus
tcagacgtcttccccctgctcaatg

SEQ ID NO: 236198 - DNA, 25 bp, SARS Virus
cagacgtcttctccctgctcaatga

SEQ ID NO: 236199 - DNA, 25 bp, SARS Virus
agacgtcttctccctgctcaatgag

SEQ ID NO: 236200 - DNA, 25 bp, SARS Virus
gacgtcttctccctgctcaatgagc

SEQ ID NO: 236201 - DNA, 25 bp, SARS Virus
acgtcttctccccgctcaatgagca

SEQ ID NO: 236202 - DNA, 25 bp, SARS Virus
cgtcttctccctcctcaatgagcaa

SEQ ID NO: 236203 - DNA, 25 bp, SARS Virus
gtcttctccctgctcaatgagcaaa

SEQ ID NO: 236204 - DNA, 25 bp, SARS Virus
tcttctccctgcccaatgagcaaag

SEQ ID NO: 236205 - DNA, 25 bp, SARS Virus
cttctccctgctcaatgagcaaaga

SEQ ID NO: 236206 - DNA, 25 bp, SARS Virus
ttctccctgctccatgagcaaagaa

SEQ ID NO: 236207 - DNA, 25 bp, SARS Virus
tctccctgctcactgagcaaagaac

SEQ ID NO: 236208 - DNA, 25 bp, SARS Virus
ctccctgctcaacgagcaaagaaca

SEQ ID NO: 236209 - DNA, 25 bp, SARS Virus
tccctgctcaatcagcaaagaacag

SEQ ID NO: 236210 - DNA, 25 bp, SARS Virus
ccctgctcaatgcgcaaagaacagt

SEQ ID NO: 236211 - DNA, 25 bp, SARS Virus
cctgctcaatgaccaaagaacagtt

SEQ ID NO: 236212 - DNA, 25 bp, SARS Virus
ctgctcaatgagcaaagaacagttg

SEQ ID NO: 236213 - DNA, 25 bp, SARS Virus
tgctcaatgagccaagaacagttgc

SEQ ID NO: 236214 - DNA, 25 bp, SARS Virus
gctcaatgagcacagaacagttgct

SEQ ID NO: 236215 - DNA, 25 bp, SARS Virus
ctcaatgagcaacgaacagttgctg

SEQ ID NO: 236216 - DNA, 25 bp, SARS Virus
tcaatgagcaaacaacagttgctgt

SEQ ID NO: 236217 - DNA, 25 bp, SARS Virus
caatgagcaaagcacagttgctgtc

SEQ ID NO: 236218 - DNA, 25 bp, SARS Virus
aatgagcaaagaccagttgctgtca

SEQ ID NO: 236219 - DNA, 25 bp, SARS Virus
atgagcaaagaacagttgctgtcat

SEQ ID NO: 236220 - DNA, 25 bp, SARS Virus
tgagcaaagaaccgttgctgtcatt

SEQ ID NO: 236221 - DNA, 25 bp, SARS Virus
gagcaaagaacacttgctgtcattt

SEQ ID NO: 236222 - DNA, 25 bp, SARS Virus
agcaaagaacagctgctgtcatttt

SEQ ID NO: 236223 - DNA, 25 bp, SARS Virus
gcaaagaacagtcgctgtcatttta

SEQ ID NO: 236224 - DNA, 25 bp, SARS Virus
caaagaacagttcctgtcattttaa

SEQ ID NO: 236225 - DNA, 25 bp, SARS Virus
aataatggcaaggatgcttcttctt

SEQ ID NO: 236226 - DNA, 25 bp, SARS Virus
ataatggcaagagtgcttcttcttg

SEQ ID NO: 236227 - DNA, 25 bp, SARS Virus
taatggcaagaaggcttcttcttgt

SEQ ID NO: 236228 - DNA, 25 bp, SARS Virus
aatggcaagaatgcttcttcttgta

SEQ ID NO: 236229 - DNA, 25 bp, SARS Virus
atggcaagaatggttcttcttgtaa

SEQ ID NO: 236230 - DNA, 25 bp, SARS Virus
tggcaagaatgcgtcttcttgtaac

SEQ ID NO: 236231 - DNA, 25 bp, SARS Virus
ggcaagaatgctgcttcttgtaacg

SEQ ID NO: 236232 - DNA, 25 bp, SARS Virus
gcaagaatgcttgttcttgtaacgc

SEQ ID NO: 236233 - DNA, 25 bp, SARS Virus
caagaatgcttcgtcttgtaacgcc

SEQ ID NO: 236234 - DNA, 25 bp, SARS Virus
aagaatgcttctgcttgtaacgcca

SEQ ID NO: 236235 - DNA, 25 bp, SARS Virus
agaatgcttcttgttgtaacgccat

SEQ ID NO: 236236 - DNA, 25 bp, SARS Virus
gaatgcttcttcgtgtaacgccata

SEQ ID NO: 236237 - DNA, 25 bp, SARS Virus
aatgcttcttctggtaacgccatac

SEQ ID NO: 236238 - DNA, 25 bp, SARS Virus
atgcttcttcttgtaacgccatacg

SEQ ID NO: 236239 - DNA, 25 bp, SARS Virus
tgcttcttcttggaacgccatacgt

SEQ ID NO: 236240 - DNA, 25 bp, SARS Virus
gcttcttcttgtgacgccatacgtt

SEQ ID NO: 236241 - DNA, 25 bp, SARS Virus
cttcttcttgtagcgccatacgtta

SEQ ID NO: 236242 - DNA, 25 bp, SARS Virus
ttcttcttgtaaggccatacgttaa

SEQ ID NO: 236243 - DNA, 25 bp, SARS Virus
tcttcttgtaacgccatacgttaac

SEQ ID NO: 236244 - DNA, 25 bp, SARS Virus
cttcttgtaacggcatacgttaacc

SEQ ID NO: 236245 - DNA, 25 bp, SARS Virus
ttcttgtaacgcgatacgttaaccc

SEQ ID NO: 236246 - DNA, 25 bp, SARS Virus
tcttgtaacgccgtacgttaacccc

SEQ ID NO: 236247 - DNA, 25 bp, SARS Virus
cttgtaacgccagacgttaacccca

SEQ ID NO: 236248 - DNA, 25 bp, SARS Virus
ttgtaacgccatgcgttaaccccaa

SEQ ID NO: 236249 - DNA, 25 bp, SARS Virus
tgtaacgccataggttaaccccaaa

SEQ ID NO: 236250 - DNA, 25 bp, SARS Virus
gtaacgccatacgttaaccccaaag

SEQ ID NO: 236251 - DNA, 25 bp, SARS Virus
taacgccatacggtaaccccaaagc

SEQ ID NO: 236252 - DNA, 25 bp, SARS Virus
aacgccatacgtgaaccccaaagcg

SEQ ID NO: 236253 - DNA, 25 bp, SARS Virus
acgccatacgttgaccccaaagcgg

SEQ ID NO: 236254 - DNA, 25 bp, SARS Virus
cgccatacgttagccccaaagcggg

SEQ ID NO: 236255 - DNA, 25 bp, SARS Virus
gccatacgttaagcccaaagcgggt

SEQ ID NO: 236256 - DNA, 25 bp, SARS Virus
ccatacgttaacgccaaagcgggtg

SEQ ID NO: 236257 - DNA, 25 bp, SARS Virus
catacgttaaccgcaaagcgggtgt

SEQ ID NO: 236258 - DNA, 25 bp, SARS Virus
atacgttaacccgaaagcgggtgta

SEQ ID NO: 236259 - DNA, 25 bp, SARS Virus
tacgttaaccccgaagcgggtgtac

SEQ ID NO: 236260 - DNA, 25 bp, SARS Virus
acgttaaccccagagcgggtgtaca

SEQ ID NO: 236261 - DNA, 25 bp, SARS Virus
cgttaaccccaaggcgggtgtacac

SEQ ID NO: 236262 - DNA, 25 bp, SARS Virus
gttaaccccaaagcgggtgtacacc

SEQ ID NO: 236263 - DNA, 25 bp, SARS Virus
ttaaccccaaagggggtgtacaccg

SEQ ID NO: 236264 - DNA, 25 bp, SARS Virus
taaccccaaagcgggtgtacaccgt

SEQ ID NO: 236265 - DNA, 25 bp, SARS Virus
aaccccaaagcgggtgtacaccgtg

SEQ ID NO: 236266 - DNA, 25 bp, SARS Virus
accccaaagcgggtgtacaccgtgc

SEQ ID NO: 236267 - DNA, 25 bp, SARS Virus
ccccaaagcgggggtacaccgtgct

SEQ ID NO: 236268 - DNA, 25 bp, SARS Virus
cccaaagcgggtgtacaccgtgctc

SEQ ID NO: 236269 - DNA, 25 bp, SARS Virus
ccaaagcgggtggacaccgtgctca

SEQ ID NO: 236270 - DNA, 25 bp, SARS Virus
caaagcgggtgtgcaccgtgctcat

SEQ ID NO: 236271 - DNA, 25 bp, SARS Virus
aaagcgggtgtagaccgtgctcatg

SEQ ID NO: 236272 - DNA, 25 bp, SARS Virus
aagcgggtgtacgccgtgctcatga

SEQ ID NO: 236273 - DNA, 25 bp, SARS Virus
agcgggtgtacagcgtgctcatgag

SEQ ID NO: 236274 - DNA, 25 bp, SARS Virus
gcgggtgtacacggtgctcatgagg

SEQ ID NO: 236275 - DNA, 25 bp, SARS Virus
cgggtgtacaccgtgctcatgaggg

SEQ ID NO: 236276 - DNA, 25 bp, SARS Virus
gggtgtacaccgggctcatgagggt

SEQ ID NO: 236277 - DNA, 25 bp, SARS Virus
ggtgtacaccgtgctcatgagggtc

SEQ ID NO: 236278 - DNA, 25 bp, SARS Virus
gtgtacaccgtggtcatgagggtca

SEQ ID NO: 236279 - DNA, 25 bp, SARS Virus
tgtacaccgtgcgcatgagggtcac

SEQ ID NO: 236280 - DNA, 25 bp, SARS Virus
gtacaccgtgctgatgagggtcaca

SEQ ID NO: 236281 - DNA, 25 bp, SARS Virus
tacaccgtgctcgtgagggtcacaa

SEQ ID NO: 236282 - DNA, 25 bp, SARS Virus
acaccgtgctcaggagggtcacaat

SEQ ID NO: 236283 - DNA, 25 bp, SARS Virus
caccgtgctcatgagggtcacaata

SEQ ID NO: 236284 - DNA, 25 bp, SARS Virus
accgtgctcatgggggtcacaatat

SEQ ID NO: 236285 - DNA, 25 bp, SARS Virus
ccgtgctcatgagggtcacaatatg

SEQ ID NO: 236286 - DNA, 25 bp, SARS Virus
cgtgctcatgagggtcacaatatgg

SEQ ID NO: 236287 - DNA, 25 bp, SARS Virus
gtgctcatgagggtcacaatatggc

SEQ ID NO: 236288 - DNA, 25 bp, SARS Virus
tgctcatgaggggcacaatatggcg

SEQ ID NO: 236289 - DNA, 25 bp, SARS Virus
gctcatgagggtgacaatatggcga

SEQ ID NO: 236290 - DNA, 25 bp, SARS Virus
ctcatgagggtcgcaatatggcgat

SEQ ID NO: 236291 - DNA, 25 bp, SARS Virus
tcatgagggtcagaatatggcgatg

SEQ ID NO: 236292 - DNA, 25 bp, SARS Virus
catgagggtcacgatatggcgatgc

SEQ ID NO: 236293 - DNA, 25 bp, SARS Virus
atgagggtcacagtatggcgatgct

SEQ ID NO: 236294 - DNA, 25 bp, SARS Virus
tgagggtcacaagatggcgatgctg

SEQ ID NO: 236295 - DNA, 25 bp, SARS Virus
gagggtcacaatgtggcgatgctgg

SEQ ID NO: 236296 - DNA, 25 bp, SARS Virus
agggtcacaatagggcgatgctggc

SEQ ID NO: 236297 - DNA, 25 bp, SARS Virus
gggtcacaatatggcgatgctggca

SEQ ID NO: 236298 - DNA, 25 bp, SARS Virus
ggtcacaatatggcgatgctggcat

SEQ ID NO: 236299 - DNA, 25 bp, SARS Virus
gtcacaatatggggatgctggcatg

SEQ ID NO: 236300 - DNA, 25 bp, SARS Virus
tcacaatatggcgatgctggcatga

SEQ ID NO: 236301 - DNA, 25 bp, SARS Virus
cacaatatggcggtgctggcatgac

SEQ ID NO: 236302 - DNA, 25 bp, SARS Virus
acaatatggcgaggctggcatgact

SEQ ID NO: 236303 - DNA, 25 bp, SARS Virus
caatatggcgatgctggcatgactt

SEQ ID NO: 236304 - DNA, 25 bp, SARS Virus
aatatggcgatggtggcatgactta

SEQ ID NO: 236305 - DNA, 25 bp, SARS Virus
atatggcgatgcgggcatgacttac

SEQ ID NO: 236306 - DNA, 25 bp, SARS Virus
tatggcgatgctggcatgacttacg

SEQ ID NO: 236307 - DNA, 25 bp, SARS Virus
atggcgatgctggcatgacttacgg

SEQ ID NO: 236308 - DNA, 25 bp, SARS Virus
tggcgatgctgggatgacttacggc

SEQ ID NO: 236309 - DNA, 25 bp, SARS Virus
ggcgatgctggcgtgacttacggca

SEQ ID NO: 236310 - DNA, 25 bp, SARS Virus
gcgatgctggcaggacttacggcag

SEQ ID NO: 236311 - DNA, 25 bp, SARS Virus
cgatgctggcatgacttacggcagg

SEQ ID NO: 236312 - DNA, 25 bp, SARS Virus
gatgctggcatggcttacggcaggt

SEQ ID NO: 236313 - DNA, 25 bp, SARS Virus
atgctggcatgagttacggcaggta

SEQ ID NO: 236314 - DNA, 25 bp, SARS Virus
tgctggcatgacgtacggcaggtaa

SEQ ID NO: 236315 - DNA, 25 bp, SARS Virus
gctggcatgactgacggcaggtaaa

SEQ ID NO: 236316 - DNA, 25 bp, SARS Virus
ctggcatgacttgcggcaggtaaag

SEQ ID NO: 236317 - DNA, 25 bp, SARS Virus
tggcatgacttagggcaggtaaaga

SEQ ID NO: 236318 - DNA, 25 bp, SARS Virus
ggcatgacttacggcaggtaaagac

SEQ ID NO: 236319 - DNA, 25 bp, SARS Virus
gcatgacttacggcaggtaaagacg

SEQ ID NO: 236320 - DNA, 25 bp, SARS Virus
catgacttacgggaggtaaagacgt

SEQ ID NO: 236321 - DNA, 25 bp, SARS Virus
atgacttacggcgggtaaagacgtt

SEQ ID NO: 236322 - DNA, 25 bp, SARS Virus
tgacttacggcaggtaaagacgttg

SEQ ID NO: 236323 - DNA, 25 bp, SARS Virus
gacttacggcaggtaaagacgttgg

SEQ ID NO: 236324 - DNA, 25 bp, SARS Virus
acttacggcagggaaagacgttggt

SEQ ID NO: 236325 - DNA, 25 bp, SARS Virus
cttacggcaggtgaagacgttggtc

SEQ ID NO: 236326 - DNA, 25 bp, SARS Virus
ttacggcaggtagagacgttggtcg

SEQ ID NO: 236327 - DNA, 25 bp, SARS Virus
tacggcaggtaaggacgttggtcga

SEQ ID NO: 236328 - DNA, 25 bp, SARS Virus
acggcaggtaaagacgttggtcgag

SEQ ID NO: 236329 - DNA, 25 bp, SARS Virus
cggcaggtaaaggcgttggtcgagt

SEQ ID NO: 236330 - DNA, 25 bp, SARS Virus
ggcaggtaaagaggttggtcgagtt

SEQ ID NO: 236331 - DNA, 25 bp, SARS Virus
gcaggtaaagacgttggtcgagttg

SEQ ID NO: 236332 - DNA, 25 bp, SARS Virus
caggtaaagacggtggtcgagttgc

SEQ ID NO: 236333 - DNA, 25 bp, SARS Virus
aggtaaagacgtgggtcgagttgct

SEQ ID NO: 236334 - DNA, 25 bp, SARS Virus
ggtaaagacgttggtcgagttgctg

SEQ ID NO: 236335 - DNA, 25 bp, SARS Virus
gtaaagacgttggtcgagttgctgg

SEQ ID NO: 236336 - DNA, 25 bp, SARS Virus
taaagacgttgggcgagttgctgga

SEQ ID NO: 236337 - DNA, 25 bp, SARS Virus
aaagacgttggtggagttgctggaa

SEQ ID NO: 236338 - DNA, 25 bp, SARS Virus
aagacgttggtcgagttgctggaac

SEQ ID NO: 236339 - DNA, 25 bp, SARS Virus
agacgttggtcgggttgctggaaca

SEQ ID NO: 236340 - DNA, 25 bp, SARS Virus
gacgttggtcgagttgctggaacac

SEQ ID NO: 236341 - DNA, 25 bp, SARS Virus
acgttggtcgaggtgctggaacacc

SEQ ID NO: 236342 - DNA, 25 bp, SARS Virus
cgttggtcgagtggctggaacaccg

SEQ ID NO: 236343 - DNA, 25 bp, SARS Virus
gttggtcgagttgctggaacaccgg

SEQ ID NO: 236344 - DNA, 25 bp, SARS Virus
ttggtcgagttggtggaacaccggc

SEQ ID NO: 236345 - DNA, 25 bp, SARS Virus
tggtcgagttgcgggaacaccggca

SEQ ID NO: 236346 - DNA, 25 bp, SARS Virus
ggtcgagttgctggaacaccggcac

SEQ ID NO: 236347 - DNA, 25 bp, SARS Virus
gtcgagttgctggaacaccggcact

SEQ ID NO: 236348 - DNA, 25 bp, SARS Virus
tcgagttgctgggacaccggcacta

SEQ ID NO: 236349 - DNA, 25 bp, SARS Virus
cgagttgctggagcaccggcactaa

SEQ ID NO: 236350 - DNA, 25 bp, SARS Virus
gagttgctggaagaccggcactaac

SEQ ID NO: 236351 - DNA, 25 bp, SARS Virus
agttgctggaacgccggcactaacc

SEQ ID NO: 236352 - DNA, 25 bp, SARS Virus
gttgctggaacagcggcactaacca

SEQ ID NO: 236353 - DNA, 25 bp, SARS Virus
ttgctggaacacgggcactaaccac

SEQ ID NO: 236354 - DNA, 25 bp, SARS Virus
tgctggaacaccggcactaaccacg

SEQ ID NO: 236355 - DNA, 25 bp, SARS Virus
gctggaacaccggcactaaccacga

SEQ ID NO: 236356 - DNA, 25 bp, SARS Virus
ctggaacaccgggactaaccacgaa

SEQ ID NO: 236357 - DNA, 25 bp, SARS Virus
tggaacaccggcgctaaccacgaat

SEQ ID NO: 236358 - DNA, 25 bp, SARS Virus
ggaacaccggcagtaaccacgaatt

SEQ ID NO: 236359 - DNA, 25 bp, SARS Virus
gaacaccggcacgaaccacgaattc

SEQ ID NO: 236360 - DNA, 25 bp, SARS Virus
aacaccggcactgaccacgaattcc

SEQ ID NO: 236361 - DNA, 25 bp, SARS Virus
acaccggcactagccacgaattccg

SEQ ID NO: 236362 - DNA, 25 bp, SARS Virus
caccggcactaagcacgaattccgt

SEQ ID NO: 236363 - DNA, 25 bp, SARS Virus
accggcactaacgacgaattccgta

SEQ ID NO: 236364 - DNA, 25 bp, SARS Virus
ccggcactaaccgcgaattccgtag

SEQ ID NO: 236365 - DNA, 25 bp, SARS Virus
cggcactaaccaggaattccgtagt

SEQ ID NO: 236366 - DNA, 25 bp, SARS Virus
ggcactaaccacgaattccgtagtc

SEQ ID NO: 236367 - DNA, 25 bp, SARS Virus
gcactaaccacggattccgtagtct

SEQ ID NO: 236368 - DNA, 25 bp, SARS Virus
cactaaccacgagttccgtagtctt

SEQ ID NO: 236369 - DNA, 25 bp, SARS Virus
actaaccacgaagtccgtagtcttg

SEQ ID NO: 236370 - DNA, 25 bp, SARS Virus
ctaaccacgaatgccgtagtcttgc

SEQ ID NO: 236371 - DNA, 25 bp, SARS Virus
taaccacgaattgcgtagtcttgca

SEQ ID NO: 236372 - DNA, 25 bp, SARS Virus
aaccacgaattcggtagtcttgcaa

SEQ ID NO: 236373 - DNA, 25 bp, SARS Virus
accacgaattccgtagtcttgcaaa

SEQ ID NO: 236374 - DNA, 25 bp, SARS Virus
ccacgaattccggagtcttgcaaat

SEQ ID NO: 236375 - DNA, 25 bp, SARS Virus
cacgaattccgtggtcttgcaaatt

SEQ ID NO: 236376 - DNA, 25 bp, SARS Virus
acgaattccgtagtcttgcaaatta

SEQ ID NO: 236377 - DNA, 25 bp, SARS Virus
cgaattccgtaggcttgcaaattac

SEQ ID NO: 236378 - DNA, 25 bp, SARS Virus
gaattccgtagtgttgcaaattact

SEQ ID NO: 236379 - DNA, 25 bp, SARS Virus
aattccgtagtcgtgcaaattactt

SEQ ID NO: 236380 - DNA, 25 bp, SARS Virus
attccgtagtctggcaaattacttg

SEQ ID NO: 236381 - DNA, 25 bp, SARS Virus
ttccgtagtcttgcaaattacttgt

SEQ ID NO: 236382 - DNA, 25 bp, SARS Virus
tccgtagtcttggaaattacttgtg

SEQ ID NO: 236383 - DNA, 25 bp, SARS Virus
ccgtagtcttgcgaattacttgtgt

SEQ ID NO: 236384 - DNA, 25 bp, SARS Virus
cgtagtcttgcagattacttgtgta

SEQ ID NO: 236385 - DNA, 25 bp, SARS Virus
gtagtcttgcaagttacttgtgtat

SEQ ID NO: 236386 - DNA, 25 bp, SARS Virus
tagtcttgcaaagtacttgtgtatc

SEQ ID NO: 236387 - DNA, 25 bp, SARS Virus
agtcttgcaaatgacttgtgtatcc

SEQ ID NO: 236388 - DNA, 25 bp, SARS Virus
gtcttgcaaattgcttgtgtatccc

SEQ ID NO: 236389 - DNA, 25 bp, SARS Virus
tcttgcaaattagttgtgtatcccg

SEQ ID NO: 236390 - DNA, 25 bp, SARS Virus
cttgcaaattacgtgtgtatcccga

SEQ ID NO: 236391 - DNA, 25 bp, SARS Virus
ttgcaaattactggtgtatcccgac

SEQ ID NO: 236392 - DNA, 25 bp, SARS Virus
tgcaaattacttgtgtatcccgaca

SEQ ID NO: 236393 - DNA, 25 bp, SARS Virus
gcaaattacttgggtatcccgacaa

SEQ ID NO: 236394 - DNA, 25 bp, SARS Virus
caaattacttgtgtatcccgacaag

SEQ ID NO: 236395 - DNA, 25 bp, SARS Virus
aaattacttgtggatcccgacaagt

SEQ ID NO: 236396 - DNA, 25 bp, SARS Virus
aattacttgtgtgtcccgacaagtt

SEQ ID NO: 236397 - DNA, 25 bp, SARS Virus
attacttgtgtagcccgacaagttc

SEQ ID NO: 236398 - DNA, 25 bp, SARS Virus
ttacttgtgtatgccgacaagttcg

SEQ ID NO: 236399 - DNA, 25 bp, SARS Virus
tacttgtgtatcgcgacaagttcga

SEQ ID NO: 236400 - DNA, 25 bp, SARS Virus
acttgtgtatccggacaagttcgac

SEQ ID NO: 236401 - DNA, 25 bp, SARS Virus
cttgtgtatcccgacaagttcgacc

SEQ ID NO: 236402 - DNA, 25 bp, SARS Virus
ttgtgtatcccggcaagttcgaccc

SEQ ID NO: 236403 - DNA, 25 bp, SARS Virus
tgtgtatcccgagaagttcgacccc

SEQ ID NO: 236404 - DNA, 25 bp, SARS Virus
gtgtatcccgacgagttcgaccccg

SEQ ID NO: 236405 - DNA, 25 bp, SARS Virus
tgtatcccgacaggttcgaccccgt

SEQ ID NO: 236406 - DNA, 25 bp, SARS Virus
gtatcccgacaagttcgaccccgtc

SEQ ID NO: 236407 - DNA, 25 bp, SARS Virus
tatcccgacaaggtcgaccccgtca

SEQ ID NO: 236408 - DNA, 25 bp, SARS Virus
atcccgacaagtgcgaccccgtcat

SEQ ID NO: 236409 - DNA, 25 bp, SARS Virus
tcccgacaagttggaccccgtcatg

SEQ ID NO: 236410 - DNA, 25 bp, SARS Virus
cccgacaagttcgaccccgtcatgc

SEQ ID NO: 236411 - DNA, 25 bp, SARS Virus
ccgacaagttcggccccgtcatgcg

SEQ ID NO: 236412 - DNA, 25 bp, SARS Virus
cgacaagttcgagcccgtcatgcgg

SEQ ID NO: 236413 - DNA, 25 bp, SARS Virus
gacaagttcgacgccgtcatgcgga

SEQ ID NO: 236414 - DNA, 25 bp, SARS Virus
acaagttcgaccgcgtcatgcggaa

SEQ ID NO: 236415 - DNA, 25 bp, SARS Virus
caagttcgacccggtcatgcggaaa

SEQ ID NO: 236416 - DNA, 25 bp, SARS Virus
aagttcgaccccgtcatgcggaaaa

SEQ ID NO: 236417 - DNA, 25 bp, SARS Virus
agttcgaccccggcatgcggaaaaa

SEQ ID NO: 236418 - DNA, 25 bp, SARS Virus
gttcgaccccgtgatgcggaaaaag

SEQ ID NO: 236419 - DNA, 25 bp, SARS Virus
ttcgaccccgtcgtgcggaaaaagg

SEQ ID NO: 236420 - DNA, 25 bp, SARS Virus
tcgaccccgtcaggcggaaaaaggt

SEQ ID NO: 236421 - DNA, 25 bp, SARS Virus
cgaccccgtcatgcggaaaaaggtc

SEQ ID NO: 236422 - DNA, 25 bp, SARS Virus
gaccccgtcatggggaaaaaggtcg

SEQ ID NO: 236423 - DNA, 25 bp, SARS Virus
accccgtcatgcggaaaaaggtcga

SEQ ID NO: 236424 - DNA, 25 bp, SARS Virus
ccccgtcatgcggaaaaaggtcgag

SEQ ID NO: 236425 - DNA, 25 bp, SARS Virus
cccgtcatgcgggaaaaggtcgaga

SEQ ID NO: 236426 - DNA, 25 bp, SARS Virus
ccgtcatgcggagaaaggtcgagat

SEQ ID NO: 236427 - DNA, 25 bp, SARS Virus
cgtcatgcggaagaaggtcgagatg

SEQ ID NO: 236428 - DNA, 25 bp, SARS Virus
gtcatgcggaaagaggtcgagatga

SEQ ID NO: 236429 - DNA, 25 bp, SARS Virus
tcatgcggaaaagggtcgagatgat

SEQ ID NO: 236430 - DNA, 25 bp, SARS Virus
catgcggaaaaaggtcgagatgatc

SEQ ID NO: 236431 - DNA, 25 bp, SARS Virus
atgcggaaaaaggtcgagatgatct

SEQ ID NO: 236432 - DNA, 25 bp, SARS Virus
tgcggaaaaagggcgagatgatctg

SEQ ID NO: 236433 - DNA, 25 bp, SARS Virus
gcggaaaaaggtggagatgatctgg

SEQ ID NO: 236434 - DNA, 25 bp, SARS Virus
cggaaaaaggtcgagatgatctggt

SEQ ID NO: 236435 - DNA, 25 bp, SARS Virus
ggaaaaaggtcgggatgatctggtg

SEQ ID NO: 236436 - DNA, 25 bp, SARS Virus
gaaaaaggtcgagatgatctggtgt

SEQ ID NO: 236437 - DNA, 25 bp, SARS Virus
aaaaaggtcgaggtgatctggtgtt

SEQ ID NO: 236438 - DNA, 25 bp, SARS Virus
aaaaggtcgagaggatctggtgttc

SEQ ID NO: 236439 - DNA, 25 bp, SARS Virus
aaaggtcgagatgatctggtgttca

SEQ ID NO: 236440 - DNA, 25 bp, SARS Virus
aaggtcgagatggtctggtgttcac

SEQ ID NO: 236441 - DNA, 25 bp, SARS Virus
aggtcgagatgagctggtgttcacg

SEQ ID NO: 236442 - DNA, 25 bp, SARS Virus
ggtcgagatgatgtggtgttcacgg

SEQ ID NO: 236443 - DNA, 25 bp, SARS Virus
gtcgagatgatcgggtgttcacggt

SEQ ID NO: 236444 - DNA, 25 bp, SARS Virus
tcgagatgatctggtgttcacggta

SEQ ID NO: 236445 - DNA, 25 bp, SARS Virus
cgagatgatctggtgttcacggtaa

SEQ ID NO: 236446 - DNA, 25 bp, SARS Virus
gagatgatctggggttcacggtaaa

SEQ ID NO: 236447 - DNA, 25 bp, SARS Virus
agatgatctggtgttcacggtaaaa

SEQ ID NO: 236448 - DNA, 25 bp, SARS Virus
gatgatctggtggtcacggtaaaaa

SEQ ID NO: 236449 - DNA, 25 bp, SARS Virus
atgatctggtgtgcacggtaaaaac

SEQ ID NO: 236450 - DNA, 25 bp, SARS Virus
tgatctggtgttgacggtaaaaact

SEQ ID NO: 236451 - DNA, 25 bp, SARS Virus
gatctggtgttcgcggtaaaaactc

SEQ ID NO: 236452 - DNA, 25 bp, SARS Virus
atctggtgttcagggtaaaaactcc

SEQ ID NO: 236453 - DNA, 25 bp, SARS Virus
tctggtgttcacggtaaaaactcca

SEQ ID NO: 236454 - DNA, 25 bp, SARS Virus
ctggtgttcacggtaaaaactccac

SEQ ID NO: 236455 - DNA, 25 bp, SARS Virus
tggtgttcacgggaaaaactccaca

SEQ ID NO: 236456 - DNA, 25 bp, SARS Virus
ggtgttcacggtgaaaactccacaa

SEQ ID NO: 236457 - DNA, 25 bp, SARS Virus
gtgttcacggtagaaactccacaag

SEQ ID NO: 236458 - DNA, 25 bp, SARS Virus
tgttcacggtaagaactccacaagt

SEQ ID NO: 236459 - DNA, 25 bp, SARS Virus
gttcacggtaaagactccacaagtg

SEQ ID NO: 236460 - DNA, 25 bp, SARS Virus
ttcacggtaaaagctccacaagtgc

SEQ ID NO: 236461 - DNA, 25 bp, SARS Virus
tcacggtaaaaagtccacaagtgca

SEQ ID NO: 236462 - DNA, 25 bp, SARS Virus
cacggtaaaaacgccacaagtgcac

SEQ ID NO: 236463 - DNA, 25 bp, SARS Virus
acggtaaaaactgcacaagtgcacg

SEQ ID NO: 236464 - DNA, 25 bp, SARS Virus
cggtaaaaactcgacaagtgcacgg

SEQ ID NO: 236465 - DNA, 25 bp, SARS Virus
ggtaaaaactccgcaagtgcacgga

SEQ ID NO: 236466 - DNA, 25 bp, SARS Virus
gtaaaaactccagaagtgcacggag

SEQ ID NO: 236467 - DNA, 25 bp, SARS Virus
taaaaactccacgagtgcacggagg

SEQ ID NO: 236468 - DNA, 25 bp, SARS Virus
aaaaactccacaggtgcacggaggc

SEQ ID NO: 236469 - DNA, 25 bp, SARS Virus
aaaactccacaagtgcacggaggct

SEQ ID NO: 236470 - DNA, 25 bp, SARS Virus
aaactccacaagggcacggaggcta

SEQ ID NO: 236471 - DNA, 25 bp, SARS Virus
aactccacaagtgcacggaggctat

SEQ ID NO: 236472 - DNA, 25 bp, SARS Virus
actccacaagtggacggaggctatc

SEQ ID NO: 236473 - DNA, 25 bp, SARS Virus
ctccacaagtgcgcggaggctatcc

SEQ ID NO: 236474 - DNA, 25 bp, SARS Virus
tccacaagtgcagggaggctatccc

SEQ ID NO: 236475 - DNA, 25 bp, SARS Virus
ccacaagtgcacggaggctatcccg

SEQ ID NO: 236476 - DNA, 25 bp, SARS Virus
cacaagtgcacggaggctatcccgg

SEQ ID NO: 236477 - DNA, 25 bp, SARS Virus
acaagtgcacgggggctatcccgga

SEQ ID NO: 236478 - DNA, 25 bp, SARS Virus
caagtgcacggaggctatcccggag

SEQ ID NO: 236479 - DNA, 25 bp, SARS Virus
aagtgcacggaggctatcccggaga

SEQ ID NO: 236480 - DNA, 25 bp, SARS Virus
agtgcacggagggtatcccggagaa

SEQ ID NO: 236481 - DNA, 25 bp, SARS Virus
gtgcacggaggcgatcccggagaag

SEQ ID NO: 236482 - DNA, 25 bp, SARS Virus
tgcacggaggctgtcccggagaagg

SEQ ID NO: 236483 - DNA, 25 bp, SARS Virus
gcacggaggctagcccggagaaggt

SEQ ID NO: 236484 - DNA, 25 bp, SARS Virus
cacggaggctatgccggagaaggtg

SEQ ID NO: 236485 - DNA, 25 bp, SARS Virus
acggaggctatcgcggagaaggtgt

SEQ ID NO: 236486 - DNA, 25 bp, SARS Virus
cggaggctatccgggagaaggtgtc

SEQ ID NO: 236487 - DNA, 25 bp, SARS Virus
ggaggctatcccggagaaggtgtct

SEQ ID NO: 236488 - DNA, 25 bp, SARS Virus
gaggctatcccggagaaggtgtctc

SEQ ID NO: 236489 - DNA, 25 bp, SARS Virus
aggctatcccggggaaggtgtctca

SEQ ID NO: 236490 - DNA, 25 bp, SARS Virus
ggctatcccggagaaggtgtctcag

SEQ ID NO: 236491 - DNA, 25 bp, SARS Virus
gctatcccggaggaggtgtctcagg

SEQ ID NO: 236492 - DNA, 25 bp, SARS Virus
ctatcccggagagggtgtctcaggg

SEQ ID NO: 236493 - DNA, 25 bp, SARS Virus
tatcccggagaaggtgtctcagggg

SEQ ID NO: 236494 - DNA, 25 bp, SARS Virus
atcccggagaaggtgtctcaggggc

SEQ ID NO: 236495 - DNA, 25 bp, SARS Virus
tcccggagaaggggtctcaggggct

SEQ ID NO: 236496 - DNA, 25 bp, SARS Virus
cccggagaaggtgtctcaggggctt

SEQ ID NO: 236497 - DNA, 25 bp, SARS Virus
ccggagaaggtggctcaggggcttc

SEQ ID NO: 236498 - DNA, 25 bp, SARS Virus
cggagaaggtgtgtcaggggcttcg

SEQ ID NO: 236499 - DNA, 25 bp, SARS Virus
ggagaaggtgtcgcaggggcttcgg

SEQ ID NO: 236500 - DNA, 25 bp, SARS Virus
gagaaggtgtctgaggggcttcggt

SEQ ID NO: 236501 - DNA, 25 bp, SARS Virus
agaaggtgtctcgggggcttcggtg

SEQ ID NO: 236502 - DNA, 25 bp, SARS Virus
gaaggtgtctcaggggcttcggtgc

SEQ ID NO: 236503 - DNA, 25 bp, SARS Virus
aaggtgtctcaggggcttcggtgcg

SEQ ID NO: 236504 - DNA, 25 bp, SARS Virus
aggtgtctcaggggcttcggtgcgt

SEQ ID NO: 236505 - DNA, 25 bp, SARS Virus
ggtgtctcaggggcttcggtgcgtg

SEQ ID NO: 236506 - DNA, 25 bp, SARS Virus
gtgtctcagggggttcggtgcgtga

SEQ ID NO: 236507 - DNA, 25 bp, SARS Virus
tgtctcaggggcgtcggtgcgtgat

SEQ ID NO: 236508 - DNA, 25 bp, SARS Virus
gtctcaggggctgcggtgcgtgatc

SEQ ID NO: 236509 - DNA, 25 bp, SARS Virus
tctcaggggcttgggtgcgtgatcg

SEQ ID NO: 236510 - DNA, 25 bp, SARS Virus
ctcaggggcttcggtgcgtgatcgt

SEQ ID NO: 236511 - DNA, 25 bp, SARS Virus
tcaggggcttcggtgcgtgatcgtg

SEQ ID NO: 236512 - DNA, 25 bp, SARS Virus
caggggcttcggggcgtgatcgtgc

SEQ ID NO: 236513 - DNA, 25 bp, SARS Virus
aggggcttcggtgcgtgatcgtgca

SEQ ID NO: 236514 - DNA, 25 bp, SARS Virus
ggggcttcggtgggtgatcgtgcag

SEQ ID NO: 236515 - DNA, 25 bp, SARS Virus
gggcttcggtgcgtgatcgtgcaga

SEQ ID NO: 236516 - DNA, 25 bp, SARS Virus
ggcttcggtgcgggatcgtgcagag

SEQ ID NO: 236517 - DNA, 25 bp, SARS Virus
gcttcggtgcgtgatcgtgcagaga

SEQ ID NO: 236518 - DNA, 25 bp, SARS Virus
cttcggtgcgtggtcgtgcagagat

SEQ ID NO: 236519 - DNA, 25 bp, SARS Virus
ttcggtgcgtgagcgtgcagagatt

SEQ ID NO: 236520 - DNA, 25 bp, SARS Virus
tcggtgcgtgatggtgcagagattg

SEQ ID NO: 236521 - DNA, 25 bp, SARS Virus
cggtgcgtgatcgtgcagagattgg

SEQ ID NO: 236522 - DNA, 25 bp, SARS Virus
ggtgcgtgatcgggcagagattgga

SEQ ID NO: 236523 - DNA, 25 bp, SARS Virus
gtgcgtgatcgtgcagagattggac

SEQ ID NO: 236524 - DNA, 25 bp, SARS Virus
tgcgtgatcgtggagagattggact

SEQ ID NO: 236525 - DNA, 25 bp, SARS Virus
gcgtgatcgtgcggagattggactt

SEQ ID NO: 236526 - DNA, 25 bp, SARS Virus
cgtgatcgtgcagagattggacttc

SEQ ID NO: 236527 - DNA, 25 bp, SARS Virus
gtgatcgtgcagggattggacttcc

SEQ ID NO: 236528 - DNA, 25 bp, SARS Virus
tgatcgtgcagagattggacttcct

SEQ ID NO: 236529 - DNA, 25 bp, SARS Virus
gatcgtgcagaggttggacttcctg

SEQ ID NO: 236530 - DNA, 25 bp, SARS Virus
atcgtgcagagagtggacttcctgt

SEQ ID NO: 236531 - DNA, 25 bp, SARS Virus
tcgtgcagagatgggacttcctgtc

SEQ ID NO: 236532 - DNA, 25 bp, SARS Virus
cgtgcagagattggacttcctgtcc

SEQ ID NO: 236533 - DNA, 25 bp, SARS Virus
gtgcagagattggacttcctgtccg

SEQ ID NO: 236534 - DNA, 25 bp, SARS Virus
tgcagagattgggcttcctgtccgt

SEQ ID NO: 236535 - DNA, 25 bp, SARS Virus
gcagagattggagttcctgtccgtt

SEQ ID NO: 236536 - DNA, 25 bp, SARS Virus
cagagattggacgtcctgtccgttt

SEQ ID NO: 236537 - DNA, 25 bp, SARS Virus
agagattggactgcctgtccgtttg

SEQ ID NO: 236538 - DNA, 25 bp, SARS Virus
gagattggacttgctgtccgtttga

SEQ ID NO: 236539 - DNA, 25 bp, SARS Virus
agattggacttcgtgtccgtttgac

SEQ ID NO: 236540 - DNA, 25 bp, SARS Virus
gattggacttccggtccgtttgact

SEQ ID NO: 236541 - DNA, 25 bp, SARS Virus
attggacttcctgtccgtttgactc

SEQ ID NO: 236542 - DNA, 25 bp, SARS Virus
ttggacttcctggccgtttgactca

SEQ ID NO: 236543 - DNA, 25 bp, SARS Virus
tggacttcctgtgcgtttgactcaa

SEQ ID NO: 236544 - DNA, 25 bp, SARS Virus
ggacttcctgtcggtttgactcaac

SEQ ID NO: 236545 - DNA, 25 bp, SARS Virus
gacttcctgtccgtttgactcaacc

SEQ ID NO: 236546 - DNA, 25 bp, SARS Virus
acttcctgtccggttgactcaacct

SEQ ID NO: 236547 - DNA, 25 bp, SARS Virus
cttcctgtccgtgtgactcaacctg

SEQ ID NO: 236548 - DNA, 25 bp, SARS Virus
ttcctgtccgttggactcaacctgc

SEQ ID NO: 236549 - DNA, 25 bp, SARS Virus
tcctgtccgtttgactcaacctgca

SEQ ID NO: 236550 - DNA, 25 bp, SARS Virus
cctgtccgtttggctcaacctgcac

SEQ ID NO: 236551 - DNA, 25 bp, SARS Virus
ctgtccgtttgagtcaacctgcaca

SEQ ID NO: 236552 - DNA, 25 bp, SARS Virus
tgtccgtttgacgcaacctgcacac

SEQ ID NO: 236553 - DNA, 25 bp, SARS Virus
gtccgtttgactgaacctgcacaca

SEQ ID NO: 236554 - DNA, 25 bp, SARS Virus
tccgtttgactcgacctgcacacaa

SEQ ID NO: 236555 - DNA, 25 bp, SARS Virus
ccgtttgactcagcctgcacacaaa

SEQ ID NO: 236556 - DNA, 25 bp, SARS Virus
cgtttgactcaagctgcacacaaaa

SEQ ID NO: 236557 - DNA, 25 bp, SARS Virus
gtttgactcaacgtgcacacaaaag

SEQ ID NO: 236558 - DNA, 25 bp, SARS Virus
tttgactcaaccggcacacaaaaga

SEQ ID NO: 236559 - DNA, 25 bp, SARS Virus
ttgactcaacctgcacacaaaagag

SEQ ID NO: 236560 - DNA, 25 bp, SARS Virus
tgactcaacctggacacaaaagagc

SEQ ID NO: 236561 - DNA, 25 bp, SARS Virus
gactcaacctgcgcacaaaagagca

SEQ ID NO: 236562 - DNA, 25 bp, SARS Virus
actcaacctgcagacaaaagagcaa

SEQ ID NO: 236563 - DNA, 25 bp, SARS Virus
ctcaacctgcacgcaaaagagcaac

SEQ ID NO: 236564 - DNA, 25 bp, SARS Virus
tcaacctgcacagaaaagagcaact

SEQ ID NO: 236565 - DNA, 25 bp, SARS Virus
caacctgcacacgaaagagcaactg

SEQ ID NO: 236566 - DNA, 25 bp, SARS Virus
aacctgcacacagaagagcaactgt

SEQ ID NO: 236567 - DNA, 25 bp, SARS Virus
acctgcacacaagagagcaactgtg

SEQ ID NO: 236568 - DNA, 25 bp, SARS Virus
cctgcacacaaaggagcaactgtgg

SEQ ID NO: 236569 - DNA, 25 bp, SARS Virus
ctgcacacaaaagagcaactgtggt

SEQ ID NO: 236570 - DNA, 25 bp, SARS Virus
tgcacacaaaagggcaactgtggtt

SEQ ID NO: 236571 - DNA, 25 bp, SARS Virus
gcacacaaaagagcaactgtggttc

SEQ ID NO: 236572 - DNA, 25 bp, SARS Virus
cacacaaaagaggaactgtggttct

SEQ ID NO: 236573 - DNA, 25 bp, SARS Virus
acacaaaagagcgactgtggttctt

SEQ ID NO: 236574 - DNA, 25 bp, SARS Virus
cacaaaagagcagctgtggttcttg

SEQ ID NO: 236575 - DNA, 25 bp, SARS Virus
acaaaagagcaagtgtggttcttgt

SEQ ID NO: 236576 - DNA, 25 bp, SARS Virus
caaaagagcaacggtggttcttgtt

SEQ ID NO: 236577 - DNA, 25 bp, SARS Virus
aaaagagcaactgtggttcttgttc

SEQ ID NO: 236578 - DNA, 25 bp, SARS Virus
aaagagcaactggggttcttgttcc

SEQ ID NO: 236579 - DNA, 25 bp, SARS Virus
aagagcaactgtggttcttgttccg

SEQ ID NO: 236580 - DNA, 25 bp, SARS Virus
agagcaactgtggttcttgttccga

SEQ ID NO: 236581 - DNA, 25 bp, SARS Virus
gagcaactgtgggtcttgttccgag

SEQ ID NO: 236582 - DNA, 25 bp, SARS Virus
agcaactgtggtgcttgttccgaga

SEQ ID NO: 236583 - DNA, 25 bp, SARS Virus
gcaactgtggttgttgttccgagag

SEQ ID NO: 236584 - DNA, 25 bp, SARS Virus
caactgtggttcgtgttccgagagg

SEQ ID NO: 236585 - DNA, 25 bp, SARS Virus
aactgtggttctggttccgagaggt

SEQ ID NO: 236586 - DNA, 25 bp, SARS Virus
actgtggttcttgttccgagaggta

SEQ ID NO: 236587 - DNA, 25 bp, SARS Virus
ctgtggttcttggtccgagaggtag

SEQ ID NO: 236588 - DNA, 25 bp, SARS Virus
tgtggttcttgtgccgagaggtaga

SEQ ID NO: 236589 - DNA, 25 bp, SARS Virus
gtggttcttgttgcgagaggtagaa

SEQ ID NO: 236590 - DNA, 25 bp, SARS Virus
tggttcttgttcggagaggtagaat

SEQ ID NO: 236591 - DNA, 25 bp, SARS Virus
ggttcttgttccgagaggtagaatg

SEQ ID NO: 236592 - DNA, 25 bp, SARS Virus
gttcttgttccgggaggtagaatgg

SEQ ID NO: 236593 - DNA, 25 bp, SARS Virus
ttcttgttccgagaggtagaatgga

SEQ ID NO: 236594 - DNA, 25 bp, SARS Virus
tcttgttccgaggggtagaatggaa

SEQ ID NO: 236595 - DNA, 25 bp, SARS Virus
cttgttccgagaggtagaatggaaa

SEQ ID NO: 236596 - DNA, 25 bp, SARS Virus
ttgttccgagaggtagaatggaaag

SEQ ID NO: 236597 - DNA, 25 bp, SARS Virus
tgttccgagagggagaatggaaagc

SEQ ID NO: 236598 - DNA, 25 bp, SARS Virus
gttccgagaggtggaatggaaagcc

SEQ ID NO: 236599 - DNA, 25 bp, SARS Virus
ttccgagaggtagaatggaaagcca

SEQ ID NO: 236600 - DNA, 25 bp, SARS Virus
tccgagaggtaggatggaaagccag

SEQ ID NO: 236601 - DNA, 25 bp, SARS Virus
ccgagaggtagagtggaaagccagt

SEQ ID NO: 236602 - DNA, 25 bp, SARS Virus
cgagaggtagaagggaaagccagtg

SEQ ID NO: 236603 - DNA, 25 bp, SARS Virus
gagaggtagaatggaaagccagtgt

SEQ ID NO: 236604 - DNA, 25 bp, SARS Virus
agaggtagaatggaaagccagtgtg

SEQ ID NO: 236605 - DNA, 25 bp, SARS Virus
gaggtagaatgggaagccagtgtgg

SEQ ID NO: 236606 - DNA, 25 bp, SARS Virus
aggtagaatggagagccagtgtggg

SEQ ID NO: 236607 - DNA, 25 bp, SARS Virus
ggtagaatggaaggccagtgtgggc

SEQ ID NO: 236608 - DNA, 25 bp, SARS Virus
gtagaatggaaagccagtgtgggcc

SEQ ID NO: 236609 - DNA, 25 bp, SARS Virus
tagaatggaaaggcagtgtgggcct

SEQ ID NO: 236610 - DNA, 25 bp, SARS Virus
agaatggaaagcgagtgtgggcctg

SEQ ID NO: 236611 - DNA, 25 bp, SARS Virus
gaatggaaagccggtgtgggcctgc

SEQ ID NO: 236612 - DNA, 25 bp, SARS Virus
aatggaaagccagtgtgggcctgct

SEQ ID NO: 236613 - DNA, 25 bp, SARS Virus
atggaaagccagggtgggcctgctt

SEQ ID NO: 236614 - DNA, 25 bp, SARS Virus
tggaaagccagtgtgggcctgcttt

SEQ ID NO: 236615 - DNA, 25 bp, SARS Virus
ggaaagccagtgggggcctgctttg

SEQ ID NO: 236616 - DNA, 25 bp, SARS Virus
gaaagccagtgtgggcctgctttgg

SEQ ID NO: 236617 - DNA, 25 bp, SARS Virus
aaagccagtgtgggcctgctttgga

SEQ ID NO: 236618 - DNA, 25 bp, SARS Virus
aagccagtgtgggcctgctttggat

SEQ ID NO: 236619 - DNA, 25 bp, SARS Virus
agccagtgtggggctgctttggatc

SEQ ID NO: 236620 - DNA, 25 bp, SARS Virus
gccagtgtgggcgtgctttggatcc

SEQ ID NO: 236621 - DNA, 25 bp, SARS Virus
ccagtgtgggccggctttggatcca

SEQ ID NO: 236622 - DNA, 25 bp, SARS Virus
cagtgtgggcctgctttggatccat

SEQ ID NO: 236623 - DNA, 25 bp, SARS Virus
agtgtgggcctggtttggatccata

SEQ ID NO: 236624 - DNA, 25 bp, SARS Virus
gtgtgggcctgcgttggatccatac

SEQ ID NO: 236625 - DNA, 25 bp, SARS Virus
tgtgggcctgctgtggatccatacg

SEQ ID NO: 236626 - DNA, 25 bp, SARS Virus
gtgggcctgcttgggatccatacga

SEQ ID NO: 236627 - DNA, 25 bp, SARS Virus
tgggcctgctttggatccatacgac

SEQ ID NO: 236628 - DNA, 25 bp, SARS Virus
gggcctgctttggatccatacgact

SEQ ID NO: 236629 - DNA, 25 bp, SARS Virus
ggcctgctttgggtccatacgacta

SEQ ID NO: 236630 - DNA, 25 bp, SARS Virus
gcctgctttggagccatacgactac

SEQ ID NO: 236631 - DNA, 25 bp, SARS Virus
cctgctttggatgcatacgactact

SEQ ID NO: 236632 - DNA, 25 bp, SARS Virus
ctgctttggatcgatacgactacta

SEQ ID NO: 236633 - DNA, 25 bp, SARS Virus
tgctttggatccgtacgactactag

SEQ ID NO: 236634 - DNA, 25 bp, SARS Virus
gctttggatccagacgactactagc

SEQ ID NO: 236635 - DNA, 25 bp, SARS Virus
ctttggatccatgcgactactagct

SEQ ID NO: 236636 - DNA, 25 bp, SARS Virus
tttggatccataggactactagctg

SEQ ID NO: 236637 - DNA, 25 bp, SARS Virus
ttggatccatacgactactagctga

SEQ ID NO: 236638 - DNA, 25 bp, SARS Virus
tggatccatacggctactagctgac

SEQ ID NO: 236639 - DNA, 25 bp, SARS Virus
ggatccatacgagtactagctgacg

SEQ ID NO: 236640 - DNA, 25 bp, SARS Virus
gatccatacgacgactagctgacgt

SEQ ID NO: 236641 - DNA, 25 bp, SARS Virus
atccatacgactgctagctgacgtt

SEQ ID NO: 236642 - DNA, 25 bp, SARS Virus
tccatacgactagtagctgacgttg

SEQ ID NO: 236643 - DNA, 25 bp, SARS Virus
ccatacgactacgagctgacgttgt

SEQ ID NO: 236644 - DNA, 25 bp, SARS Virus
catacgactactggctgacgttgtg

SEQ ID NO: 236645 - DNA, 25 bp, SARS Virus
atacgactactagctgacgttgtgc

SEQ ID NO: 236646 - DNA, 25 bp, SARS Virus
tacgactactaggtgacgttgtgcc

SEQ ID NO: 236647 - DNA, 25 bp, SARS Virus
acgactactagcggacgttgtgcct

SEQ ID NO: 236648 - DNA, 25 bp, SARS Virus
cgactactagctgacgttgtgcctg

SEQ ID NO: 236649 - DNA, 25 bp, SARS Virus
gactactagctggcgttgtgcctgc

SEQ ID NO: 236650 - DNA, 25 bp, SARS Virus
actactagctgaggttgtgcctgct

SEQ ID NO: 236651 - DNA, 25 bp, SARS Virus
ctactagctgacgttgtgcctgctt

SEQ ID NO: 236652 - DNA, 25 bp, SARS Virus
tactagctgacggtgtgcctgcttt

SEQ ID NO: 236653 - DNA, 25 bp, SARS Virus
actagctgacgtggtgcctgctttg

SEQ ID NO: 236654 - DNA, 25 bp, SARS Virus
ctagctgacgttgtgcctgctttgg

SEQ ID NO: 236655 - DNA, 25 bp, SARS Virus
tagctgacgttgggcctgctttggc

SEQ ID NO: 236656 - DNA, 25 bp, SARS Virus
agctgacgttgtgcctgctttggca

SEQ ID NO: 236657 - DNA, 25 bp, SARS Virus
gctgacgttgtggctgctttggcat

SEQ ID NO: 236658 - DNA, 25 bp, SARS Virus
ctgacgttgtgcgtgctttggcatt

SEQ ID NO: 236659 - DNA, 25 bp, SARS Virus
tgacgttgtgccggctttggcattc

SEQ ID NO: 236660 - DNA, 25 bp, SARS Virus
gacgttgtgcctgctttggcattcg

SEQ ID NO: 236661 - DNA, 25 bp, SARS Virus
acgttgtgcctggtttggcattcgt

SEQ ID NO: 236662 - DNA, 25 bp, SARS Virus
cgttgtgcctgcgttggcattcgtc

SEQ ID NO: 236663 - DNA, 25 bp, SARS Virus
gttgtgcctgctgtggcattcgtca

SEQ ID NO: 236664 - DNA, 25 bp, SARS Virus
ttgtgcctgcttgggcattcgtcag

SEQ ID NO: 236665 - DNA, 25 bp, SARS Virus
tgtgcctgctttggcattcgtcaga

SEQ ID NO: 236666 - DNA, 25 bp, SARS Virus
gtgcctgctttggcattcgtcagac

SEQ ID NO: 236667 - DNA, 25 bp, SARS Virus
tgcctgctttgggattcgtcagacg

SEQ ID NO: 236668 - DNA, 25 bp, SARS Virus
gcctgctttggcgttcgtcagacgt

SEQ ID NO: 236669 - DNA, 25 bp, SARS Virus
cctgctttggcagtcgtcagacgtc

SEQ ID NO: 236670 - DNA, 25 bp, SARS Virus
ctgctttggcatgcgtcagacgtct

SEQ ID NO: 236671 - DNA, 25 bp, SARS Virus
tgctttggcattggtcagacgtctt

SEQ ID NO: 236672 - DNA, 25 bp, SARS Virus
gctttggcattcgtcagacgtcttc

SEQ ID NO: 236673 - DNA, 25 bp, SARS Virus
ctttggcattcggcagacgtcttct

SEQ ID NO: 236674 - DNA, 25 bp, SARS Virus
tttggcattcgtgagacgtcttctc

SEQ ID NO: 236675 - DNA, 25 bp, SARS Virus
ttggcattcgtcggacgtcttctcc

SEQ ID NO: 236676 - DNA, 25 bp, SARS Virus
tggcattcgtcagacgtcttctccc

SEQ ID NO: 236677 - DNA, 25 bp, SARS Virus
ggcattcgtcaggcgtcttctccct

SEQ ID NO: 236678 - DNA, 25 bp, SARS Virus
gcattcgtcagaggtcttctccctg

SEQ ID NO: 236679 - DNA, 25 bp, SARS Virus
cattcgtcagacgtcttctccctgc

SEQ ID NO: 236680 - DNA, 25 bp, SARS Virus
attcgtcagacggcttctccctgct

SEQ ID NO: 236681 - DNA, 25 bp, SARS Virus
ttcgtcagacgtgttctccctgctc

SEQ ID NO: 236682 - DNA, 25 bp, SARS Virus
tcgtcagacgtcgtctccctgctca

SEQ ID NO: 236683 - DNA, 25 bp, SARS Virus
cgtcagacgtctgctccctgctcaa

SEQ ID NO: 236684 - DNA, 25 bp, SARS Virus
gtcagacgtcttgtccctgctcaat

SEQ ID NO: 236685 - DNA, 25 bp, SARS Virus
tcagacgtcttcgccctgctcaatg

SEQ ID NO: 236686 - DNA, 25 bp, SARS Virus
cagacgtcttctgcctgctcaatga

SEQ ID NO: 236687 - DNA, 25 bp, SARS Virus
agacgtcttctcgctgctcaatgag

SEQ ID NO: 236688 - DNA, 25 bp, SARS Virus
gacgtcttctccgtgctcaatgagc

SEQ ID NO: 236689 - DNA, 25 bp, SARS Virus
acgtcttctcccggctcaatgagca

SEQ ID NO: 236690 - DNA, 25 bp, SARS Virus
cgtcttctccctgctcaatgagcaa

SEQ ID NO: 236691 - DNA, 25 bp, SARS Virus
gtcttctccctggtcaatgagcaaa

SEQ ID NO: 236692 - DNA, 25 bp, SARS Virus
tcttctccctgcgcaatgagcaaag

SEQ ID NO: 236693 - DNA, 25 bp, SARS Virus
cttctccctgctgaatgagcaaaga

SEQ ID NO: 236694 - DNA, 25 bp, SARS Virus
ttctccctgctcgatgagcaaagaa

SEQ ID NO: 236695 - DNA, 25 bp, SARS Virus
tctccctgctcagtgagcaaagaac

SEQ ID NO: 236696 - DNA, 25 bp, SARS Virus
ctccctgctcaaggagcaaagaaca

SEQ ID NO: 236697 - DNA, 25 bp, SARS Virus
tccctgctcaatgagcaaagaacag

SEQ ID NO: 236698 - DNA, 25 bp, SARS Virus
ccctgctcaatgggcaaagaacagt

SEQ ID NO: 236699 - DNA, 25 bp, SARS Virus
cctgctcaatgagcaaagaacagtt

SEQ ID NO: 236700 - DNA, 25 bp, SARS Virus
ctgctcaatgaggaaagaacagttg

SEQ ID NO: 236701 - DNA, 25 bp, SARS Virus
tgctcaatgagcgaagaacagttgc

SEQ ID NO: 236702 - DNA, 25 bp, SARS Virus
gctcaatgagcagagaacagttgct

SEQ ID NO: 236703 - DNA, 25 bp, SARS Virus
ctcaatgagcaaggaacagttgctg

SEQ ID NO: 236704 - DNA, 25 bp, SARS Virus
tcaatgagcaaagaacagttgctgt

SEQ ID NO: 236705 - DNA, 25 bp, SARS Virus
caatgagcaaaggacagttgctgtc

SEQ ID NO: 236706 - DNA, 25 bp, SARS Virus
aatgagcaaagagcagttgctgtca

SEQ ID NO: 236707 - DNA, 25 bp, SARS Virus
atgagcaaagaagagttgctgtcat

SEQ ID NO: 236708 - DNA, 25 bp, SARS Virus
tgagcaaagaacggttgctgtcatt

SEQ ID NO: 236709 - DNA, 25 bp, SARS Virus
gagcaaagaacagttgctgtcattt

SEQ ID NO: 236710 - DNA, 25 bp, SARS Virus
agcaaagaacaggtgctgtcatttt

SEQ ID NO: 236711 - DNA, 25 bp, SARS Virus
gcaaagaacagtggctgtcatttta

SEQ ID NO: 236712 - DNA, 25 bp, SARS Virus
caaagaacagttgctgtcattttaa

SEQ ID NO: 236713 - DNA, 25 bp, SARS Virus
aataatggcaagtatgcttcttctt

SEQ ID NO: 236714 - DNA, 25 bp, SARS Virus
ataatggcaagattgcttcttcttg

SEQ ID NO: 236715 - DNA, 25 bp, SARS Virus
taatggcaagaatgcttcttcttgt

SEQ ID NO: 236716 - DNA, 25 bp, SARS Virus
aatggcaagaattcttcttcttgta

SEQ ID NO: 236717 - DNA, 25 bp, SARS Virus
atggcaagaatgtttcttcttgtaa

SEQ ID NO: 236718 - DNA, 25 bp, SARS Virus
tggcaagaatgcttcttcttgtaac

SEQ ID NO: 236719 - DNA, 25 bp, SARS Virus
ggcaagaatgcttcttcttgtaacg

SEQ ID NO: 236720 - DNA, 25 bp, SARS Virus
gcaagaatgctttttcttgtaacgc

SEQ ID NO: 236721 - DNA, 25 bp, SARS Virus
caagaatgcttcttcttgtaacgcc

SEQ ID NO: 236722 - DNA, 25 bp, SARS Virus
aagaatgcttcttcttgtaacgcca

SEQ ID NO: 236723 - DNA, 25 bp, SARS Virus
agaatgcttctttttgtaacgccat

SEQ ID NO: 236724 - DNA, 25 bp, SARS Virus
gaatgcttcttcttgtaacgccata

SEQ ID NO: 236725 - DNA, 25 bp, SARS Virus
aatgcttcttcttgtaacgccatac

SEQ ID NO: 236726 - DNA, 25 bp, SARS Virus
atgcttcttcttttaacgccatacg

SEQ ID NO: 236727 - DNA, 25 bp, SARS Virus
tgcttcttcttgtaacgccatacgt

SEQ ID NO: 236728 - DNA, 25 bp, SARS Virus
gcttcttcttgttacgccatacgtt

SEQ ID NO: 236729 - DNA, 25 bp, SARS Virus
cttcttcttgtatcgccatacgtta

SEQ ID NO: 236730 - DNA, 25 bp, SARS Virus
ttcttcttgtaatgccatacgttaa

SEQ ID NO: 236731 - DNA, 25 bp, SARS Virus
tcttcttgtaactccatacgttaac

SEQ ID NO: 236732 - DNA, 25 bp, SARS Virus
cttcttgtaacgtcatacgttaacc

SEQ ID NO: 236733 - DNA, 25 bp, SARS Virus
ttcttgtaacgctatacgttaaccc

SEQ ID NO: 236734 - DNA, 25 bp, SARS Virus
tcttgtaacgccttacgttaacccc

SEQ ID NO: 236735 - DNA, 25 bp, SARS Virus
cttgtaacgccatacgttaacccca

SEQ ID NO: 236736 - DNA, 25 bp, SARS Virus
ttgtaacgccattcgttaaccccaa

SEQ ID NO: 236737 - DNA, 25 bp, SARS Virus
tgtaacgccatatgttaaccccaaa

SEQ ID NO: 236738 - DNA, 25 bp, SARS Virus
gtaacgccatactttaaccccaaag

SEQ ID NO: 236739 - DNA, 25 bp, SARS Virus
taacgccatacgttaaccccaaagc

SEQ ID NO: 236740 - DNA, 25 bp, SARS Virus
aacgccatacgttaaccccaaagcg

SEQ ID NO: 236741 - DNA, 25 bp, SARS Virus
acgccatacgtttaccccaaagcgg

SEQ ID NO: 236742 - DNA, 25 bp, SARS Virus
cgccatacgttatccccaaagcggg

SEQ ID NO: 236743 - DNA, 25 bp, SARS Virus
gccatacgttaatcccaaagcgggt

SEQ ID NO: 236744 - DNA, 25 bp, SARS Virus
ccatacgttaactccaaagcgggtg

SEQ ID NO: 236745 - DNA, 25 bp, SARS Virus
catacgttaacctcaaagcgggtgt

SEQ ID NO: 236746 - DNA, 25 bp, SARS Virus
atacgttaaccctaaagcgggtgta

SEQ ID NO: 236747 - DNA, 25 bp, SARS Virus
tacgttaacccctaagcgggtgtac

SEQ ID NO: 236748 - DNA, 25 bp, SARS Virus
acgttaaccccatagcgggtgtaca

SEQ ID NO: 236749 - DNA, 25 bp, SARS Virus
cgttaaccccaatgcgggtgtacac

SEQ ID NO: 236750 - DNA, 25 bp, SARS Virus
gttaaccccaaatcgggtgtacacc

SEQ ID NO: 236751 - DNA, 25 bp, SARS Virus
ttaaccccaaagtgggtgtacaccg

SEQ ID NO: 236752 - DNA, 25 bp, SARS Virus
taaccccaaagctggtgtacaccgt

SEQ ID NO: 236753 - DNA, 25 bp, SARS Virus
aaccccaaagcgtgtgtacaccgtg

SEQ ID NO: 236754 - DNA, 25 bp, SARS Virus
accccaaagcggttgtacaccgtgc

SEQ ID NO: 236755 - DNA, 25 bp, SARS Virus
ccccaaagcgggtgtacaccgtgct

SEQ ID NO: 236756 - DNA, 25 bp, SARS Virus
cccaaagcgggtttacaccgtgctc

SEQ ID NO: 236757 - DNA, 25 bp, SARS Virus
ccaaagcgggtgtacaccgtgctca

SEQ ID NO: 236758 - DNA, 25 bp, SARS Virus
caaagcgggtgttcaccgtgctcat

SEQ ID NO: 236759 - DNA, 25 bp, SARS Virus
aaagcgggtgtataccgtgctcatg

SEQ ID NO: 236760 - DNA, 25 bp, SARS Virus
aagcgggtgtactccgtgctcatga

SEQ ID NO: 236761 - DNA, 25 bp, SARS Virus
agcgggtgtacatcgtgctcatgag

SEQ ID NO: 236762 - DNA, 25 bp, SARS Virus
gcgggtgtacactgtgctcatgagg

SEQ ID NO: 236763 - DNA, 25 bp, SARS Virus
cgggtgtacaccttgctcatgaggg

SEQ ID NO: 236764 - DNA, 25 bp, SARS Virus
gggtgtacaccgtgctcatgagggt

SEQ ID NO: 236765 - DNA, 25 bp, SARS Virus
ggtgtacaccgttctcatgagggtc

SEQ ID NO: 236766 - DNA, 25 bp, SARS Virus
gtgtacaccgtgttcatgagggtca

SEQ ID NO: 236767 - DNA, 25 bp, SARS Virus
tgtacaccgtgctcatgagggtcac

SEQ ID NO: 236768 - DNA, 25 bp, SARS Virus
gtacaccgtgcttatgagggtcaca

SEQ ID NO: 236769 - DNA, 25 bp, SARS Virus
tacaccgtgctcttgagggtcacaa

SEQ ID NO: 236770 - DNA, 25 bp, SARS Virus
acaccgtgctcatgagggtcacaat

SEQ ID NO: 236771 - DNA, 25 bp, SARS Virus
caccgtgctcattagggtcacaata

SEQ ID NO: 236772 - DNA, 25 bp, SARS Virus
accgtgctcatgtgggtcacaatat

SEQ ID NO: 236773 - DNA, 25 bp, SARS Virus
ccgtgctcatgatggtcacaatatg

SEQ ID NO: 236774 - DNA, 25 bp, SARS Virus
cgtgctcatgagtgtcacaatatgg

SEQ ID NO: 236775 - DNA, 25 bp, SARS Virus
gtgctcatgaggttcacaatatggc

SEQ ID NO: 236776 - DNA, 25 bp, SARS Virus
tgctcatgagggtcacaatatggcg

SEQ ID NO: 236777 - DNA, 25 bp, SARS Virus
gctcatgagggttacaatatggcga

SEQ ID NO: 236778 - DNA, 25 bp, SARS Virus
ctcatgagggtctcaatatggcgat

SEQ ID NO: 236779 - DNA, 25 bp, SARS Virus
tcatgagggtcataatatggcgatg

SEQ ID NO: 236780 - DNA, 25 bp, SARS Virus
catgagggtcactatatggcgatgc

SEQ ID NO: 236781 - DNA, 25 bp, SARS Virus
atgagggtcacattatggcgatgct

SEQ ID NO: 236782 - DNA, 25 bp, SARS Virus
tgagggtcacaatatggcgatgctg

SEQ ID NO: 236783 - DNA, 25 bp, SARS Virus
gagggtcacaatttggcgatgctgg

SEQ ID NO: 236784 - DNA, 25 bp, SARS Virus
agggtcacaatatggcgatgctggc

SEQ ID NO: 236785 - DNA, 25 bp, SARS Virus
gggtcacaatattgcgatgctggca

SEQ ID NO: 236786 - DNA, 25 bp, SARS Virus
ggtcacaatatgtcgatgctggcat

SEQ ID NO: 236787 - DNA, 25 bp, SARS Virus
gtcacaatatggtgatgctggcatg

SEQ ID NO: 236788 - DNA, 25 bp, SARS Virus
tcacaatatggctatgctggcatga

SEQ ID NO: 236789 - DNA, 25 bp, SARS Virus
cacaatatggcgttgctggcatgac

SEQ ID NO: 236790 - DNA, 25 bp, SARS Virus
acaatatggcgatgctggcatgact

SEQ ID NO: 236791 - DNA, 25 bp, SARS Virus
caatatggcgattctggcatgactt

SEQ ID NO: 236792 - DNA, 25 bp, SARS Virus
aatatggcgatgttggcatgactta

SEQ ID NO: 236793 - DNA, 25 bp, SARS Virus
atatggcgatgctggcatgacttac

SEQ ID NO: 236794 - DNA, 25 bp, SARS Virus
tatggcgatgcttgcatgacttacg

SEQ ID NO: 236795 - DNA, 25 bp, SARS Virus
atggcgatgctgtcatgacttacgg

SEQ ID NO: 236796 - DNA, 25 bp, SARS Virus
tggcgatgctggtatgacttacggc

SEQ ID NO: 236797 - DNA, 25 bp, SARS Virus
ggcgatgctggcttgacttacggca

SEQ ID NO: 236798 - DNA, 25 bp, SARS Virus
gcgatgctggcatgacttacggcag

SEQ ID NO: 236799 - DNA, 25 bp, SARS Virus
cgatgctggcattacttacggcagg

SEQ ID NO: 236800 - DNA, 25 bp, SARS Virus
gatgctggcatgtcttacggcaggt

SEQ ID NO: 236801 - DNA, 25 bp, SARS Virus
atgctggcatgatttacggcaggta

SEQ ID NO: 236802 - DNA, 25 bp, SARS Virus
tgctggcatgacttacggcaggtaa

SEQ ID NO: 236803 - DNA, 25 bp, SARS Virus
gctggcatgacttacggcaggtaaa

SEQ ID NO: 236804 - DNA, 25 bp, SARS Virus
ctggcatgactttcggcaggtaaag

SEQ ID NO: 236805 - DNA, 25 bp, SARS Virus
tggcatgacttatggcaggtaaaga

SEQ ID NO: 236806 - DNA, 25 bp, SARS Virus
ggcatgacttactgcaggtaaagac

SEQ ID NO: 236807 - DNA, 25 bp, SARS Virus
gcatgacttacgtcaggtaaagacg

SEQ ID NO: 236808 - DNA, 25 bp, SARS Virus
catgacttacggtaggtaaagacgt

SEQ ID NO: 236809 - DNA, 25 bp, SARS Virus
atgacttacggctggtaaagacgtt

SEQ ID NO: 236810 - DNA, 25 bp, SARS Virus
tgacttacggcatgtaaagacgttg

SEQ ID NO: 236811 - DNA, 25 bp, SARS Virus
gacttacggcagttaaagacgttgg

SEQ ID NO: 236812 - DNA, 25 bp, SARS Virus
acttacggcaggtaaagacgttggt

SEQ ID NO: 236813 - DNA, 25 bp, SARS Virus
cttacggcaggttaagacgttggtc

SEQ ID NO: 236814 - DNA, 25 bp, SARS Virus
ttacggcaggtatagacgttggtcg

SEQ ID NO: 236815 - DNA, 25 bp, SARS Virus
tacggcaggtaatgacgttggtcga

SEQ ID NO: 236816 - DNA, 25 bp, SARS Virus
acggcaggtaaatacgttggtcgag

SEQ ID NO: 236817 - DNA, 25 bp, SARS Virus
cggcaggtaaagtcgttggtcgagt

SEQ ID NO: 236818 - DNA, 25 bp, SARS Virus
ggcaggtaaagatgttggtcgagtt

SEQ ID NO: 236819 - DNA, 25 bp, SARS Virus
gcaggtaaagactttggtcgagttg

SEQ ID NO: 236820 - DNA, 25 bp, SARS Virus
caggtaaagacgttggtcgagttgc

SEQ ID NO: 236821 - DNA, 25 bp, SARS Virus
aggtaaagacgttggtcgagttgct

SEQ ID NO: 236822 - DNA, 25 bp, SARS Virus
ggtaaagacgtttgtcgagttgctg

SEQ ID NO: 236823 - DNA, 25 bp, SARS Virus
gtaaagacgttgttcgagttgctgg

SEQ ID NO: 236824 - DNA, 25 bp, SARS Virus
taaagacgttggtcgagttgctgga

SEQ ID NO: 236825 - DNA, 25 bp, SARS Virus
aaagacgttggttgagttgctggaa

SEQ ID NO: 236826 - DNA, 25 bp, SARS Virus
aagacgttggtctagttgctggaac

SEQ ID NO: 236827 - DNA, 25 bp, SARS Virus
agacgttggtcgtgttgctggaaca

SEQ ID NO: 236828 - DNA, 25 bp, SARS Virus
gacgttggtcgatttgctggaacac

SEQ ID NO: 236829 - DNA, 25 bp, SARS Virus
acgttggtcgagttgctggaacacc

SEQ ID NO: 236830 - DNA, 25 bp, SARS Virus
cgttggtcgagttgctggaacaccg

SEQ ID NO: 236831 - DNA, 25 bp, SARS Virus
gttggtcgagtttctggaacaccgg

SEQ ID NO: 236832 - DNA, 25 bp, SARS Virus
ttggtcgagttgttggaacaccggc

SEQ ID NO: 236833 - DNA, 25 bp, SARS Virus
tggtcgagttgctggaacaccggca

SEQ ID NO: 236834 - DNA, 25 bp, SARS Virus
ggtcgagttgcttgaacaccggcac

SEQ ID NO: 236835 - DNA, 25 bp, SARS Virus
gtcgagttgctgtaacaccggcact

SEQ ID NO: 236836 - DNA, 25 bp, SARS Virus
tcgagttgctggtacaccggcacta

SEQ ID NO: 236837 - DNA, 25 bp, SARS Virus
cgagttgctggatcaccggcactaa

SEQ ID NO: 236838 - DNA, 25 bp, SARS Virus
gagttgctggaataccggcactaac

SEQ ID NO: 236839 - DNA, 25 bp, SARS Virus
agttgctggaactccggcactaacc

SEQ ID NO: 236840 - DNA, 25 bp, SARS Virus
gttgctggaacatcggcactaacca

SEQ ID NO: 236841 - DNA, 25 bp, SARS Virus
ttgctggaacactggcactaaccac

SEQ ID NO: 236842 - DNA, 25 bp, SARS Virus
tgctggaacacctgcactaaccacg

SEQ ID NO: 236843 - DNA, 25 bp, SARS Virus
gctggaacaccgtcactaaccacga

SEQ ID NO: 236844 - DNA, 25 bp, SARS Virus
ctggaacaccggtactaaccacgaa

SEQ ID NO: 236845 - DNA, 25 bp, SARS Virus
tggaacaccggctctaaccacgaat

SEQ ID NO: 236846 - DNA, 25 bp, SARS Virus
ggaacaccggcattaaccacgaatt

SEQ ID NO: 236847 - DNA, 25 bp, SARS Virus
gaacaccggcactaaccacgaattc

SEQ ID NO: 236848 - DNA, 25 bp, SARS Virus
aacaccggcacttaccacgaattcc

SEQ ID NO: 236849 - DNA, 25 bp, SARS Virus
acaccggcactatccacgaattccg

SEQ ID NO: 236850 - DNA, 25 bp, SARS Virus
caccggcactaatcacgaattccgt

SEQ ID NO: 236851 - DNA, 25 bp, SARS Virus
accggcactaactacgaattccgta

SEQ ID NO: 236852 - DNA, 25 bp, SARS Virus
ccggcactaacctcgaattccgtag

SEQ ID NO: 236853 - DNA, 25 bp, SARS Virus
cggcactaaccatgaattccgtagt

SEQ ID NO: 236854 - DNA, 25 bp, SARS Virus
ggcactaaccactaattccgtagtc

SEQ ID NO: 236855 - DNA, 25 bp, SARS Virus
gcactaaccacgtattccgtagtct

SEQ ID NO: 236856 - DNA, 25 bp, SARS Virus
cactaaccacgatttccgtagtctt

SEQ ID NO: 236857 - DNA, 25 bp, SARS Virus
actaaccacgaattccgtagtcttg

SEQ ID NO: 236858 - DNA, 25 bp, SARS Virus
ctaaccacgaattccgtagtcttgc

SEQ ID NO: 236859 - DNA, 25 bp, SARS Virus
taaccacgaatttcgtagtcttgca

SEQ ID NO: 236860 - DNA, 25 bp, SARS Virus
aaccacgaattctgtagtcttgcaa

SEQ ID NO: 236861 - DNA, 25 bp, SARS Virus
accacgaattccttagtcttgcaaa

SEQ ID NO: 236862 - DNA, 25 bp, SARS Virus
ccacgaattccgtagtcttgcaaat

SEQ ID NO: 236863 - DNA, 25 bp, SARS Virus
cacgaattccgttgtcttgcaaatt

SEQ ID NO: 236864 - DNA, 25 bp, SARS Virus
acgaattccgtattcttgcaaatta

SEQ ID NO: 236865 - DNA, 25 bp, SARS Virus
cgaattccgtagtcttgcaaattac

SEQ ID NO: 236866 - DNA, 25 bp, SARS Virus
gaattccgtagttttgcaaattact

SEQ ID NO: 236867 - DNA, 25 bp, SARS Virus
aattccgtagtcttgcaaattactt

SEQ ID NO: 236868 - DNA, 25 bp, SARS Virus
attccgtagtcttgcaaattacttg

SEQ ID NO: 236869 - DNA, 25 bp, SARS Virus
ttccgtagtctttcaaattacttgt

SEQ ID NO: 236870 - DNA, 25 bp, SARS Virus
tccgtagtcttgtaaattacttgtg

SEQ ID NO: 236871 - DNA, 25 bp, SARS Virus
ccgtagtcttgctaattacttgtgt

SEQ ID NO: 236872 - DNA, 25 bp, SARS Virus
cgtagtcttgcatattacttgtgta

SEQ ID NO: 236873 - DNA, 25 bp, SARS Virus
gtagtcttgcaatttacttgtgtat

SEQ ID NO: 236874 - DNA, 25 bp, SARS Virus
tagtcttgcaaattacttgtgtatc

SEQ ID NO: 236875 - DNA, 25 bp, SARS Virus
agtcttgcaaattacttgtgtatcc

SEQ ID NO: 236876 - DNA, 25 bp, SARS Virus
gtcttgcaaatttcttgtgtatccc

SEQ ID NO: 236877 - DNA, 25 bp, SARS Virus
tcttgcaaattatttgtgtatcccg

SEQ ID NO: 236878 - DNA, 25 bp, SARS Virus
cttgcaaattacttgtgtatcccga

SEQ ID NO: 236879 - DNA, 25 bp, SARS Virus
ttgcaaattacttgtgtatcccgac

SEQ ID NO: 236880 - DNA, 25 bp, SARS Virus
tgcaaattacttttgtatcccgaca

SEQ ID NO: 236881 - DNA, 25 bp, SARS Virus
gcaaattacttgtgtatcccgacaa

SEQ ID NO: 236882 - DNA, 25 bp, SARS Virus
caaattacttgtttatcccgacaag

SEQ ID NO: 236883 - DNA, 25 bp, SARS Virus
aaattacttgtgtatcccgacaagt

SEQ ID NO: 236884 - DNA, 25 bp, SARS Virus
aattacttgtgtttcccgacaagtt

SEQ ID NO: 236885 - DNA, 25 bp, SARS Virus
attacttgtgtatcccgacaagttc

SEQ ID NO: 236886 - DNA, 25 bp, SARS Virus
ttacttgtgtattccgacaagttcg

SEQ ID NO: 236887 - DNA, 25 bp, SARS Virus
tacttgtgtatctcgacaagttcga

SEQ ID NO: 236888 - DNA, 25 bp, SARS Virus
acttgtgtatcctgacaagttcgac

SEQ ID NO: 236889 - DNA, 25 bp, SARS Virus
cttgtgtatccctacaagttcgacc

SEQ ID NO: 236890 - DNA, 25 bp, SARS Virus
ttgtgtatcccgtcaagttcgaccc

SEQ ID NO: 236891 - DNA, 25 bp, SARS Virus
tgtgtatcccgataagttcgacccc

SEQ ID NO: 236892 - DNA, 25 bp, SARS Virus
gtgtatcccgactagttcgaccccg

SEQ ID NO: 236893 - DNA, 25 bp, SARS Virus
tgtatcccgacatgttcgaccccgt

SEQ ID NO: 236894 - DNA, 25 bp, SARS Virus
gtatcccgacaatttcgaccccgtc

SEQ ID NO: 236895 - DNA, 25 bp, SARS Virus
tatcccgacaagttcgaccccgtca

SEQ ID NO: 236896 - DNA, 25 bp, SARS Virus
atcccgacaagttcgaccccgtcat

SEQ ID NO: 236897 - DNA, 25 bp, SARS Virus
tcccgacaagtttgaccccgtcatg

SEQ ID NO: 236898 - DNA, 25 bp, SARS Virus
cccgacaagttctaccccgtcatgc

SEQ ID NO: 236899 - DNA, 25 bp, SARS Virus
ccgacaagttcgtccccgtcatgcg

SEQ ID NO: 236900 - DNA, 25 bp, SARS Virus
cgacaagttcgatcccgtcatgcgg

SEQ ID NO: 236901 - DNA, 25 bp, SARS Virus
gacaagttcgactccgtcatgcgga

SEQ ID NO: 236902 - DNA, 25 bp, SARS Virus
acaagttcgacctcgtcatgcggaa

SEQ ID NO: 236903 - DNA, 25 bp, SARS Virus
caagttcgaccctgtcatgcggaaa

SEQ ID NO: 236904 - DNA, 25 bp, SARS Virus
aagttcgaccccttcatgcggaaaa

SEQ ID NO: 236905 - DNA, 25 bp, SARS Virus
agttcgaccccgtcatgcggaaaaa

SEQ ID NO: 236906 - DNA, 25 bp, SARS Virus
gttcgaccccgttatgcggaaaaag

SEQ ID NO: 236907 - DNA, 25 bp, SARS Virus
ttcgaccccgtcttgcggaaaaagg

SEQ ID NO: 236908 - DNA, 25 bp, SARS Virus
tcgaccccgtcatgcggaaaaaggt

SEQ ID NO: 236909 - DNA, 25 bp, SARS Virus
cgaccccgtcattcggaaaaaggtc

SEQ ID NO: 236910 - DNA, 25 bp, SARS Virus
gaccccgtcatgtggaaaaaggtcg

SEQ ID NO: 236911 - DNA, 25 bp, SARS Virus
accccgtcatgctgaaaaaggtcga

SEQ ID NO: 236912 - DNA, 25 bp, SARS Virus
ccccgtcatgcgtaaaaaggtcgag

SEQ ID NO: 236913 - DNA, 25 bp, SARS Virus
cccgtcatgcggtaaaaggtcgaga

SEQ ID NO: 236914 - DNA, 25 bp, SARS Virus
ccgtcatgcggataaaggtcgagat

SEQ ID NO: 236915 - DNA, 25 bp, SARS Virus
cgtcatgcggaataaggtcgagatg

SEQ ID NO: 236916 - DNA, 25 bp, SARS Virus
gtcatgcggaaataggtcgagatga

SEQ ID NO: 236917 - DNA, 25 bp, SARS Virus
tcatgcggaaaatggtcgagatgat

SEQ ID NO: 236918 - DNA, 25 bp, SARS Virus
catgcggaaaaatgtcgagatgatc

SEQ ID NO: 236919 - DNA, 25 bp, SARS Virus
atgcggaaaaagttcgagatgatct

SEQ ID NO: 236920 - DNA, 25 bp, SARS Virus
tgcggaaaaaggtcgagatgatctg

SEQ ID NO: 236921 - DNA, 25 bp, SARS Virus
gcggaaaaaggttgagatgatctgg

SEQ ID NO: 236922 - DNA, 25 bp, SARS Virus
cggaaaaaggtctagatgatctggt

SEQ ID NO: 236923 - DNA, 25 bp, SARS Virus
ggaaaaaggtcgtgatgatctggtg

SEQ ID NO: 236924 - DNA, 25 bp, SARS Virus
gaaaaaggtcgatatgatctggtgt

SEQ ID NO: 236925 - DNA, 25 bp, SARS Virus
aaaaaggtcgagttgatctggtgtt

SEQ ID NO: 236926 - DNA, 25 bp, SARS Virus
aaaaggtcgagatgatctggtgttc

SEQ ID NO: 236927 - DNA, 25 bp, SARS Virus
aaaggtcgagattatctggtgttca

SEQ ID NO: 236928 - DNA, 25 bp, SARS Virus
aaggtcgagatgttctggtgttcac

SEQ ID NO: 236929 - DNA, 25 bp, SARS Virus
aggtcgagatgatctggtgttcacg

SEQ ID NO: 236930 - DNA, 25 bp, SARS Virus
ggtcgagatgatttggtgttcacgg

SEQ ID NO: 236931 - DNA, 25 bp, SARS Virus
gtcgagatgatctggtgttcacggt

SEQ ID NO: 236932 - DNA, 25 bp, SARS Virus
tcgagatgatcttgtgttcacggta

SEQ ID NO: 236933 - DNA, 25 bp, SARS Virus
cgagatgatctgttgttcacggtaa

SEQ ID NO: 236934 - DNA, 25 bp, SARS Virus
gagatgatctggtgttcacggtaaa

SEQ ID NO: 236935 - DNA, 25 bp, SARS Virus
agatgatctggttttcacggtaaaa

SEQ ID NO: 236936 - DNA, 25 bp, SARS Virus
gatgatctggtgttcacggtaaaaa

SEQ ID NO: 236937 - DNA, 25 bp, SARS Virus
atgatctggtgttcacggtaaaaac

SEQ ID NO: 236938 - DNA, 25 bp, SARS Virus
tgatctggtgtttacggtaaaaact

SEQ ID NO: 236939 - DNA, 25 bp, SARS Virus
gatctggtgttctcggtaaaaactc

SEQ ID NO: 236940 - DNA, 25 bp, SARS Virus
atctggtgttcatggtaaaaactcc

SEQ ID NO: 236941 - DNA, 25 bp, SARS Virus
tctggtgttcactgtaaaaactcca

SEQ ID NO: 236942 - DNA, 25 bp, SARS Virus
ctggtgttcacgttaaaaactccac

SEQ ID NO: 236943 - DNA, 25 bp, SARS Virus
tggtgttcacggtaaaaactccaca

SEQ ID NO: 236944 - DNA, 25 bp, SARS Virus
ggtgttcacggttaaaactccacaa

SEQ ID NO: 236945 - DNA, 25 bp, SARS Virus
gtgttcacggtataaactccacaag

SEQ ID NO: 236946 - DNA, 25 bp, SARS Virus
tgttcacggtaataactccacaagt

SEQ ID NO: 236947 - DNA, 25 bp, SARS Virus
gttcacggtaaatactccacaagtg

SEQ ID NO: 236948 - DNA, 25 bp, SARS Virus
ttcacggtaaaatctccacaagtgc

SEQ ID NO: 236949 - DNA, 25 bp, SARS Virus
tcacggtaaaaattccacaagtgca

SEQ ID NO: 236950 - DNA, 25 bp, SARS Virus
cacggtaaaaactccacaagtgcac

SEQ ID NO: 236951 - DNA, 25 bp, SARS Virus
acggtaaaaacttcacaagtgcacg

SEQ ID NO: 236952 - DNA, 25 bp, SARS Virus
cggtaaaaactctacaagtgcacgg

SEQ ID NO: 236953 - DNA, 25 bp, SARS Virus
ggtaaaaactcctcaagtgcacgga

SEQ ID NO: 236954 - DNA, 25 bp, SARS Virus
gtaaaaactccataagtgcacggag

SEQ ID NO: 236955 - DNA, 25 bp, SARS Virus
taaaaactccactagtgcacggagg

SEQ ID NO: 236956 - DNA, 25 bp, SARS Virus
aaaaactccacatgtgcacggaggc

SEQ ID NO: 236957 - DNA, 25 bp, SARS Virus
aaaactccacaattgcacggaggct

SEQ ID NO: 236958 - DNA, 25 bp, SARS Virus
aaactccacaagtgcacggaggcta

SEQ ID NO: 236959 - DNA, 25 bp, SARS Virus
aactccacaagttcacggaggctat

SEQ ID NO: 236960 - DNA, 25 bp, SARS Virus
actccacaagtgtacggaggctatc

SEQ ID NO: 236961 - DNA, 25 bp, SARS Virus
ctccacaagtgctcggaggctatcc

SEQ ID NO: 236962 - DNA, 25 bp, SARS Virus
tccacaagtgcatggaggctatccc

SEQ ID NO: 236963 - DNA, 25 bp, SARS Virus
ccacaagtgcactgaggctatcccg

SEQ ID NO: 236964 - DNA, 25 bp, SARS Virus
cacaagtgcacgtaggctatcccgg

SEQ ID NO: 236965 - DNA, 25 bp, SARS Virus
acaagtgcacggtggctatcccgga

SEQ ID NO: 236966 - DNA, 25 bp, SARS Virus
caagtgcacggatgctatcccggag

SEQ ID NO: 236967 - DNA, 25 bp, SARS Virus
aagtgcacggagtctatcccggaga

SEQ ID NO: 236968 - DNA, 25 bp, SARS Virus
agtgcacggaggttatcccggagaa

SEQ ID NO: 236969 - DNA, 25 bp, SARS Virus
gtgcacggaggctatcccggagaag

SEQ ID NO: 236970 - DNA, 25 bp, SARS Virus
tgcacggaggctttcccggagaagg

SEQ ID NO: 236971 - DNA, 25 bp, SARS Virus
gcacggaggctatcccggagaaggt

SEQ ID NO: 236972 - DNA, 25 bp, SARS Virus
cacggaggctattccggagaaggtg

SEQ ID NO: 236973 - DNA, 25 bp, SARS Virus
acggaggctatctcggagaaggtgt

SEQ ID NO: 236974 - DNA, 25 bp, SARS Virus
cggaggctatcctggagaaggtgtc

SEQ ID NO: 236975 - DNA, 25 bp, SARS Virus
ggaggctatccctgagaaggtgtct

SEQ ID NO: 236976 - DNA, 25 bp, SARS Virus
gaggctatcccgtagaaggtgtctc

SEQ ID NO: 236977 - DNA, 25 bp, SARS Virus
aggctatcccggtgaaggtgtctca

SEQ ID NO: 236978 - DNA, 25 bp, SARS Virus
ggctatcccggataaggtgtctcag

SEQ ID NO: 236979 - DNA, 25 bp, SARS Virus
gctatcccggagtaggtgtctcagg

SEQ ID NO: 236980 - DNA, 25 bp, SARS Virus
ctatcccggagatggtgtctcaggg

SEQ ID NO: 236981 - DNA, 25 bp, SARS Virus
tatcccggagaatgtgtctcagggg

SEQ ID NO: 236982 - DNA, 25 bp, SARS Virus
atcccggagaagttgtctcaggggc

SEQ ID NO: 236983 - DNA, 25 bp, SARS Virus
tcccggagaaggtgtctcaggggct

SEQ ID NO: 236984 - DNA, 25 bp, SARS Virus
cccggagaaggtttctcaggggctt

SEQ ID NO: 236985 - DNA, 25 bp, SARS Virus
ccggagaaggtgtctcaggggcttc

SEQ ID NO: 236986 - DNA, 25 bp, SARS Virus
cggagaaggtgtttcaggggcttcg

SEQ ID NO: 236987 - DNA, 25 bp, SARS Virus
ggagaaggtgtctcaggggcttcgg

SEQ ID NO: 236988 - DNA, 25 bp, SARS Virus
gagaaggtgtcttaggggcttcggt

SEQ ID NO: 236989 - DNA, 25 bp, SARS Virus
agaaggtgtctctggggcttcggtg

SEQ ID NO: 236990 - DNA, 25 bp, SARS Virus
gaaggtgtctcatgggcttcggtgc

SEQ ID NO: 236991 - DNA, 25 bp, SARS Virus
aaggtgtctcagtggcttcggtgcg

SEQ ID NO: 236992 - DNA, 25 bp, SARS Virus
aggtgtctcaggtgcttcggtgcgt

SEQ ID NO: 236993 - DNA, 25 bp, SARS Virus
ggtgtctcagggtcttcggtgcgtg

SEQ ID NO: 236994 - DNA, 25 bp, SARS Virus
gtgtctcaggggtttcggtgcgtga

SEQ ID NO: 236995 - DNA, 25 bp, SARS Virus
tgtctcaggggcttcggtgcgtgat

SEQ ID NO: 236996 - DNA, 25 bp, SARS Virus
gtctcaggggcttcggtgcgtgatc

SEQ ID NO: 236997 - DNA, 25 bp, SARS Virus
tctcaggggctttggtgcgtgatcg

SEQ ID NO: 236998 - DNA, 25 bp, SARS Virus
ctcaggggcttctgtgcgtgatcgt

SEQ ID NO: 236999 - DNA, 25 bp, SARS Virus
tcaggggcttcgttgcgtgatcgtg

SEQ ID NO: 237000 - DNA, 25 bp, SARS Virus
caggggcttcggtgcgtgatcgtgc

SEQ ID NO: 237001 - DNA, 25 bp, SARS Virus
aggggcttcggttcgtgatcgtgca

SEQ ID NO: 237002 - DNA, 25 bp, SARS Virus
ggggcttcggtgtgtgatcgtgcag

SEQ ID NO: 237003 - DNA, 25 bp, SARS Virus
gggcttcggtgcttgatcgtgcaga

SEQ ID NO: 237004 - DNA, 25 bp, SARS Virus
ggcttcggtgcgtgatcgtgcagag

SEQ ID NO: 237005 - DNA, 25 bp, SARS Virus
gcttcggtgcgttatcgtgcagaga

SEQ ID NO: 237006 - DNA, 25 bp, SARS Virus
cttcggtgcgtgttcgtgcagagat

SEQ ID NO: 237007 - DNA, 25 bp, SARS Virus
ttcggtgcgtgatcgtgcagagatt

SEQ ID NO: 237008 - DNA, 25 bp, SARS Virus
tcggtgcgtgattgtgcagagattg

SEQ ID NO: 237009 - DNA, 25 bp, SARS Virus
cggtgcgtgatcttgcagagattgg

SEQ ID NO: 237010 - DNA, 25 bp, SARS Virus
ggtgcgtgatcgtgcagagattgga

SEQ ID NO: 237011 - DNA, 25 bp, SARS Virus
gtgcgtgatcgttcagagattggac

SEQ ID NO: 237012 - DNA, 25 bp, SARS Virus
tgcgtgatcgtgtagagattggact

SEQ ID NO: 237013 - DNA, 25 bp, SARS Virus
gcgtgatcgtgctgagattggactt

SEQ ID NO: 237014 - DNA, 25 bp, SARS Virus
cgtgatcgtgcatagattggacttc

SEQ ID NO: 237015 - DNA, 25 bp, SARS Virus
gtgatcgtgcagtgattggacttcc

SEQ ID NO: 237016 - DNA, 25 bp, SARS Virus
tgatcgtgcagatattggacttcct

SEQ ID NO: 237017 - DNA, 25 bp, SARS Virus
gatcgtgcagagtttggacttcctg

SEQ ID NO: 237018 - DNA, 25 bp, SARS Virus
atcgtgcagagattggacttcctgt

SEQ ID NO: 237019 - DNA, 25 bp, SARS Virus
tcgtgcagagattggacttcctgtc

SEQ ID NO: 237020 - DNA, 25 bp, SARS Virus
cgtgcagagatttgacttcctgtcc

SEQ ID NO: 237021 - DNA, 25 bp, SARS Virus
gtgcagagattgtacttcctgtccg

SEQ ID NO: 237022 - DNA, 25 bp, SARS Virus
tgcagagattggtcttcctgtccgt

SEQ ID NO: 237023 - DNA, 25 bp, SARS Virus
gcagagattggatttcctgtccgtt

SEQ ID NO: 237024 - DNA, 25 bp, SARS Virus
cagagattggacttcctgtccgttt

SEQ ID NO: 237025 - DNA, 25 bp, SARS Virus
agagattggacttcctgtccgtttg

SEQ ID NO: 237026 - DNA, 25 bp, SARS Virus
gagattggactttctgtccgtttga

SEQ ID NO: 237027 - DNA, 25 bp, SARS Virus
agattggacttcttgtccgtttgac

SEQ ID NO: 237028 - DNA, 25 bp, SARS Virus
gattggacttcctgtccgtttgact

SEQ ID NO: 237029 - DNA, 25 bp, SARS Virus
attggacttcctttccgtttgactc

SEQ ID NO: 237030 - DNA, 25 bp, SARS Virus
ttggacttcctgtccgtttgactca

SEQ ID NO: 237031 - DNA, 25 bp, SARS Virus
tggacttcctgttcgtttgactcaa

SEQ ID NO: 237032 - DNA, 25 bp, SARS Virus
ggacttcctgtctgtttgactcaac

SEQ ID NO: 237033 - DNA, 25 bp, SARS Virus
gacttcctgtccttttgactcaacc

SEQ ID NO: 237034 - DNA, 25 bp, SARS Virus
acttcctgtccgtttgactcaacct

SEQ ID NO: 237035 - DNA, 25 bp, SARS Virus
cttcctgtccgtttgactcaacctg

SEQ ID NO: 237036 - DNA, 25 bp, SARS Virus
ttcctgtccgtttgactcaacctgc

SEQ ID NO: 237037 - DNA, 25 bp, SARS Virus
tcctgtccgttttactcaacctgca

SEQ ID NO: 237038 - DNA, 25 bp, SARS Virus
cctgtccgtttgtctcaacctgcac

SEQ ID NO: 237039 - DNA, 25 bp, SARS Virus
ctgtccgtttgattcaacctgcaca

SEQ ID NO: 237040 - DNA, 25 bp, SARS Virus
tgtccgtttgactcaacctgcacac

SEQ ID NO: 237041 - DNA, 25 bp, SARS Virus
gtccgtttgacttaacctgcacaca

SEQ ID NO: 237042 - DNA, 25 bp, SARS Virus
tccgtttgactctacctgcacacaa

SEQ ID NO: 237043 - DNA, 25 bp, SARS Virus
ccgtttgactcatcctgcacacaaa

SEQ ID NO: 237044 - DNA, 25 bp, SARS Virus
cgtttgactcaatctgcacacaaaa

SEQ ID NO: 237045 - DNA, 25 bp, SARS Virus
gtttgactcaacttgcacacaaaag

SEQ ID NO: 237046 - DNA, 25 bp, SARS Virus
tttgactcaacctgcacacaaaaga

SEQ ID NO: 237047 - DNA, 25 bp, SARS Virus
ttgactcaaccttcacacaaaagag

SEQ ID NO: 237048 - DNA, 25 bp, SARS Virus
tgactcaacctgtacacaaaagagc

SEQ ID NO: 237049 - DNA, 25 bp, SARS Virus
gactcaacctgctcacaaaagagca

SEQ ID NO: 237050 - DNA, 25 bp, SARS Virus
actcaacctgcatacaaaagagcaa

SEQ ID NO: 237051 - DNA, 25 bp, SARS Virus
ctcaacctgcactcaaaagagcaac

SEQ ID NO: 237052 - DNA, 25 bp, SARS Virus
tcaacctgcacataaaagagcaact

SEQ ID NO: 237053 - DNA, 25 bp, SARS Virus
caacctgcacactaaagagcaactg

SEQ ID NO: 237054 - DNA, 25 bp, SARS Virus
aacctgcacacataagagcaactgt

SEQ ID NO: 237055 - DNA, 25 bp, SARS Virus
acctgcacacaatagagcaactgtg

SEQ ID NO: 237056 - DNA, 25 bp, SARS Virus
cctgcacacaaatgagcaactgtgg

SEQ ID NO: 237057 - DNA, 25 bp, SARS Virus
ctgcacacaaaatagcaactgtggt

SEQ ID NO: 237058 - DNA, 25 bp, SARS Virus
tgcacacaaaagtgcaactgtggtt

SEQ ID NO: 237059 - DNA, 25 bp, SARS Virus
gcacacaaaagatcaactgtggttc

SEQ ID NO: 237060 - DNA, 25 bp, SARS Virus
cacacaaaagagtaactgtggttct

SEQ ID NO: 237061 - DNA, 25 bp, SARS Virus
acacaaaagagctactgtggttctt

SEQ ID NO: 237062 - DNA, 25 bp, SARS Virus
cacaaaagagcatctgtggttcttg

SEQ ID NO: 237063 - DNA, 25 bp, SARS Virus
acaaaagagcaattgtggttcttgt

SEQ ID NO: 237064 - DNA, 25 bp, SARS Virus
caaaagagcaactgtggttcttgtt

SEQ ID NO: 237065 - DNA, 25 bp, SARS Virus
aaaagagcaactttggttcttgttc

SEQ ID NO: 237066 - DNA, 25 bp, SARS Virus
aaagagcaactgtggttcttgttcc

SEQ ID NO: 237067 - DNA, 25 bp, SARS Virus
aagagcaactgttgttcttgttccg

SEQ ID NO: 237068 - DNA, 25 bp, SARS Virus
agagcaactgtgtttcttgttccga

SEQ ID NO: 237069 - DNA, 25 bp, SARS Virus
gagcaactgtggttcttgttccgag

SEQ ID NO: 237070 - DNA, 25 bp, SARS Virus
agcaactgtggttcttgttccgaga

SEQ ID NO: 237071 - DNA, 25 bp, SARS Virus
gcaactgtggtttttgttccgagag

SEQ ID NO: 237072 - DNA, 25 bp, SARS Virus
caactgtggttcttgttccgagagg

SEQ ID NO: 237073 - DNA, 25 bp, SARS Virus
aactgtggttcttgttccgagaggt

SEQ ID NO: 237074 - DNA, 25 bp, SARS Virus
actgtggttctttttccgagaggta

SEQ ID NO: 237075 - DNA, 25 bp, SARS Virus
ctgtggttcttgttccgagaggtag

SEQ ID NO: 237076 - DNA, 25 bp, SARS Virus
tgtggttcttgttccgagaggtaga

SEQ ID NO: 237077 - DNA, 25 bp, SARS Virus
gtggttcttgtttcgagaggtagaa

SEQ ID NO: 237078 - DNA, 25 bp, SARS Virus
tggttcttgttctgagaggtagaat

SEQ ID NO: 237079 - DNA, 25 bp, SARS Virus
ggttcttgttcctagaggtagaatg

SEQ ID NO: 237080 - DNA, 25 bp, SARS Virus
gttcttgttccgtgaggtagaatgg

SEQ ID NO: 237081 - DNA, 25 bp, SARS Virus
ttcttgttccgataggtagaatgga

SEQ ID NO: 237082 - DNA, 25 bp, SARS Virus
tcttgttccgagtggtagaatggaa

SEQ ID NO: 237083 - DNA, 25 bp, SARS Virus
cttgttccgagatgtagaatggaaa

SEQ ID NO: 237084 - DNA, 25 bp, SARS Virus
ttgttccgagagttagaatggaaag

SEQ ID NO: 237085 - DNA, 25 bp, SARS Virus
tgttccgagaggtagaatggaaagc

SEQ ID NO: 237086 - DNA, 25 bp, SARS Virus
gttccgagaggttgaatggaaagcc

SEQ ID NO: 237087 - DNA, 25 bp, SARS Virus
ttccgagaggtataatggaaagcca

SEQ ID NO: 237088 - DNA, 25 bp, SARS Virus
tccgagaggtagtatggaaagccag

SEQ ID NO: 237089 - DNA, 25 bp, SARS Virus
ccgagaggtagattggaaagccagt

SEQ ID NO: 237090 - DNA, 25 bp, SARS Virus
cgagaggtagaatggaaagccagtg

SEQ ID NO: 237091 - DNA, 25 bp, SARS Virus
gagaggtagaattgaaagccagtgt

SEQ ID NO: 237092 - DNA, 25 bp, SARS Virus
agaggtagaatgtaaagccagtgtg

SEQ ID NO: 237093 - DNA, 25 bp, SARS Virus
gaggtagaatggtaagccagtgtgg

SEQ ID NO: 237094 - DNA, 25 bp, SARS Virus
aggtagaatggatagccagtgtggg

SEQ ID NO: 237095 - DNA, 25 bp, SARS Virus
ggtagaatggaatgccagtgtgggc

SEQ ID NO: 237096 - DNA, 25 bp, SARS Virus
gtagaatggaaatccagtgtgggcc

SEQ ID NO: 237097 - DNA, 25 bp, SARS Virus
tagaatggaaagtcagtgtgggcct

SEQ ID NO: 237098 - DNA, 25 bp, SARS Virus
agaatggaaagctagtgtgggcctg

SEQ ID NO: 237099 - DNA, 25 bp, SARS Virus
gaatggaaagcctgtgtgggcctgc

SEQ ID NO: 237100 - DNA, 25 bp, SARS Virus
aatggaaagccattgtgggcctgct

SEQ ID NO: 237101 - DNA, 25 bp, SARS Virus
atggaaagccagtgtgggcctgctt

SEQ ID NO: 237102 - DNA, 25 bp, SARS Virus
tggaaagccagtttgggcctgcttt

SEQ ID NO: 237103 - DNA, 25 bp, SARS Virus
ggaaagccagtgtgggcctgctttg

SEQ ID NO: 237104 - DNA, 25 bp, SARS Virus
gaaagccagtgttggcctgctttgg

SEQ ID NO: 237105 - DNA, 25 bp, SARS Virus
aaagccagtgtgtgcctgctttgga

SEQ ID NO: 237106 - DNA, 25 bp, SARS Virus
aagccagtgtggtcctgctttggat

SEQ ID NO: 237107 - DNA, 25 bp, SARS Virus
agccagtgtgggtctgctttggatc

SEQ ID NO: 237108 - DNA, 25 bp, SARS Virus
gccagtgtgggcttgctttggatcc

SEQ ID NO: 237109 - DNA, 25 bp, SARS Virus
ccagtgtgggcctgctttggatcca

SEQ ID NO: 237110 - DNA, 25 bp, SARS Virus
cagtgtgggccttctttggatccat

SEQ ID NO: 237111 - DNA, 25 bp, SARS Virus
agtgtgggcctgttttggatccata

SEQ ID NO: 237112 - DNA, 25 bp, SARS Virus
gtgtgggcctgctttggatccatac

SEQ ID NO: 237113 - DNA, 25 bp, SARS Virus
tgtgggcctgctttggatccatacg

SEQ ID NO: 237114 - DNA, 25 bp, SARS Virus
gtgggcctgctttggatccatacga

SEQ ID NO: 237115 - DNA, 25 bp, SARS Virus
tgggcctgcttttgatccatacgac

SEQ ID NO: 237116 - DNA, 25 bp, SARS Virus
gggcctgctttgtatccatacgact

SEQ ID NO: 237117 - DNA, 25 bp, SARS Virus
ggcctgctttggttccatacgacta

SEQ ID NO: 237118 - DNA, 25 bp, SARS Virus
gcctgctttggatccatacgactac

SEQ ID NO: 237119 - DNA, 25 bp, SARS Virus
cctgctttggattcatacgactact

SEQ ID NO: 237120 - DNA, 25 bp, SARS Virus
ctgctttggatctatacgactacta

SEQ ID NO: 237121 - DNA, 25 bp, SARS Virus
tgctttggatccttacgactactag

SEQ ID NO: 237122 - DNA, 25 bp, SARS Virus
gctttggatccatacgactactagc

SEQ ID NO: 237123 - DNA, 25 bp, SARS Virus
ctttggatccattcgactactagct

SEQ ID NO: 237124 - DNA, 25 bp, SARS Virus
tttggatccatatgactactagctg

SEQ ID NO: 237125 - DNA, 25 bp, SARS Virus
ttggatccatactactactagctga

SEQ ID NO: 237126 - DNA, 25 bp, SARS Virus
tggatccatacgtctactagctgac

SEQ ID NO: 237127 - DNA, 25 bp, SARS Virus
ggatccatacgattactagctgacg

SEQ ID NO: 237128 - DNA, 25 bp, SARS Virus
gatccatacgactactagctgacgt

SEQ ID NO: 237129 - DNA, 25 bp, SARS Virus
atccatacgacttctagctgacgtt

SEQ ID NO: 237130 - DNA, 25 bp, SARS Virus
tccatacgactattagctgacgttg

SEQ ID NO: 237131 - DNA, 25 bp, SARS Virus
ccatacgactactagctgacgttgt

SEQ ID NO: 237132 - DNA, 25 bp, SARS Virus
catacgactacttgctgacgttgtg

SEQ ID NO: 237133 - DNA, 25 bp, SARS Virus
atacgactactatctgacgttgtgc

SEQ ID NO: 237134 - DNA, 25 bp, SARS Virus
tacgactactagttgacgttgtgcc

SEQ ID NO: 237135 - DNA, 25 bp, SARS Virus
acgactactagctgacgttgtgcct

SEQ ID NO: 237136 - DNA, 25 bp, SARS Virus
cgactactagcttacgttgtgcctg

SEQ ID NO: 237137 - DNA, 25 bp, SARS Virus
gactactagctgtcgttgtgcctgc

SEQ ID NO: 237138 - DNA, 25 bp, SARS Virus
actactagctgatgttgtgcctgct

SEQ ID NO: 237139 - DNA, 25 bp, SARS Virus
ctactagctgactttgtgcctgctt

SEQ ID NO: 237140 - DNA, 25 bp, SARS Virus
tactagctgacgttgtgcctgcttt

SEQ ID NO: 237141 - DNA, 25 bp, SARS Virus
actagctgacgttgtgcctgctttg

SEQ ID NO: 237142 - DNA, 25 bp, SARS Virus
ctagctgacgttttgcctgctttgg

SEQ ID NO: 237143 - DNA, 25 bp, SARS Virus
tagctgacgttgtgcctgctttggc

SEQ ID NO: 237144 - DNA, 25 bp, SARS Virus
agctgacgttgttcctgctttggca

SEQ ID NO: 237145 - DNA, 25 bp, SARS Virus
gctgacgttgtgtctgctttggcat

SEQ ID NO: 237146 - DNA, 25 bp, SARS Virus
ctgacgttgtgcttgctttggcatt

SEQ ID NO: 237147 - DNA, 25 bp, SARS Virus
tgacgttgtgcctgctttggcattc

SEQ ID NO: 237148 - DNA, 25 bp, SARS Virus
gacgttgtgccttctttggcattcg

SEQ ID NO: 237149 - DNA, 25 bp, SARS Virus
acgttgtgcctgttttggcattcgt

SEQ ID NO: 237150 - DNA, 25 bp, SARS Virus
cgttgtgcctgctttggcattcgtc

SEQ ID NO: 237151 - DNA, 25 bp, SARS Virus
gttgtgcctgctttggcattcgtca

SEQ ID NO: 237152 - DNA, 25 bp, SARS Virus
ttgtgcctgctttggcattcgtcag

SEQ ID NO: 237153 - DNA, 25 bp, SARS Virus
tgtgcctgcttttgcattcgtcaga

SEQ ID NO: 237154 - DNA, 25 bp, SARS Virus
gtgcctgctttgtcattcgtcagac

SEQ ID NO: 237155 - DNA, 25 bp, SARS Virus
tgcctgctttggtattcgtcagacg

SEQ ID NO: 237156 - DNA, 25 bp, SARS Virus
gcctgctttggctttcgtcagacgt

SEQ ID NO: 237157 - DNA, 25 bp, SARS Virus
cctgctttggcattcgtcagacgtc

SEQ ID NO: 237158 - DNA, 25 bp, SARS Virus
ctgctttggcattcgtcagacgtct

SEQ ID NO: 237159 - DNA, 25 bp, SARS Virus
tgctttggcatttgtcagacgtctt

SEQ ID NO: 237160 - DNA, 25 bp, SARS Virus
gctttggcattcttcagacgtcttc

SEQ ID NO: 237161 - DNA, 25 bp, SARS Virus
ctttggcattcgtcagacgtcttct

SEQ ID NO: 237162 - DNA, 25 bp, SARS Virus
tttggcattcgttagacgtcttctc

SEQ ID NO: 237163 - DNA, 25 bp, SARS Virus
ttggcattcgtctgacgtcttctcc

SEQ ID NO: 237164 - DNA, 25 bp, SARS Virus
tggcattcgtcatacgtcttctccc

SEQ ID NO: 237165 - DNA, 25 bp, SARS Virus
ggcattcgtcagtcgtcttctccct

SEQ ID NO: 237166 - DNA, 25 bp, SARS Virus
gcattcgtcagatgtcttctccctg

SEQ ID NO: 237167 - DNA, 25 bp, SARS Virus
cattcgtcagacttcttctccctgc

SEQ ID NO: 237168 - DNA, 25 bp, SARS Virus
attcgtcagacgtcttctccctgct

SEQ ID NO: 237169 - DNA, 25 bp, SARS Virus
ttcgtcagacgttttctccctgctc

SEQ ID NO: 237170 - DNA, 25 bp, SARS Virus
tcgtcagacgtcttctccctgctca

SEQ ID NO: 237171 - DNA, 25 bp, SARS Virus
cgtcagacgtcttctccctgctcaa

SEQ ID NO: 237172 - DNA, 25 bp, SARS Virus
gtcagacgtcttttccctgctcaat

SEQ ID NO: 237173 - DNA, 25 bp, SARS Virus
tcagacgtcttctccctgctcaatg

SEQ ID NO: 237174 - DNA, 25 bp, SARS Virus
cagacgtcttcttcctgctcaatga

SEQ ID NO: 237175 - DNA, 25 bp, SARS Virus
agacgtcttctctctgctcaatgag

SEQ ID NO: 237176 - DNA, 25 bp, SARS Virus
gacgtcttctccttgctcaatgagc

SEQ ID NO: 237177 - DNA, 25 bp, SARS Virus
acgtcttctccctgctcaatgagca

SEQ ID NO: 237178 - DNA, 25 bp, SARS Virus
cgtcttctcccttctcaatgagcaa

SEQ ID NO: 237179 - DNA, 25 bp, SARS Virus
gtcttctccctgttcaatgagcaaa

SEQ ID NO: 237180 - DNA, 25 bp, SARS Virus
tcttctccctgctcaatgagcaaag

SEQ ID NO: 237181 - DNA, 25 bp, SARS Virus
cttctccctgcttaatgagcaaaga

SEQ ID NO: 237182 - DNA, 25 bp, SARS Virus
ttctccctgctctatgagcaaagaa

SEQ ID NO: 237183 - DNA, 25 bp, SARS Virus
tctccctgctcattgagcaaagaac

SEQ ID NO: 237184 - DNA, 25 bp, SARS Virus
ctccctgctcaatgagcaaagaaca

SEQ ID NO: 237185 - DNA, 25 bp, SARS Virus
tccctgctcaattagcaaagaacag

SEQ ID NO: 237186 - DNA, 25 bp, SARS Virus
ccctgctcaatgtgcaaagaacagt

SEQ ID NO: 237187 - DNA, 25 bp, SARS Virus
cctgctcaatgatcaaagaacagtt

SEQ ID NO: 237188 - DNA, 25 bp, SARS Virus
ctgctcaatgagtaaagaacagttg

SEQ ID NO: 237189 - DNA, 25 bp, SARS Virus
tgctcaatgagctaagaacagttgc

SEQ ID NO: 237190 - DNA, 25 bp, SARS Virus
gctcaatgagcatagaacagttgct

SEQ ID NO: 237191 - DNA, 25 bp, SARS Virus
ctcaatgagcaatgaacagttgctg

SEQ ID NO: 237192 - DNA, 25 bp, SARS Virus
tcaatgagcaaataacagttgctgt

SEQ ID NO: 237193 - DNA, 25 bp, SARS Virus
caatgagcaaagtacagttgctgtc

SEQ ID NO: 237194 - DNA, 25 bp, SARS Virus
aatgagcaaagatcagttgctgtca

SEQ ID NO: 237195 - DNA, 25 bp, SARS Virus
atgagcaaagaatagttgctgtcat

SEQ ID NO: 237196 - DNA, 25 bp, SARS Virus
tgagcaaagaactgttgctgtcatt

SEQ ID NO: 237197 - DNA, 25 bp, SARS Virus
gagcaaagaacatttgctgtcattt

SEQ ID NO: 237198 - DNA, 25 bp, SARS Virus
agcaaagaacagttgctgtcatttt

SEQ ID NO: 237199 - DNA, 25 bp, SARS Virus
gcaaagaacagttgctgtcatttta

SEQ ID NO: 237200 - DNA, 25 bp, SARS Virus
caaagaacagtttctgtcattttaa

SEQ ID NO: 237201 - DNA, 25 bp, SARS Virus
aaagaacagttgatgtcattttaaa

SEQ ID NO: 237202 - DNA, 25 bp, SARS Virus
aagaacagttgcagtcattttaaat

SEQ ID NO: 237203 - DNA, 25 bp, SARS Virus
agaacagttgctatcattttaaata

SEQ ID NO: 237204 - DNA, 25 bp, SARS Virus
gaacagttgctgacattttaaataa

SEQ ID NO: 237205 - DNA, 25 bp, SARS Virus
aacagttgctgtaattttaaataat

SEQ ID NO: 237206 - DNA, 25 bp, SARS Virus
acagttgctgtcattttaaataata

SEQ ID NO: 237207 - DNA, 25 bp, SARS Virus
cagttgctgtcaatttaaataataa

SEQ ID NO: 237208 - DNA, 25 bp, SARS Virus
agttgctgtcatattaaataataac

SEQ ID NO: 237209 - DNA, 25 bp, SARS Virus
gttgctgtcattataaataataaca

SEQ ID NO: 237210 - DNA, 25 bp, SARS Virus
ttgctgtcatttaaaataataacaa

SEQ ID NO: 237211 - DNA, 25 bp, SARS Virus
tgctgtcattttaaataataacaaa

SEQ ID NO: 237212 - DNA, 25 bp, SARS Virus
gctgtcattttaaataataacaaat

SEQ ID NO: 237213 - DNA, 25 bp, SARS Virus
ctgtcattttaaataataacaaata

SEQ ID NO: 237214 - DNA, 25 bp, SARS Virus
tgtcattttaaaaaataacaaatat

SEQ ID NO: 237215 - DNA, 25 bp, SARS Virus
gtcattttaaataataacaaatatg

SEQ ID NO: 237216 - DNA, 25 bp, SARS Virus
tcattttaaataataacaaatatga

SEQ ID NO: 237217 - DNA, 25 bp, SARS Virus
cattttaaataaaaacaaatatgac

SEQ ID NO: 237218 - DNA, 25 bp, SARS Virus
attttaaataataacaaatatgacg

SEQ ID NO: 237219 - DNA, 25 bp, SARS Virus
ttttaaataataacaaatatgacgc

SEQ ID NO: 237220 - DNA, 25 bp, SARS Virus
tttaaataataaaaaatatgacgca

SEQ ID NO: 237221 - DNA, 25 bp, SARS Virus
ttaaataataacaaatatgacgcat

SEQ ID NO: 237222 - DNA, 25 bp, SARS Virus
taaataataacaaatatgacgcatc

SEQ ID NO: 237223 - DNA, 25 bp, SARS Virus
aaataataacaaatatgacgcatcc

SEQ ID NO: 237224 - DNA, 25 bp, SARS Virus
aataataacaaaaatgacgcatcca

SEQ ID NO: 237225 - DNA, 25 bp, SARS Virus
ataataacaaatatgacgcatccac

SEQ ID NO: 237226 - DNA, 25 bp, SARS Virus
taataacaaataagacgcatccacg

SEQ ID NO: 237227 - DNA, 25 bp, SARS Virus
aataacaaatataacgcatccacgt

SEQ ID NO: 237228 - DNA, 25 bp, SARS Virus
ataacaaatatgacgcatccacgtg

SEQ ID NO: 237229 - DNA, 25 bp, SARS Virus
taacaaatatgaagcatccacgtga

SEQ ID NO: 237230 - DNA, 25 bp, SARS Virus
aacaaatatgacacatccacgtgat

SEQ ID NO: 237231 - DNA, 25 bp, SARS Virus
acaaatatgacgaatccacgtgatc

SEQ ID NO: 237232 - DNA, 25 bp, SARS Virus
caaatatgacgcatccacgtgatcc

SEQ ID NO: 237233 - DNA, 25 bp, SARS Virus
aaatatgacgcaaccacgtgatccg

SEQ ID NO: 237234 - DNA, 25 bp, SARS Virus
aatatgacgcatacacgtgatccgt

SEQ ID NO: 237235 - DNA, 25 bp, SARS Virus
atatgacgcatcaacgtgatccgta

SEQ ID NO: 237236 - DNA, 25 bp, SARS Virus
tatgacgcatccacgtgatccgtac

SEQ ID NO: 237237 - DNA, 25 bp, SARS Virus
atgacgcatccaagtgatccgtacg

SEQ ID NO: 237238 - DNA, 25 bp, SARS Virus
tgacgcatccacatgatccgtacgt

SEQ ID NO: 237239 - DNA, 25 bp, SARS Virus
gacgcatccacgagatccgtacgtc

SEQ ID NO: 237240 - DNA, 25 bp, SARS Virus
acgcatccacgtaatccgtacgtcg

SEQ ID NO: 237241 - DNA, 25 bp, SARS Virus
cgcatccacgtgatccgtacgtcgg

SEQ ID NO: 237242 - DNA, 25 bp, SARS Virus
gcatccacgtgaaccgtacgtcggc

SEQ ID NO: 237243 - DNA, 25 bp, SARS Virus
catccacgtgatacgtacgtcggct

SEQ ID NO: 237244 - DNA, 25 bp, SARS Virus
atccacgtgatcagtacgtcggctc

SEQ ID NO: 237245 - DNA, 25 bp, SARS Virus
tccacgtgatccatacgtcggctcg

SEQ ID NO: 237246 - DNA, 25 bp, SARS Virus
ccacgtgatccgaacgtcggctcgc

SEQ ID NO: 237247 - DNA, 25 bp, SARS Virus
cacgtgatccgtacgtcggctcgct

SEQ ID NO: 237248 - DNA, 25 bp, SARS Virus
acgtgatccgtaagtcggctcgctg

SEQ ID NO: 237249 - DNA, 25 bp, SARS Virus
cgtgatccgtacatcggctcgctgt

SEQ ID NO: 237250 - DNA, 25 bp, SARS Virus
gtgatccgtacgacggctcgctgtc

SEQ ID NO: 237251 - DNA, 25 bp, SARS Virus
tgatccgtacgtaggctcgctgtcg

SEQ ID NO: 237252 - DNA, 25 bp, SARS Virus
gatccgtacgtcagctcgctgtcga

SEQ ID NO: 237253 - DNA, 25 bp, SARS Virus
atccgtacgtcgactcgctgtcgat

SEQ ID NO: 237254 - DNA, 25 bp, SARS Virus
tccgtacgtcggatcgctgtcgatg

SEQ ID NO: 237255 - DNA, 25 bp, SARS Virus
ccgtacgtcggcacgctgtcgatgt

SEQ ID NO: 237256 - DNA, 25 bp, SARS Virus
cgtacgtcggctagctgtcgatgtg

SEQ ID NO: 237257 - DNA, 25 bp, SARS Virus
gtacgtcggctcactgtcgatgtgt

SEQ ID NO: 237258 - DNA, 25 bp, SARS Virus
tacgtcggctcgatgtcgatgtgtc

SEQ ID NO: 237259 - DNA, 25 bp, SARS Virus
acgtcggctcgcagtcgatgtgtct

SEQ ID NO: 237260 - DNA, 25 bp, SARS Virus
cgtcggctcgctatcgatgtgtcta

SEQ ID NO: 237261 - DNA, 25 bp, SARS Virus
gtcggctcgctgacgatgtgtctaa

SEQ ID NO: 237262 - DNA, 25 bp, SARS Virus
tcggctcgctgtagatgtgtctaaa

SEQ ID NO: 237263 - DNA, 25 bp, SARS Virus
cggctcgctgtcaatgtgtctaaaa

SEQ ID NO: 237264 - DNA, 25 bp, SARS Virus
ggctcgctgtcgatgtgtctaaaat

SEQ ID NO: 237265 - DNA, 25 bp, SARS Virus
gctcgctgtcgaagtgtctaaaatt

SEQ ID NO: 237266 - DNA, 25 bp, SARS Virus
ctcgctgtcgatatgtctaaaattt

SEQ ID NO: 237267 - DNA, 25 bp, SARS Virus
tcgctgtcgatgagtctaaaatttc

SEQ ID NO: 237268 - DNA, 25 bp, SARS Virus
cgctgtcgatgtatctaaaatttca

SEQ ID NO: 237269 - DNA, 25 bp, SARS Virus
gctgtcgatgtgactaaaatttcaa

SEQ ID NO: 237270 - DNA, 25 bp, SARS Virus
ctgtcgatgtgtataaaatttcaag

SEQ ID NO: 237271 - DNA, 25 bp, SARS Virus
tgtcgatgtgtcaaaaatttcaagc

SEQ ID NO: 237272 - DNA, 25 bp, SARS Virus
gtcgatgtgtctaaaatttcaagca

SEQ ID NO: 237273 - DNA, 25 bp, SARS Virus
tcgatgtgtctaaaatttcaagcaa

SEQ ID NO: 237274 - DNA, 25 bp, SARS Virus
cgatgtgtctaaaatttcaagcaaa

SEQ ID NO: 237275 - DNA, 25 bp, SARS Virus
gatgtgtctaaaatttcaagcaaat

SEQ ID NO: 237276 - DNA, 25 bp, SARS Virus
atgtgtctaaaaattcaagcaaatc

SEQ ID NO: 237277 - DNA, 25 bp, SARS Virus
tgtgtctaaaatatcaagcaaatct

SEQ ID NO: 237278 - DNA, 25 bp, SARS Virus
gtgtctaaaattacaagcaaatctc

SEQ ID NO: 237279 - DNA, 25 bp, SARS Virus
tgtctaaaatttaaagcaaatctct

SEQ ID NO: 237280 - DNA, 25 bp, SARS Virus
gtctaaaatttcaagcaaatctctt

SEQ ID NO: 237281 - DNA, 25 bp, SARS Virus
tctaaaatttcaagcaaatctcttg

SEQ ID NO: 237282 - DNA, 25 bp, SARS Virus
ctaaaatttcaaacaaatctcttgt

SEQ ID NO: 237283 - DNA, 25 bp, SARS Virus
taaaatttcaagaaaatctcttgtc

SEQ ID NO: 237284 - DNA, 25 bp, SARS Virus
aaaatttcaagcaaatctcttgtct

SEQ ID NO: 237285 - DNA, 25 bp, SARS Virus
aaatttcaagcaaatctcttgtcta

SEQ ID NO: 237286 - DNA, 25 bp, SARS Virus
aatttcaagcaaatctcttgtctag

SEQ ID NO: 237287 - DNA, 25 bp, SARS Virus
atttcaagcaaaactcttgtctaga

SEQ ID NO: 237288 - DNA, 25 bp, SARS Virus
tttcaagcaaatatcttgtctagat

SEQ ID NO: 237289 - DNA, 25 bp, SARS Virus
ttcaagcaaatcacttgtctagatg

SEQ ID NO: 237290 - DNA, 25 bp, SARS Virus
tcaagcaaatctattgtctagatgt

SEQ ID NO: 237291 - DNA, 25 bp, SARS Virus
caagcaaatctcatgtctagatgtt

SEQ ID NO: 237292 - DNA, 25 bp, SARS Virus
aagcaaatctctagtctagatgttc

SEQ ID NO: 237293 - DNA, 25 bp, SARS Virus
agcaaatctcttatctagatgttct

SEQ ID NO: 237294 - DNA, 25 bp, SARS Virus
gcaaatctcttgactagatgttctc

SEQ ID NO: 237295 - DNA, 25 bp, SARS Virus
caaatctcttgtatagatgttctct

SEQ ID NO: 237296 - DNA, 25 bp, SARS Virus
aaatctcttgtcaagatgttctcta

SEQ ID NO: 237297 - DNA, 25 bp, SARS Virus
aatctcttgtctagatgttctctag

SEQ ID NO: 237298 - DNA, 25 bp, SARS Virus
atctcttgtctaaatgttctctagc

SEQ ID NO: 237299 - DNA, 25 bp, SARS Virus
tctcttgtctagatgttctctagct

SEQ ID NO: 237300 - DNA, 25 bp, SARS Virus
ctcttgtctagaagttctctagctc

SEQ ID NO: 237301 - DNA, 25 bp, SARS Virus
tcttgtctagatattctctagctcc

SEQ ID NO: 237302 - DNA, 25 bp, SARS Virus
cttgtctagatgatctctagctcca

SEQ ID NO: 237303 - DNA, 25 bp, SARS Virus
ttgtctagatgtactctagctccaa

SEQ ID NO: 237304 - DNA, 25 bp, SARS Virus
tgtctagatgttatctagctccaac

SEQ ID NO: 237305 - DNA, 25 bp, SARS Virus
gtctagatgttcactagctccaacc

SEQ ID NO: 237306 - DNA, 25 bp, SARS Virus
tctagatgttctatagctccaacca

SEQ ID NO: 237307 - DNA, 25 bp, SARS Virus
ctagatgttctcaagctccaaccaa

SEQ ID NO: 237308 - DNA, 25 bp, SARS Virus
tagatgttctctagctccaaccaac

SEQ ID NO: 237309 - DNA, 25 bp, SARS Virus
agatgttctctaactccaaccaacc

SEQ ID NO: 237310 - DNA, 25 bp, SARS Virus
gatgttctctagatccaaccaaccg

SEQ ID NO: 237311 - DNA, 25 bp, SARS Virus
atgttctctagcaccaaccaaccga

SEQ ID NO: 237312 - DNA, 25 bp, SARS Virus
tgttctctagctacaaccaaccgaa

SEQ ID NO: 237313 - DNA, 25 bp, SARS Virus
gttctctagctcaaaccaaccgaaa

SEQ ID NO: 237314 - DNA, 25 bp, SARS Virus
ttctctagctccaaccaaccgaaaa

SEQ ID NO: 237315 - DNA, 25 bp, SARS Virus
tctctagctccaaccaaccgaaaag

SEQ ID NO: 237316 - DNA, 25 bp, SARS Virus
ctctagctccaaacaaccgaaaagg

SEQ ID NO: 237317 - DNA, 25 bp, SARS Virus
tctagctccaacaaaccgaaaagga

SEQ ID NO: 237318 - DNA, 25 bp, SARS Virus
ctagctccaaccaaccgaaaaggac

SEQ ID NO: 237319 - DNA, 25 bp, SARS Virus
tagctccaaccaaccgaaaaggacc

SEQ ID NO: 237320 - DNA, 25 bp, SARS Virus
agctccaaccaaacgaaaaggaccc

SEQ ID NO: 237321 - DNA, 25 bp, SARS Virus
gctccaaccaacagaaaaggaccca

SEQ ID NO: 237322 - DNA, 25 bp, SARS Virus
ctccaaccaaccaaaaaggacccat

SEQ ID NO: 237323 - DNA, 25 bp, SARS Virus
tccaaccaaccgaaaaggacccatc

SEQ ID NO: 237324 - DNA, 25 bp, SARS Virus
ccaaccaaccgaaaaggacccatcc

SEQ ID NO: 237325 - DNA, 25 bp, SARS Virus
caaccaaccgaaaaggacccatcca

SEQ ID NO: 237326 - DNA, 25 bp, SARS Virus
aaccaaccgaaaaggacccatccat

SEQ ID NO: 237327 - DNA, 25 bp, SARS Virus
accaaccgaaaaagacccatccatt

SEQ ID NO: 237328 - DNA, 25 bp, SARS Virus
ccaaccgaaaagaacccatccattt

SEQ ID NO: 237329 - DNA, 25 bp, SARS Virus
caaccgaaaaggacccatccatttt

SEQ ID NO: 237330 - DNA, 25 bp, SARS Virus
aaccgaaaaggaaccatccattttt

SEQ ID NO: 237331 - DNA, 25 bp, SARS Virus
accgaaaaggacacatccatttttg

SEQ ID NO: 237332 - DNA, 25 bp, SARS Virus
ccgaaaaggaccaatccatttttgg

SEQ ID NO: 237333 - DNA, 25 bp, SARS Virus
cgaaaaggacccatccatttttgga

SEQ ID NO: 237334 - DNA, 25 bp, SARS Virus
gaaaaggacccaaccatttttggat

SEQ ID NO: 237335 - DNA, 25 bp, SARS Virus
aaaaggacccatacatttttggatt

SEQ ID NO: 237336 - DNA, 25 bp, SARS Virus
aaaggacccatcaatttttggatta

SEQ ID NO: 237337 - DNA, 25 bp, SARS Virus
aaggacccatccatttttggattat

SEQ ID NO: 237338 - DNA, 25 bp, SARS Virus
aggacccatccaattttggattatt

SEQ ID NO: 237339 - DNA, 25 bp, SARS Virus
ggacccatccatatttggattatta

SEQ ID NO: 237340 - DNA, 25 bp, SARS Virus
gacccatccattattggattattaa

SEQ ID NO: 237341 - DNA, 25 bp, SARS Virus
acccatccatttatggattattaaa

SEQ ID NO: 237342 - DNA, 25 bp, SARS Virus
cccatccattttaggattattaaaa

SEQ ID NO: 237343 - DNA, 25 bp, SARS Virus
ccatccatttttagattattaaaaa

SEQ ID NO: 237344 - DNA, 25 bp, SARS Virus
catccatttttgaattattaaaaaa

SEQ ID NO: 237345 - DNA, 25 bp, SARS Virus
atccatttttggattattaaaaaaa

SEQ ID NO: 237346 - DNA, 25 bp, SARS Virus
tccatttttggaatattaaaaaaaa

SEQ ID NO: 237347 - DNA, 25 bp, SARS Virus
ccatttttggataattaaaaaaaaa

SEQ ID NO: 237348 - DNA, 25 bp, SARS Virus
catttttggattattaaaaaaaaaa

SEQ ID NO: 237349 - DNA, 25 bp, SARS Virus
tggttcgagaacatagtttgcaacc

SEQ ID NO: 237350 - DNA, 25 bp, SARS Virus
ggttcgagaacaaagtttgcaacct

SEQ ID NO: 237351 - DNA, 25 bp, SARS Virus
gttcgagaacatagtttgcaacctc

SEQ ID NO: 237352 - DNA, 25 bp, SARS Virus
ttcgagaacataatttgcaacctct

SEQ ID NO: 237353 - DNA, 25 bp, SARS Virus
tcgagaacatagattgcaacctcta

SEQ ID NO: 237354 - DNA, 25 bp, SARS Virus
cgagaacatagtatgcaacctctat

SEQ ID NO: 237355 - DNA, 25 bp, SARS Virus
gagaacatagttagcaacctctatc

SEQ ID NO: 237356 - DNA, 25 bp, SARS Virus
agaacatagtttacaacctctatca

SEQ ID NO: 237357 - DNA, 25 bp, SARS Virus
gaacatagtttgaaacctctatcat

SEQ ID NO: 237358 - DNA, 25 bp, SARS Virus
aacatagtttgcaacctctatcatg

SEQ ID NO: 237359 - DNA, 25 bp, SARS Virus
catgatagaggtagcaaactatgtt

SEQ ID NO: 237360 - DNA, 25 bp, SARS Virus
atgatagaggttacaaactatgttc

SEQ ID NO: 237361 - DNA, 25 bp, SARS Virus
tgatagaggttgaaaactatgttct

SEQ ID NO: 237362 - DNA, 25 bp, SARS Virus
gatagaggttgcaaactatgttctc

SEQ ID NO: 237363 - DNA, 25 bp, SARS Virus
atagaggttgcaaactatgttctcg

SEQ ID NO: 237364 - DNA, 25 bp, SARS Virus
tagaggttgcaaactatgttctcga

SEQ ID NO: 237365 - DNA, 25 bp, SARS Virus
agaggttgcaaaatatgttctcgaa

SEQ ID NO: 237366 - DNA, 25 bp, SARS Virus
gaggttgcaaacaatgttctcgaac

SEQ ID NO: 237367 - DNA, 25 bp, SARS Virus
aggttgcaaactatgttctcgaacc

SEQ ID NO: 237368 - DNA, 25 bp, SARS Virus
ggttgcaaactaagttctcgaacca

SEQ ID NO: 237369 - DNA, 25 bp, SARS Virus
tataaatgttgcatttttcacgacc

SEQ ID NO: 237370 - DNA, 25 bp, SARS Virus
ataaatgttgctattttcacgacca

SEQ ID NO: 237371 - DNA, 25 bp, SARS Virus
taaatgttgcttatttcacgaccaa

SEQ ID NO: 237372 - DNA, 25 bp, SARS Virus
aaatgttgctttattcacgaccaaa

SEQ ID NO: 237373 - DNA, 25 bp, SARS Virus
aatgttgcttttatcacgaccaaaa

SEQ ID NO: 237374 - DNA, 25 bp, SARS Virus
atgttgctttttacacgaccaaaac

SEQ ID NO: 237375 - DNA, 25 bp, SARS Virus
tgttgcttttttaacgaccaaaacg

SEQ ID NO: 237376 - DNA, 25 bp, SARS Virus
gttgcttttttcacgaccaaaacgt

SEQ ID NO: 237377 - DNA, 25 bp, SARS Virus
ttgcttttttcaagaccaaaacgtt

SEQ ID NO: 237378 - DNA, 25 bp, SARS Virus
tgcttttttcacaaccaaaacgttt

SEQ ID NO: 237379 - DNA, 25 bp, SARS Virus
gcttttttcacgaccaaaacgtttc

SEQ ID NO: 237380 - DNA, 25 bp, SARS Virus
gaaacgttttggacgtgaaaaaagc

SEQ ID NO: 237381 - DNA, 25 bp, SARS Virus
aaacgttttggtagtgaaaaaagca

SEQ ID NO: 237382 - DNA, 25 bp, SARS Virus
aacgttttggtcatgaaaaaagcaa

SEQ ID NO: 237383 - DNA, 25 bp, SARS Virus
acgttttggtcgagaaaaaagcaac

SEQ ID NO: 237384 - DNA, 25 bp, SARS Virus
cgttttggtcgtaaaaaaagcaaca

SEQ ID NO: 237385 - DNA, 25 bp, SARS Virus
gttttggtcgtgaaaaaagcaacat

SEQ ID NO: 237386 - DNA, 25 bp, SARS Virus
ttttggtcgtgaaaaaagcaacatt

SEQ ID NO: 237387 - DNA, 25 bp, SARS Virus
tttggtcgtgaaaaaagcaacattt

SEQ ID NO: 237388 - DNA, 25 bp, SARS Virus
ttggtcgtgaaaaaagcaacattta

SEQ ID NO: 237389 - DNA, 25 bp, SARS Virus
tggtcgtgaaaaaagcaacatttat

SEQ ID NO: 237390 - DNA, 25 bp, SARS Virus
ggtcgtgaaaaaagcaacatttata

SEQ ID NO: 237391 - DNA, 25 bp, SARS Virus
cgaatgttttatatcctcgagaaga

SEQ ID NO: 237392 - DNA, 25 bp, SARS Virus
gaatgttttatcacctcgagaagat

SEQ ID NO: 237393 - DNA, 25 bp, SARS Virus
aatgttttatctactcgagaagata

SEQ ID NO: 237394 - DNA, 25 bp, SARS Virus
atgttttatctcatcgagaagataa

SEQ ID NO: 237395 - DNA, 25 bp, SARS Virus
tgttttatctccacgagaagataag

SEQ ID NO: 237396 - DNA, 25 bp, SARS Virus
gttttatctcctagagaagataaga

SEQ ID NO: 237397 - DNA, 25 bp, SARS Virus
ttttatctcctcaagaagataagaa

SEQ ID NO: 237398 - DNA, 25 bp, SARS Virus
tttatctcctcgagaagataagaat

SEQ ID NO: 237399 - DNA, 25 bp, SARS Virus
ttatctcctcgaaaagataagaata

SEQ ID NO: 237400 - DNA, 25 bp, SARS Virus
tatctcctcgagaagataagaatac

SEQ ID NO: 237401 - DNA, 25 bp, SARS Virus
gtattcttatctactcgaggagata

SEQ ID NO: 237402 - DNA, 25 bp, SARS Virus
tattcttatcttatcgaggagataa

SEQ ID NO: 237403 - DNA, 25 bp, SARS Virus
attcttatcttcacgaggagataaa

SEQ ID NO: 237404 - DNA, 25 bp, SARS Virus
ttcttatcttctagaggagataaaa

SEQ ID NO: 237405 - DNA, 25 bp, SARS Virus
tcttatcttctcaaggagataaaac

SEQ ID NO: 237406 - DNA, 25 bp, SARS Virus
cttatcttctcgaggagataaaaca

SEQ ID NO: 237407 - DNA, 25 bp, SARS Virus
ttatcttctcgaagagataaaacat

SEQ ID NO: 237408 - DNA, 25 bp, SARS Virus
tatcttctcgagaagataaaacatt

SEQ ID NO: 237409 - DNA, 25 bp, SARS Virus
atcttctcgaggagataaaacattc

SEQ ID NO: 237410 - DNA, 25 bp, SARS Virus
tcttctcgaggaaataaaacattcg

SEQ ID NO: 237411 - DNA, 25 bp, SARS Virus
atctgtaaagtgaaacgagaaaacc

SEQ ID NO: 237412 - DNA, 25 bp, SARS Virus
tctgtaaagtggaacgagaaaaccc

SEQ ID NO: 237413 - DNA, 25 bp, SARS Virus
ctgtaaagtggaacgagaaaacccc

SEQ ID NO: 237414 - DNA, 25 bp, SARS Virus
tgtaaagtggaaagagaaaaccccc

SEQ ID NO: 237415 - DNA, 25 bp, SARS Virus
gtaaagtggaacaagaaaaccccca

SEQ ID NO: 237416 - DNA, 25 bp, SARS Virus
taaagtggaacgagaaaacccccac

SEQ ID NO: 237417 - DNA, 25 bp, SARS Virus
aaagtggaacgaaaaaacccccaca

SEQ ID NO: 237418 - DNA, 25 bp, SARS Virus
aagtggaacgagaaaacccccacat

SEQ ID NO: 237419 - DNA, 25 bp, SARS Virus
agtggaacgagaaaacccccacatt

SEQ ID NO: 237420 - DNA, 25 bp, SARS Virus
gtggaacgagaaaacccccacattc

SEQ ID NO: 237421 - DNA, 25 bp, SARS Virus
gaatgtgggggtattctcgttccac

SEQ ID NO: 237422 - DNA, 25 bp, SARS Virus
aatgtgggggttatctcgttccact

SEQ ID NO: 237423 - DNA, 25 bp, SARS Virus
atgtgggggtttactcgttccactt

SEQ ID NO: 237424 - DNA, 25 bp, SARS Virus
tgtgggggttttatcgttccacttt

SEQ ID NO: 237425 - DNA, 25 bp, SARS Virus
gtgggggttttcacgttccacttta

SEQ ID NO: 237426 - DNA, 25 bp, SARS Virus
tgggggttttctagttccactttac

SEQ ID NO: 237427 - DNA, 25 bp, SARS Virus
gggggttttctcattccactttaca

SEQ ID NO: 237428 - DNA, 25 bp, SARS Virus
ggggttttctcgatccactttacag

SEQ ID NO: 237429 - DNA, 25 bp, SARS Virus
gggttttctcgtaccactttacaga

SEQ ID NO: 237430 - DNA, 25 bp, SARS Virus
ggttttctcgttacactttacagat

SEQ ID NO: 237431 - DNA, 25 bp, SARS Virus
ctctaaaaaatgagaacctagttaa

SEQ ID NO: 237432 - DNA, 25 bp, SARS Virus
tctaaaaaatgaaaacctagttaat

SEQ ID NO: 237433 - DNA, 25 bp, SARS Virus
ctaaaaaatgagaacctagttaatg

SEQ ID NO: 237434 - DNA, 25 bp, SARS Virus
taaaaaatgagaacctagttaatga

SEQ ID NO: 237435 - DNA, 25 bp, SARS Virus
aaaaaatgagaaactagttaatgac

SEQ ID NO: 237436 - DNA, 25 bp, SARS Virus
aaaaatgagaacatagttaatgacg

SEQ ID NO: 237437 - DNA, 25 bp, SARS Virus
aaaatgagaaccaagttaatgacgt

SEQ ID NO: 237438 - DNA, 25 bp, SARS Virus
aaatgagaacctagttaatgacgtg

SEQ ID NO: 237439 - DNA, 25 bp, SARS Virus
aatgagaacctaattaatgacgtgt

SEQ ID NO: 237440 - DNA, 25 bp, SARS Virus
acacgtcattaaataggttctcatt

SEQ ID NO: 237441 - DNA, 25 bp, SARS Virus
cacgtcattaacaaggttctcattt

SEQ ID NO: 237442 - DNA, 25 bp, SARS Virus
acgtcattaactaggttctcatttt

SEQ ID NO: 237443 - DNA, 25 bp, SARS Virus
cgtcattaactaagttctcattttt

SEQ ID NO: 237444 - DNA, 25 bp, SARS Virus
gtcattaactagattctcatttttt

SEQ ID NO: 237445 - DNA, 25 bp, SARS Virus
tcattaactaggatctcatttttta

SEQ ID NO: 237446 - DNA, 25 bp, SARS Virus
cattaactaggtactcattttttag

SEQ ID NO: 237447 - DNA, 25 bp, SARS Virus
attaactaggttatcattttttaga

SEQ ID NO: 237448 - DNA, 25 bp, SARS Virus
ttaactaggttcacattttttagag

SEQ ID NO: 237449 - DNA, 25 bp, SARS Virus
aaagaacagttgctgtcattttaaa

SEQ ID NO: 237450 - DNA, 25 bp, SARS Virus
aagaacagttgccgtcattttaaat

SEQ ID NO: 237451 - DNA, 25 bp, SARS Virus
agaacagttgctctcattttaaata

SEQ ID NO: 237452 - DNA, 25 bp, SARS Virus
gaacagttgctgccattttaaataa

SEQ ID NO: 237453 - DNA, 25 bp, SARS Virus
aacagttgctgtcattttaaataat

SEQ ID NO: 237454 - DNA, 25 bp, SARS Virus
acagttgctgtccttttaaataata

SEQ ID NO: 237455 - DNA, 25 bp, SARS Virus
cagttgctgtcactttaaataataa

SEQ ID NO: 237456 - DNA, 25 bp, SARS Virus
agttgctgtcatcttaaataataac

SEQ ID NO: 237457 - DNA, 25 bp, SARS Virus
gttgctgtcattctaaataataaca

SEQ ID NO: 237458 - DNA, 25 bp, SARS Virus
ttgctgtcatttcaaataataacaa

SEQ ID NO: 237459 - DNA, 25 bp, SARS Virus
tgctgtcattttcaataataacaaa

SEQ ID NO: 237460 - DNA, 25 bp, SARS Virus
gctgtcattttacataataacaaat

SEQ ID NO: 237461 - DNA, 25 bp, SARS Virus
ctgtcattttaactaataacaaata

SEQ ID NO: 237462 - DNA, 25 bp, SARS Virus
tgtcattttaaacaataacaaatat

SEQ ID NO: 237463 - DNA, 25 bp, SARS Virus
gtcattttaaatcataacaaatatg

SEQ ID NO: 237464 - DNA, 25 bp, SARS Virus
tcattttaaatactaacaaatatga

SEQ ID NO: 237465 - DNA, 25 bp, SARS Virus
cattttaaataacaacaaatatgac

SEQ ID NO: 237466 - DNA, 25 bp, SARS Virus
attttaaataatcacaaatatgacg

SEQ ID NO: 237467 - DNA, 25 bp, SARS Virus
ttttaaataataccaaatatgacgc

SEQ ID NO: 237468 - DNA, 25 bp, SARS Virus
tttaaataataacaaatatgacgca

SEQ ID NO: 237469 - DNA, 25 bp, SARS Virus
ttaaataataaccaatatgacgcat

SEQ ID NO: 237470 - DNA, 25 bp, SARS Virus
taaataataacacatatgacgcatc

SEQ ID NO: 237471 - DNA, 25 bp, SARS Virus
aaataataacaactatgacgcatcc

SEQ ID NO: 237472 - DNA, 25 bp, SARS Virus
aataataacaaacatgacgcatcca

SEQ ID NO: 237473 - DNA, 25 bp, SARS Virus
ataataacaaatctgacgcatccac

SEQ ID NO: 237474 - DNA, 25 bp, SARS Virus
taataacaaatacgacgcatccacg

SEQ ID NO: 237475 - DNA, 25 bp, SARS Virus
aataacaaatatcacgcatccacgt

SEQ ID NO: 237476 - DNA, 25 bp, SARS Virus
ataacaaatatgccgcatccacgtg

SEQ ID NO: 237477 - DNA, 25 bp, SARS Virus
taacaaatatgacgcatccacgtga

SEQ ID NO: 237478 - DNA, 25 bp, SARS Virus
aacaaatatgacccatccacgtgat

SEQ ID NO: 237479 - DNA, 25 bp, SARS Virus
acaaatatgacgcatccacgtgatc

SEQ ID NO: 237480 - DNA, 25 bp, SARS Virus
caaatatgacgcctccacgtgatcc

SEQ ID NO: 237481 - DNA, 25 bp, SARS Virus
aaatatgacgcacccacgtgatccg

SEQ ID NO: 237482 - DNA, 25 bp, SARS Virus
aatatgacgcatccacgtgatccgt

SEQ ID NO: 237483 - DNA, 25 bp, SARS Virus
atatgacgcatccacgtgatccgta

SEQ ID NO: 237484 - DNA, 25 bp, SARS Virus
tatgacgcatccccgtgatccgtac

SEQ ID NO: 237485 - DNA, 25 bp, SARS Virus
atgacgcatccacgtgatccgtacg

SEQ ID NO: 237486 - DNA, 25 bp, SARS Virus
tgacgcatccacctgatccgtacgt

SEQ ID NO: 237487 - DNA, 25 bp, SARS Virus
gacgcatccacgcgatccgtacgtc

SEQ ID NO: 237488 - DNA, 25 bp, SARS Virus
acgcatccacgtcatccgtacgtcg

SEQ ID NO: 237489 - DNA, 25 bp, SARS Virus
cgcatccacgtgctccgtacgtcgg

SEQ ID NO: 237490 - DNA, 25 bp, SARS Virus
gcatccacgtgacccgtacgtcggc

SEQ ID NO: 237491 - DNA, 25 bp, SARS Virus
catccacgtgatccgtacgtcggct

SEQ ID NO: 237492 - DNA, 25 bp, SARS Virus
atccacgtgatccgtacgtcggctc

SEQ ID NO: 237493 - DNA, 25 bp, SARS Virus
tccacgtgatccctacgtcggctcg

SEQ ID NO: 237494 - DNA, 25 bp, SARS Virus
ccacgtgatccgcacgtcggctcgc

SEQ ID NO: 237495 - DNA, 25 bp, SARS Virus
cacgtgatccgtccgtcggctcgct

SEQ ID NO: 237496 - DNA, 25 bp, SARS Virus
acgtgatccgtacgtcggctcgctg

SEQ ID NO: 237497 - DNA, 25 bp, SARS Virus
cgtgatccgtacctcggctcgctgt

SEQ ID NO: 237498 - DNA, 25 bp, SARS Virus
gtgatccgtacgccggctcgctgtc

SEQ ID NO: 237499 - DNA, 25 bp, SARS Virus
tgatccgtacgtcggctcgctgtcg

SEQ ID NO: 237500 - DNA, 25 bp, SARS Virus
gatccgtacgtccgctcgctgtcga

SEQ ID NO: 237501 - DNA, 25 bp, SARS Virus
atccgtacgtcgcctcgctgtcgat

SEQ ID NO: 237502 - DNA, 25 bp, SARS Virus
tccgtacgtcggctcgctgtcgatg

SEQ ID NO: 237503 - DNA, 25 bp, SARS Virus
ccgtacgtcggcccgctgtcgatgt

SEQ ID NO: 237504 - DNA, 25 bp, SARS Virus
cgtacgtcggctcgctgtcgatgtg

SEQ ID NO: 237505 - DNA, 25 bp, SARS Virus
gtacgtcggctccctgtcgatgtgt

SEQ ID NO: 237506 - DNA, 25 bp, SARS Virus
tacgtcggctcgctgtcgatgtgtc

SEQ ID NO: 237507 - DNA, 25 bp, SARS Virus
acgtcggctcgccgtcgatgtgtct

SEQ ID NO: 237508 - DNA, 25 bp, SARS Virus
cgtcggctcgctctcgatgtgtcta

SEQ ID NO: 237509 - DNA, 25 bp, SARS Virus
gtcggctcgctgccgatgtgtctaa

SEQ ID NO: 237510 - DNA, 25 bp, SARS Virus
tcggctcgctgtcgatgtgtctaaa

SEQ ID NO: 237511 - DNA, 25 bp, SARS Virus
cggctcgctgtccatgtgtctaaaa

SEQ ID NO: 237512 - DNA, 25 bp, SARS Virus
ggctcgctgtcgctgtgtctaaaat

SEQ ID NO: 237513 - DNA, 25 bp, SARS Virus
gctcgctgtcgacgtgtctaaaatt

SEQ ID NO: 237514 - DNA, 25 bp, SARS Virus
ctcgctgtcgatctgtctaaaattt

SEQ ID NO: 237515 - DNA, 25 bp, SARS Virus
tcgctgtcgatgcgtctaaaatttc

SEQ ID NO: 237516 - DNA, 25 bp, SARS Virus
cgctgtcgatgtctctaaaatttca

SEQ ID NO: 237517 - DNA, 25 bp, SARS Virus
gctgtcgatgtgcctaaaatttcaa

SEQ ID NO: 237518 - DNA, 25 bp, SARS Virus
ctgtcgatgtgtctaaaatttcaag

SEQ ID NO: 237519 - DNA, 25 bp, SARS Virus
tgtcgatgtgtccaaaatttcaagc

SEQ ID NO: 237520 - DNA, 25 bp, SARS Virus
gtcgatgtgtctcaaatttcaagca

SEQ ID NO: 237521 - DNA, 25 bp, SARS Virus
tcgatgtgtctacaatttcaagcaa

SEQ ID NO: 237522 - DNA, 25 bp, SARS Virus
cgatgtgtctaacatttcaagcaaa

SEQ ID NO: 237523 - DNA, 25 bp, SARS Virus
gatgtgtctaaactttcaagcaaat

SEQ ID NO: 237524 - DNA, 25 bp, SARS Virus
atgtgtctaaaacttcaagcaaatc

SEQ ID NO: 237525 - DNA, 25 bp, SARS Virus
tgtgtctaaaatctcaagcaaatct

SEQ ID NO: 237526 - DNA, 25 bp, SARS Virus
gtgtctaaaattccaagcaaatctc

SEQ ID NO: 237527 - DNA, 25 bp, SARS Virus
tgtctaaaatttcaagcaaatctct

SEQ ID NO: 237528 - DNA, 25 bp, SARS Virus
gtctaaaatttccagcaaatctctt

SEQ ID NO: 237529 - DNA, 25 bp, SARS Virus
tctaaaatttcacgcaaatctcttg

SEQ ID NO: 237530 - DNA, 25 bp, SARS Virus
ctaaaatttcaaccaaatctcttgt

SEQ ID NO: 237531 - DNA, 25 bp, SARS Virus
taaaatttcaagcaaatctcttgtc

SEQ ID NO: 237532 - DNA, 25 bp, SARS Virus
aaaatttcaagccaatctcttgtct

SEQ ID NO: 237533 - DNA, 25 bp, SARS Virus
aaatttcaagcacatctcttgtcta

SEQ ID NO: 237534 - DNA, 25 bp, SARS Virus
aatttcaagcaactctcttgtctag

SEQ ID NO: 237535 - DNA, 25 bp, SARS Virus
atttcaagcaaacctcttgtctaga

SEQ ID NO: 237536 - DNA, 25 bp, SARS Virus
tttcaagcaaatctcttgtctagat

SEQ ID NO: 237537 - DNA, 25 bp, SARS Virus
ttcaagcaaatcccttgtctagatg

SEQ ID NO: 237538 - DNA, 25 bp, SARS Virus
tcaagcaaatctcttgtctagatgt

SEQ ID NO: 237539 - DNA, 25 bp, SARS Virus
caagcaaatctcctgtctagatgtt

SEQ ID NO: 237540 - DNA, 25 bp, SARS Virus
aagcaaatctctcgtctagatgttc

SEQ ID NO: 237541 - DNA, 25 bp, SARS Virus
agcaaatctcttctctagatgttct

SEQ ID NO: 237542 - DNA, 25 bp, SARS Virus
gcaaatctcttgcctagatgttctc

SEQ ID NO: 237543 - DNA, 25 bp, SARS Virus
caaatctcttgtctagatgttctct

SEQ ID NO: 237544 - DNA, 25 bp, SARS Virus
aaatctcttgtccagatgttctcta

SEQ ID NO: 237545 - DNA, 25 bp, SARS Virus
aatctcttgtctcgatgttctctag

SEQ ID NO: 237546 - DNA, 25 bp, SARS Virus
atctcttgtctacatgttctctagc

SEQ ID NO: 237547 - DNA, 25 bp, SARS Virus
tctcttgtctagctgttctctagct

SEQ ID NO: 237548 - DNA, 25 bp, SARS Virus
ctcttgtctagacgttctctagctc

SEQ ID NO: 237549 - DNA, 25 bp, SARS Virus
tcttgtctagatcttctctagctcc

SEQ ID NO: 237550 - DNA, 25 bp, SARS Virus
cttgtctagatgctctctagctcca

SEQ ID NO: 237551 - DNA, 25 bp, SARS Virus
ttgtctagatgtcctctagctccaa

SEQ ID NO: 237552 - DNA, 25 bp, SARS Virus
tgtctagatgttctctagctccaac

SEQ ID NO: 237553 - DNA, 25 bp, SARS Virus
gtctagatgttccctagctccaacc

SEQ ID NO: 237554 - DNA, 25 bp, SARS Virus
tctagatgttctctagctccaacca

SEQ ID NO: 237555 - DNA, 25 bp, SARS Virus
ctagatgttctccagctccaaccaa

SEQ ID NO: 237556 - DNA, 25 bp, SARS Virus
tagatgttctctcgctccaaccaac

SEQ ID NO: 237557 - DNA, 25 bp, SARS Virus
agatgttctctacctccaaccaacc

SEQ ID NO: 237558 - DNA, 25 bp, SARS Virus
gatgttctctagctccaaccaaccg

SEQ ID NO: 237559 - DNA, 25 bp, SARS Virus
atgttctctagccccaaccaaccga

SEQ ID NO: 237560 - DNA, 25 bp, SARS Virus
tgttctctagctccaaccaaccgaa

SEQ ID NO: 237561 - DNA, 25 bp, SARS Virus
gttctctagctccaaccaaccgaaa

SEQ ID NO: 237562 - DNA, 25 bp, SARS Virus
ttctctagctcccaccaaccgaaaa

SEQ ID NO: 237563 - DNA, 25 bp, SARS Virus
tctctagctccacccaaccgaaaag

SEQ ID NO: 237564 - DNA, 25 bp, SARS Virus
ctctagctccaaccaaccgaaaagg

SEQ ID NO: 237565 - DNA, 25 bp, SARS Virus
tctagctccaaccaaccgaaaagga

SEQ ID NO: 237566 - DNA, 25 bp, SARS Virus
ctagctccaacccaccgaaaaggac

SEQ ID NO: 237567 - DNA, 25 bp, SARS Virus
tagctccaaccacccgaaaaggacc

SEQ ID NO: 237568 - DNA, 25 bp, SARS Virus
agctccaaccaaccgaaaaggaccc

SEQ ID NO: 237569 - DNA, 25 bp, SARS Virus
gctccaaccaaccgaaaaggaccca

SEQ ID NO: 237570 - DNA, 25 bp, SARS Virus
ctccaaccaacccaaaaggacccat

SEQ ID NO: 237571 - DNA, 25 bp, SARS Virus
tccaaccaaccgcaaaggacccatc

SEQ ID NO: 237572 - DNA, 25 bp, SARS Virus
ccaaccaaccgacaaggacccatcc

SEQ ID NO: 237573 - DNA, 25 bp, SARS Virus
caaccaaccgaacaggacccatcca

SEQ ID NO: 237574 - DNA, 25 bp, SARS Virus
aaccaaccgaaacggacccatccat

SEQ ID NO: 237575 - DNA, 25 bp, SARS Virus
accaaccgaaaacgacccatccatt

SEQ ID NO: 237576 - DNA, 25 bp, SARS Virus
ccaaccgaaaagcacccatccattt

SEQ ID NO: 237577 - DNA, 25 bp, SARS Virus
caaccgaaaaggccccatccatttt

SEQ ID NO: 237578 - DNA, 25 bp, SARS Virus
aaccgaaaaggacccatccattttt

SEQ ID NO: 237579 - DNA, 25 bp, SARS Virus
accgaaaaggacccatccatttttg

SEQ ID NO: 237580 - DNA, 25 bp, SARS Virus
ccgaaaaggacccatccatttttgg

SEQ ID NO: 237581 - DNA, 25 bp, SARS Virus
cgaaaaggacccctccatttttgga

SEQ ID NO: 237582 - DNA, 25 bp, SARS Virus
gaaaaggacccacccatttttggat

SEQ ID NO: 237583 - DNA, 25 bp, SARS Virus
aaaaggacccatccatttttggatt

SEQ ID NO: 237584 - DNA, 25 bp, SARS Virus
aaaggacccatccatttttggatta

SEQ ID NO: 237585 - DNA, 25 bp, SARS Virus
aaggacccatccctttttggattat

SEQ ID NO: 237586 - DNA, 25 bp, SARS Virus
aggacccatccacttttggattatt

SEQ ID NO: 237587 - DNA, 25 bp, SARS Virus
ggacccatccatctttggattatta

SEQ ID NO: 237588 - DNA, 25 bp, SARS Virus
gacccatccattcttggattattaa

SEQ ID NO: 237589 - DNA, 25 bp, SARS Virus
acccatccatttctggattattaaa

SEQ ID NO: 237590 - DNA, 25 bp, SARS Virus
cccatccattttcggattattaaaa

SEQ ID NO: 237591 - DNA, 25 bp, SARS Virus
ccatccatttttcgattattaaaaa

SEQ ID NO: 237592 - DNA, 25 bp, SARS Virus
catccatttttgcattattaaaaaa

SEQ ID NO: 237593 - DNA, 25 bp, SARS Virus
atccatttttggcttattaaaaaaa

SEQ ID NO: 237594 - DNA, 25 bp, SARS Virus
tccatttttggactattaaaaaaaa

SEQ ID NO: 237595 - DNA, 25 bp, SARS Virus
ccatttttggatcattaaaaaaaaa

SEQ ID NO: 237596 - DNA, 25 bp, SARS Virus
catttttggattcttaaaaaaaaaa

SEQ ID NO: 237597 - DNA, 25 bp, SARS Virus
tggttcgagaacctagtttgcaacc

SEQ ID NO: 237598 - DNA, 25 bp, SARS Virus
ggttcgagaacacagtttgcaacct

SEQ ID NO: 237599 - DNA, 25 bp, SARS Virus
gttcgagaacatcgtttgcaacctc

SEQ ID NO: 237600 - DNA, 25 bp, SARS Virus
ttcgagaacatactttgcaacctct

SEQ ID NO: 237601 - DNA, 25 bp, SARS Virus
tcgagaacatagcttgcaacctcta

SEQ ID NO: 237602 - DNA, 25 bp, SARS Virus
cgagaacatagtctgcaacctctat

SEQ ID NO: 237603 - DNA, 25 bp, SARS Virus
gagaacatagttcgcaacctctatc

SEQ ID NO: 237604 - DNA, 25 bp, SARS Virus
agaacatagtttccaacctctatca

SEQ ID NO: 237605 - DNA, 25 bp, SARS Virus
gaacatagtttgcaacctctatcat

SEQ ID NO: 237606 - DNA, 25 bp, SARS Virus
aacatagtttgccacctctatcatg

SEQ ID NO: 237607 - DNA, 25 bp, SARS Virus
catgatagaggtcgcaaactatgtt

SEQ ID NO: 237608 - DNA, 25 bp, SARS Virus
atgatagaggttccaaactatgttc

SEQ ID NO: 237609 - DNA, 25 bp, SARS Virus
tgatagaggttgcaaactatgttct

SEQ ID NO: 237610 - DNA, 25 bp, SARS Virus
gatagaggttgccaactatgttctc

SEQ ID NO: 237611 - DNA, 25 bp, SARS Virus
atagaggttgcacactatgttctcg

SEQ ID NO: 237612 - DNA, 25 bp, SARS Virus
tagaggttgcaacctatgttctcga

SEQ ID NO: 237613 - DNA, 25 bp, SARS Virus
agaggttgcaaactatgttctcgaa

SEQ ID NO: 237614 - DNA, 25 bp, SARS Virus
gaggttgcaaaccatgttctcgaac

SEQ ID NO: 237615 - DNA, 25 bp, SARS Virus
aggttgcaaactctgttctcgaacc

SEQ ID NO: 237616 - DNA, 25 bp, SARS Virus
ggttgcaaactacgttctcgaacca

SEQ ID NO: 237617 - DNA, 25 bp, SARS Virus
tataaatgttgcctttttcacgacc

SEQ ID NO: 237618 - DNA, 25 bp, SARS Virus
ataaatgttgctcttttcacgacca

SEQ ID NO: 237619 - DNA, 25 bp, SARS Virus
taaatgttgcttctttcacgaccaa

SEQ ID NO: 237620 - DNA, 25 bp, SARS Virus
aaatgttgctttcttcacgaccaaa

SEQ ID NO: 237621 - DNA, 25 bp, SARS Virus
aatgttgcttttctcacgaccaaaa

SEQ ID NO: 237622 - DNA, 25 bp, SARS Virus
atgttgctttttccacgaccaaaac

SEQ ID NO: 237623 - DNA, 25 bp, SARS Virus
tgttgcttttttcacgaccaaaacg

SEQ ID NO: 237624 - DNA, 25 bp, SARS Virus
gttgcttttttcccgaccaaaacgt

SEQ ID NO: 237625 - DNA, 25 bp, SARS Virus
ttgcttttttcacgaccaaaacgtt

SEQ ID NO: 237626 - DNA, 25 bp, SARS Virus
tgcttttttcaccaccaaaacgttt

SEQ ID NO: 237627 - DNA, 25 bp, SARS Virus
gcttttttcacgcccaaaacgtttc

SEQ ID NO: 237628 - DNA, 25 bp, SARS Virus
gaaacgttttggccgtgaaaaaagc

SEQ ID NO: 237629 - DNA, 25 bp, SARS Virus
aaacgttttggtcgtgaaaaaagca

SEQ ID NO: 237630 - DNA, 25 bp, SARS Virus
aacgttttggtcctgaaaaaagcaa

SEQ ID NO: 237631 - DNA, 25 bp, SARS Virus
acgttttggtcgcgaaaaaagcaac

SEQ ID NO: 237632 - DNA, 25 bp, SARS Virus
cgttttggtcgtcaaaaaagcaaca

SEQ ID NO: 237633 - DNA, 25 bp, SARS Virus
gttttggtcgtgcaaaaagcaacat

SEQ ID NO: 237634 - DNA, 25 bp, SARS Virus
ttttggtcgtgacaaaagcaacatt

SEQ ID NO: 237635 - DNA, 25 bp, SARS Virus
tttggtcgtgaacaaagcaacattt

SEQ ID NO: 237636 - DNA, 25 bp, SARS Virus
ttggtcgtgaaacaagcaacattta

SEQ ID NO: 237637 - DNA, 25 bp, SARS Virus
tggtcgtgaaaacagcaacatttat

SEQ ID NO: 237638 - DNA, 25 bp, SARS Virus
ggtcgtgaaaaacgcaacatttata

SEQ ID NO: 237639 - DNA, 25 bp, SARS Virus
cgaatgttttatctcctcgagaaga

SEQ ID NO: 237640 - DNA, 25 bp, SARS Virus
gaatgttttatcccctcgagaagat

SEQ ID NO: 237641 - DNA, 25 bp, SARS Virus
aatgttttatctcctcgagaagata

SEQ ID NO: 237642 - DNA, 25 bp, SARS Virus
atgttttatctcctcgagaagataa

SEQ ID NO: 237643 - DNA, 25 bp, SARS Virus
tgttttatctccccgagaagataag

SEQ ID NO: 237644 - DNA, 25 bp, SARS Virus
gttttatctcctcgagaagataaga

SEQ ID NO: 237645 - DNA, 25 bp, SARS Virus
ttttatctcctccagaagataagaa

SEQ ID NO: 237646 - DNA, 25 bp, SARS Virus
tttatctcctcgcgaagataagaat

SEQ ID NO: 237647 - DNA, 25 bp, SARS Virus
ttatctcctcgacaagataagaata

SEQ ID NO: 237648 - DNA, 25 bp, SARS Virus
tatctcctcgagcagataagaatac

SEQ ID NO: 237649 - DNA, 25 bp, SARS Virus
gtattcttatctcctcgaggagata

SEQ ID NO: 237650 - DNA, 25 bp, SARS Virus
tattcttatcttctcgaggagataa

SEQ ID NO: 237651 - DNA, 25 bp, SARS Virus
attcttatcttcccgaggagataaa

SEQ ID NO: 237652 - DNA, 25 bp, SARS Virus
ttcttatcttctcgaggagataaaa

SEQ ID NO: 237653 - DNA, 25 bp, SARS Virus
tcttatcttctccaggagataaaac

SEQ ID NO: 237654 - DNA, 25 bp, SARS Virus
cttatcttctcgcggagataaaaca

SEQ ID NO: 237655 - DNA, 25 bp, SARS Virus
ttatcttctcgacgagataaaacat

SEQ ID NO: 237656 - DNA, 25 bp, SARS Virus
tatcttctcgagcagataaaacatt

SEQ ID NO: 237657 - DNA, 25 bp, SARS Virus
atcttctcgaggcgataaaacattc

SEQ ID NO: 237658 - DNA, 25 bp, SARS Virus
tcttctcgaggacataaaacattcg

SEQ ID NO: 237659 - DNA, 25 bp, SARS Virus
atctgtaaagtgcaacgagaaaacc

SEQ ID NO: 237660 - DNA, 25 bp, SARS Virus
tctgtaaagtggcacgagaaaaccc

SEQ ID NO: 237661 - DNA, 25 bp, SARS Virus
ctgtaaagtggaccgagaaaacccc

SEQ ID NO: 237662 - DNA, 25 bp, SARS Virus
tgtaaagtggaacgagaaaaccccc

SEQ ID NO: 237663 - DNA, 25 bp, SARS Virus
gtaaagtggaaccagaaaaccccca

SEQ ID NO: 237664 - DNA, 25 bp, SARS Virus
taaagtggaacgcgaaaacccccac

SEQ ID NO: 237665 - DNA, 25 bp, SARS Virus
aaagtggaacgacaaaacccccaca

SEQ ID NO: 237666 - DNA, 25 bp, SARS Virus
aagtggaacgagcaaacccccacat

SEQ ID NO: 237667 - DNA, 25 bp, SARS Virus
agtggaacgagacaacccccacatt

SEQ ID NO: 237668 - DNA, 25 bp, SARS Virus
gtggaacgagaacacccccacattc

SEQ ID NO: 237669 - DNA, 25 bp, SARS Virus
gaatgtgggggtcttctcgttccac

SEQ ID NO: 237670 - DNA, 25 bp, SARS Virus
aatgtgggggttctctcgttccact

SEQ ID NO: 237671 - DNA, 25 bp, SARS Virus
atgtgggggtttcctcgttccactt

SEQ ID NO: 237672 - DNA, 25 bp, SARS Virus
tgtgggggttttctcgttccacttt

SEQ ID NO: 237673 - DNA, 25 bp, SARS Virus
gtgggggttttcccgttccacttta

SEQ ID NO: 237674 - DNA, 25 bp, SARS Virus
tgggggttttctcgttccactttac

SEQ ID NO: 237675 - DNA, 25 bp, SARS Virus
gggggttttctccttccactttaca

SEQ ID NO: 237676 - DNA, 25 bp, SARS Virus
ggggttttctcgctccactttacag

SEQ ID NO: 237677 - DNA, 25 bp, SARS Virus
gggttttctcgtcccactttacaga

SEQ ID NO: 237678 - DNA, 25 bp, SARS Virus
ggttttctcgttccactttacagat

SEQ ID NO: 237679 - DNA, 25 bp, SARS Virus
ctctaaaaaatgcgaacctagttaa

SEQ ID NO: 237680 - DNA, 25 bp, SARS Virus
tctaaaaaatgacaacctagttaat

SEQ ID NO: 237681 - DNA, 25 bp, SARS Virus
ctaaaaaatgagcacctagttaatg

SEQ ID NO: 237682 - DNA, 25 bp, SARS Virus
taaaaaatgagaccctagttaatga

SEQ ID NO: 237683 - DNA, 25 bp, SARS Virus
aaaaaatgagaacctagttaatgac

SEQ ID NO: 237684 - DNA, 25 bp, SARS Virus
aaaaatgagaacctagttaatgacg

SEQ ID NO: 237685 - DNA, 25 bp, SARS Virus
aaaatgagaacccagttaatgacgt

SEQ ID NO: 237686 - DNA, 25 bp, SARS Virus
aaatgagaacctcgttaatgacgtg

SEQ ID NO: 237687 - DNA, 25 bp, SARS Virus
aatgagaacctacttaatgacgtgt

SEQ ID NO: 237688 - DNA, 25 bp, SARS Virus
acacgtcattaactaggttctcatt

SEQ ID NO: 237689 - DNA, 25 bp, SARS Virus
cacgtcattaaccaggttctcattt

SEQ ID NO: 237690 - DNA, 25 bp, SARS Virus
acgtcattaactcggttctcatttt

SEQ ID NO: 237691 - DNA, 25 bp, SARS Virus
cgtcattaactacgttctcattttt

SEQ ID NO: 237692 - DNA, 25 bp, SARS Virus
gtcattaactagcttctcatttttt

SEQ ID NO: 237693 - DNA, 25 bp, SARS Virus
tcattaactaggctctcatttttta

SEQ ID NO: 237694 - DNA, 25 bp, SARS Virus
cattaactaggtcctcattttttag

SEQ ID NO: 237695 - DNA, 25 bp, SARS Virus
attaactaggttctcattttttaga

SEQ ID NO: 237696 - DNA, 25 bp, SARS Virus
ttaactaggttcccattttttagag

SEQ ID NO: 237697 - DNA, 25 bp, SARS Virus
aaagaacagttggtgtcattttaaa

SEQ ID NO: 237698 - DNA, 25 bp, SARS Virus
aagaacagttgcggtcattttaaat

SEQ ID NO: 237699 - DNA, 25 bp, SARS Virus
agaacagttgctgtcattttaaata

SEQ ID NO: 237700 - DNA, 25 bp, SARS Virus
gaacagttgctggcattttaaataa

SEQ ID NO: 237701 - DNA, 25 bp, SARS Virus
aacagttgctgtgattttaaataat

SEQ ID NO: 237702 - DNA, 25 bp, SARS Virus
acagttgctgtcgttttaaataata

SEQ ID NO: 237703 - DNA, 25 bp, SARS Virus
cagttgctgtcagtttaaataataa

SEQ ID NO: 237704 - DNA, 25 bp, SARS Virus
agttgctgtcatgttaaataataac

SEQ ID NO: 237705 - DNA, 25 bp, SARS Virus
gttgctgtcattgtaaataataaca

SEQ ID NO: 237706 - DNA, 25 bp, SARS Virus
ttgctgtcatttgaaataataacaa

SEQ ID NO: 237707 - DNA, 25 bp, SARS Virus
tgctgtcattttgaataataacaaa

SEQ ID NO: 237708 - DNA, 25 bp, SARS Virus
gctgtcattttagataataacaaat

SEQ ID NO: 237709 - DNA, 25 bp, SARS Virus
ctgtcattttaagtaataacaaata

SEQ ID NO: 237710 - DNA, 25 bp, SARS Virus
tgtcattttaaagaataacaaatat

SEQ ID NO: 237711 - DNA, 25 bp, SARS Virus
gtcattttaaatgataacaaatatg

SEQ ID NO: 237712 - DNA, 25 bp, SARS Virus
tcattttaaatagtaacaaatatga

SEQ ID NO: 237713 - DNA, 25 bp, SARS Virus
cattttaaataagaacaaatatgac

SEQ ID NO: 237714 - DNA, 25 bp, SARS Virus
attttaaataatgacaaatatgacg

SEQ ID NO: 237715 - DNA, 25 bp, SARS Virus
ttttaaataatagcaaatatgacgc

SEQ ID NO: 237716 - DNA, 25 bp, SARS Virus
tttaaataataagaaatatgacgca

SEQ ID NO: 237717 - DNA, 25 bp, SARS Virus
ttaaataataacgaatatgacgcat

SEQ ID NO: 237718 - DNA, 25 bp, SARS Virus
taaataataacagatatgacgcatc

SEQ ID NO: 237719 - DNA, 25 bp, SARS Virus
aaataataacaagtatgacgcatcc

SEQ ID NO: 237720 - DNA, 25 bp, SARS Virus
aataataacaaagatgacgcatcca

SEQ ID NO: 237721 - DNA, 25 bp, SARS Virus
ataataacaaatgtgacgcatccac

SEQ ID NO: 237722 - DNA, 25 bp, SARS Virus
taataacaaataggacgcatccacg

SEQ ID NO: 237723 - DNA, 25 bp, SARS Virus
aataacaaatatgacgcatccacgt

SEQ ID NO: 237724 - DNA, 25 bp, SARS Virus
ataacaaatatggcgcatccacgtg

SEQ ID NO: 237725 - DNA, 25 bp, SARS Virus
taacaaatatgaggcatccacgtga

SEQ ID NO: 237726 - DNA, 25 bp, SARS Virus
aacaaatatgacgcatccacgtgat

SEQ ID NO: 237727 - DNA, 25 bp, SARS Virus
acaaatatgacggatccacgtgatc

SEQ ID NO: 237728 - DNA, 25 bp, SARS Virus
caaatatgacgcgtccacgtgatcc

SEQ ID NO: 237729 - DNA, 25 bp, SARS Virus
aaatatgacgcagccacgtgatccg

SEQ ID NO: 237730 - DNA, 25 bp, SARS Virus
aatatgacgcatgcacgtgatccgt

SEQ ID NO: 237731 - DNA, 25 bp, SARS Virus
atatgacgcatcgacgtgatccgta

SEQ ID NO: 237732 - DNA, 25 bp, SARS Virus
tatgacgcatccgcgtgatccgtac

SEQ ID NO: 237733 - DNA, 25 bp, SARS Virus
atgacgcatccaggtgatccgtacg

SEQ ID NO: 237734 - DNA, 25 bp, SARS Virus
tgacgcatccacgtgatccgtacgt

SEQ ID NO: 237735 - DNA, 25 bp, SARS Virus
gacgcatccacgggatccgtacgtc

SEQ ID NO: 237736 - DNA, 25 bp, SARS Virus
acgcatccacgtgatccgtacgtcg

SEQ ID NO: 237737 - DNA, 25 bp, SARS Virus
cgcatccacgtggtccgtacgtcgg

SEQ ID NO: 237738 - DNA, 25 bp, SARS Virus
gcatccacgtgagccgtacgtcggc

SEQ ID NO: 237739 - DNA, 25 bp, SARS Virus
catccacgtgatgcgtacgtcggct

SEQ ID NO: 237740 - DNA, 25 bp, SARS Virus
atccacgtgatcggtacgtcggctc

SEQ ID NO: 237741 - DNA, 25 bp, SARS Virus
tccacgtgatccgtacgtcggctcg

SEQ ID NO: 237742 - DNA, 25 bp, SARS Virus
ccacgtgatccggacgtcggctcgc

SEQ ID NO: 237743 - DNA, 25 bp, SARS Virus
cacgtgatccgtgcgtcggctcgct

SEQ ID NO: 237744 - DNA, 25 bp, SARS Virus
acgtgatccgtaggtcggctcgctg

SEQ ID NO: 237745 - DNA, 25 bp, SARS Virus
cgtgatccgtacgtcggctcgctgt

SEQ ID NO: 237746 - DNA, 25 bp, SARS Virus
gtgatccgtacggcggctcgctgtc

SEQ ID NO: 237747 - DNA, 25 bp, SARS Virus
tgatccgtacgtgggctcgctgtcg

SEQ ID NO: 237748 - DNA, 25 bp, SARS Virus
gatccgtacgtcggctcgctgtcga

SEQ ID NO: 237749 - DNA, 25 bp, SARS Virus
atccgtacgtcggctcgctgtcgat

SEQ ID NO: 237750 - DNA, 25 bp, SARS Virus
tccgtacgtcgggtcgctgtcgatg

SEQ ID NO: 237751 - DNA, 25 bp, SARS Virus
ccgtacgtcggcgcgctgtcgatgt

SEQ ID NO: 237752 - DNA, 25 bp, SARS Virus
cgtacgtcggctggctgtcgatgtg

SEQ ID NO: 237753 - DNA, 25 bp, SARS Virus
gtacgtcggctcgctgtcgatgtgt

SEQ ID NO: 237754 - DNA, 25 bp, SARS Virus
tacgtcggctcggtgtcgatgtgtc

SEQ ID NO: 237755 - DNA, 25 bp, SARS Virus
acgtcggctcgcggtcgatgtgtct

SEQ ID NO: 237756 - DNA, 25 bp, SARS Virus
cgtcggctcgctgtcgatgtgtcta

SEQ ID NO: 237757 - DNA, 25 bp, SARS Virus
gtcggctcgctggcgatgtgtctaa

SEQ ID NO: 237758 - DNA, 25 bp, SARS Virus
tcggctcgctgtggatgtgtctaaa

SEQ ID NO: 237759 - DNA, 25 bp, SARS Virus
cggctcgctgtcgatgtgtctaaaa

SEQ ID NO: 237760 - DNA, 25 bp, SARS Virus
ggctcgctgtcggtgtgtctaaaat

SEQ ID NO: 237761 - DNA, 25 bp, SARS Virus
gctcgctgtcgaggtgtctaaaatt

SEQ ID NO: 237762 - DNA, 25 bp, SARS Virus
ctcgctgtcgatgtgtctaaaattt

SEQ ID NO: 237763 - DNA, 25 bp, SARS Virus
tcgctgtcgatgggtctaaaatttc

SEQ ID NO: 237764 - DNA, 25 bp, SARS Virus
cgctgtcgatgtgtctaaaatttca

SEQ ID NO: 237765 - DNA, 25 bp, SARS Virus
gctgtcgatgtggctaaaatttcaa

SEQ ID NO: 237766 - DNA, 25 bp, SARS Virus
ctgtcgatgtgtgtaaaatttcaag

SEQ ID NO: 237767 - DNA, 25 bp, SARS Virus
tgtcgatgtgtcgaaaatttcaagc

SEQ ID NO: 237768 - DNA, 25 bp, SARS Virus
gtcgatgtgtctgaaatttcaagca

SEQ ID NO: 237769 - DNA, 25 bp, SARS Virus
tcgatgtgtctagaatttcaagcaa

SEQ ID NO: 237770 - DNA, 25 bp, SARS Virus
cgatgtgtctaagatttcaagcaaa

SEQ ID NO: 237771 - DNA, 25 bp, SARS Virus
gatgtgtctaaagtttcaagcaaat

SEQ ID NO: 237772 - DNA, 25 bp, SARS Virus
atgtgtctaaaagttcaagcaaatc

SEQ ID NO: 237773 - DNA, 25 bp, SARS Virus
tgtgtctaaaatgtcaagcaaatct

SEQ ID NO: 237774 - DNA, 25 bp, SARS Virus
gtgtctaaaattgcaagcaaatctc

SEQ ID NO: 237775 - DNA, 25 bp, SARS Virus
tgtctaaaatttgaagcaaatctct

SEQ ID NO: 237776 - DNA, 25 bp, SARS Virus
gtctaaaatttcgagcaaatctctt

SEQ ID NO: 237777 - DNA, 25 bp, SARS Virus
tctaaaatttcaggcaaatctcttg

SEQ ID NO: 237778 - DNA, 25 bp, SARS Virus
ctaaaatttcaagcaaatctcttgt

SEQ ID NO: 237779 - DNA, 25 bp, SARS Virus
taaaatttcaaggaaatctcttgtc

SEQ ID NO: 237780 - DNA, 25 bp, SARS Virus
aaaatttcaagcgaatctcttgtct

SEQ ID NO: 237781 - DNA, 25 bp, SARS Virus
aaatttcaagcagatctcttgtcta

SEQ ID NO: 237782 - DNA, 25 bp, SARS Virus
aatttcaagcaagtctcttgtctag

SEQ ID NO: 237783 - DNA, 25 bp, SARS Virus
atttcaagcaaagctcttgtctaga

SEQ ID NO: 237784 - DNA, 25 bp, SARS Virus
tttcaagcaaatgtcttgtctagat

SEQ ID NO: 237785 - DNA, 25 bp, SARS Virus
ttcaagcaaatcgcttgtctagatg

SEQ ID NO: 237786 - DNA, 25 bp, SARS Virus
tcaagcaaatctgttgtctagatgt

SEQ ID NO: 237787 - DNA, 25 bp, SARS Virus
caagcaaatctcgtgtctagatgtt

SEQ ID NO: 237788 - DNA, 25 bp, SARS Virus
aagcaaatctctggtctagatgttc

SEQ ID NO: 237789 - DNA, 25 bp, SARS Virus
agcaaatctcttgtctagatgttct

SEQ ID NO: 237790 - DNA, 25 bp, SARS Virus
gcaaatctcttggctagatgttctc

SEQ ID NO: 237791 - DNA, 25 bp, SARS Virus
caaatctcttgtgtagatgttctct

SEQ ID NO: 237792 - DNA, 25 bp, SARS Virus
aaatctcttgtcgagatgttctcta

SEQ ID NO: 237793 - DNA, 25 bp, SARS Virus
aatctcttgtctggatgttctctag

SEQ ID NO: 237794 - DNA, 25 bp, SARS Virus
atctcttgtctagatgttctctagc

SEQ ID NO: 237795 - DNA, 25 bp, SARS Virus
tctcttgtctaggtgttctctagct

SEQ ID NO: 237796 - DNA, 25 bp, SARS Virus
ctcttgtctagaggttctctagctc

SEQ ID NO: 237797 - DNA, 25 bp, SARS Virus
tcttgtctagatgttctctagctcc

SEQ ID NO: 237798 - DNA, 25 bp, SARS Virus
cttgtctagatggtctctagctcca

SEQ ID NO: 237799 - DNA, 25 bp, SARS Virus
ttgtctagatgtgctctagctccaa

SEQ ID NO: 237800 - DNA, 25 bp, SARS Virus
tgtctagatgttgtctagctccaac

SEQ ID NO: 237801 - DNA, 25 bp, SARS Virus
gtctagatgttcgctagctccaacc

SEQ ID NO: 237802 - DNA, 25 bp, SARS Virus
tctagatgttctgtagctccaacca

SEQ ID NO: 237803 - DNA, 25 bp, SARS Virus
ctagatgttctcgagctccaaccaa

SEQ ID NO: 237804 - DNA, 25 bp, SARS Virus
tagatgttctctggctccaaccaac

SEQ ID NO: 237805 - DNA, 25 bp, SARS Virus
agatgttctctagctccaaccaacc

SEQ ID NO: 237806 - DNA, 25 bp, SARS Virus
gatgttctctaggtccaaccaaccg

SEQ ID NO: 237807 - DNA, 25 bp, SARS Virus
atgttctctagcgccaaccaaccga

SEQ ID NO: 237808 - DNA, 25 bp, SARS Virus
tgttctctagctgcaaccaaccgaa

SEQ ID NO: 237809 - DNA, 25 bp, SARS Virus
gttctctagctcgaaccaaccgaaa

SEQ ID NO: 237810 - DNA, 25 bp, SARS Virus
ttctctagctccgaccaaccgaaaa

SEQ ID NO: 237811 - DNA, 25 bp, SARS Virus
tctctagctccagccaaccgaaaag

SEQ ID NO: 237812 - DNA, 25 bp, SARS Virus
ctctagctccaagcaaccgaaaagg

SEQ ID NO: 237813 - DNA, 25 bp, SARS Virus
tctagctccaacgaaccgaaaagga

SEQ ID NO: 237814 - DNA, 25 bp, SARS Virus
ctagctccaaccgaccgaaaaggac

SEQ ID NO: 237815 - DNA, 25 bp, SARS Virus
tagctccaaccagccgaaaaggacc

SEQ ID NO: 237816 - DNA, 25 bp, SARS Virus
agctccaaccaagcgaaaaggaccc

SEQ ID NO: 237817 - DNA, 25 bp, SARS Virus
gctccaaccaacggaaaaggaccca

SEQ ID NO: 237818 - DNA, 25 bp, SARS Virus
ctccaaccaaccgaaaaggacccat

SEQ ID NO: 237819 - DNA, 25 bp, SARS Virus
tccaaccaaccggaaaggacccatc

SEQ ID NO: 237820 - DNA, 25 bp, SARS Virus
ccaaccaaccgagaaggacccatcc

SEQ ID NO: 237821 - DNA, 25 bp, SARS Virus
caaccaaccgaagaggacccatcca

SEQ ID NO: 237822 - DNA, 25 bp, SARS Virus
aaccaaccgaaagggacccatccat

SEQ ID NO: 237823 - DNA, 25 bp, SARS Virus
accaaccgaaaaggacccatccatt

SEQ ID NO: 237824 - DNA, 25 bp, SARS Virus
ccaaccgaaaaggacccatccattt

SEQ ID NO: 237825 - DNA, 25 bp, SARS Virus
caaccgaaaagggcccatccatttt

SEQ ID NO: 237826 - DNA, 25 bp, SARS Virus
aaccgaaaaggagccatccattttt

SEQ ID NO: 237827 - DNA, 25 bp, SARS Virus
accgaaaaggacgcatccatttttg

SEQ ID NO: 237828 - DNA, 25 bp, SARS Virus
ccgaaaaggaccgatccatttttgg

SEQ ID NO: 237829 - DNA, 25 bp, SARS Virus
cgaaaaggacccgtccatttttgga

SEQ ID NO: 237830 - DNA, 25 bp, SARS Virus
gaaaaggacccagccatttttggat

SEQ ID NO: 237831 - DNA, 25 bp, SARS Virus
aaaaggacccatgcatttttggatt

SEQ ID NO: 237832 - DNA, 25 bp, SARS Virus
aaaggacccatcgatttttggatta

SEQ ID NO: 237833 - DNA, 25 bp, SARS Virus
aaggacccatccgtttttggattat

SEQ ID NO: 237834 - DNA, 25 bp, SARS Virus
aggacccatccagttttggattatt

SEQ ID NO: 237835 - DNA, 25 bp, SARS Virus
ggacccatccatgtttggattatta

SEQ ID NO: 237836 - DNA, 25 bp, SARS Virus
gacccatccattgttggattattaa

SEQ ID NO: 237837 - DNA, 25 bp, SARS Virus
acccatccatttgtggattattaaa

SEQ ID NO: 237838 - DNA, 25 bp, SARS Virus
cccatccattttgggattattaaaa

SEQ ID NO: 237839 - DNA, 25 bp, SARS Virus
ccatccatttttggattattaaaaa

SEQ ID NO: 237840 - DNA, 25 bp, SARS Virus
catccatttttggattattaaaaaa

SEQ ID NO: 237841 - DNA, 25 bp, SARS Virus
atccatttttgggttattaaaaaaa

SEQ ID NO: 237842 - DNA, 25 bp, SARS Virus
tccatttttggagtattaaaaaaaa

SEQ ID NO: 237843 - DNA, 25 bp, SARS Virus
ccatttttggatgattaaaaaaaaa

SEQ ID NO: 237844 - DNA, 25 bp, SARS Virus
catttttggattgttaaaaaaaaaa

SEQ ID NO: 237845 - DNA, 25 bp, SARS Virus
tggttcgagaacgtagtttgcaacc

SEQ ID NO: 237846 - DNA, 25 bp, SARS Virus
ggttcgagaacagagtttgcaacct

SEQ ID NO: 237847 - DNA, 25 bp, SARS Virus
gttcgagaacatggtttgcaacctc

SEQ ID NO: 237848 - DNA, 25 bp, SARS Virus
ttcgagaacatagtttgcaacctct

SEQ ID NO: 237849 - DNA, 25 bp, SARS Virus
tcgagaacataggttgcaacctcta

SEQ ID NO: 237850 - DNA, 25 bp, SARS Virus
cgagaacatagtgtgcaacctctat

SEQ ID NO: 237851 - DNA, 25 bp, SARS Virus
gagaacatagttggcaacctctatc

SEQ ID NO: 237852 - DNA, 25 bp, SARS Virus
agaacatagtttgcaacctctatca

SEQ ID NO: 237853 - DNA, 25 bp, SARS Virus
gaacatagtttggaacctctatcat

SEQ ID NO: 237854 - DNA, 25 bp, SARS Virus
aacatagtttgcgacctctatcatg

SEQ ID NO: 237855 - DNA, 25 bp, SARS Virus
catgatagaggtggcaaactatgtt

SEQ ID NO: 237856 - DNA, 25 bp, SARS Virus
atgatagaggttgcaaactatgttc

SEQ ID NO: 237857 - DNA, 25 bp, SARS Virus
tgatagaggttggaaactatgttct

SEQ ID NO: 237858 - DNA, 25 bp, SARS Virus
gatagaggttgcgaactatgttctc

SEQ ID NO: 237859 - DNA, 25 bp, SARS Virus
atagaggttgcagactatgttctcg

SEQ ID NO: 237860 - DNA, 25 bp, SARS Virus
tagaggttgcaagctatgttctcga

SEQ ID NO: 237861 - DNA, 25 bp, SARS Virus
agaggttgcaaagtatgttctcgaa

SEQ ID NO: 237862 - DNA, 25 bp, SARS Virus
gaggttgcaaacgatgttctcgaac

SEQ ID NO: 237863 - DNA, 25 bp, SARS Virus
aggttgcaaactgtgttctcgaacc

SEQ ID NO: 237864 - DNA, 25 bp, SARS Virus
ggttgcaaactaggttctcgaacca

SEQ ID NO: 237865 - DNA, 25 bp, SARS Virus
tataaatgttgcgtttttcacgacc

SEQ ID NO: 237866 - DNA, 25 bp, SARS Virus
ataaatgttgctgttttcacgacca

SEQ ID NO: 237867 - DNA, 25 bp, SARS Virus
taaatgttgcttgtttcacgaccaa

SEQ ID NO: 237868 - DNA, 25 bp, SARS Virus
aaatgttgctttgttcacgaccaaa

SEQ ID NO: 237869 - DNA, 25 bp, SARS Virus
aatgttgcttttgtcacgaccaaaa

SEQ ID NO: 237870 - DNA, 25 bp, SARS Virus
atgttgctttttgcacgaccaaaac

SEQ ID NO: 237871 - DNA, 25 bp, SARS Virus
tgttgcttttttgacgaccaaaacg

SEQ ID NO: 237872 - DNA, 25 bp, SARS Virus
gttgcttttttcgcgaccaaaacgt

SEQ ID NO: 237873 - DNA, 25 bp, SARS Virus
ttgcttttttcaggaccaaaacgtt

SEQ ID NO: 237874 - DNA, 25 bp, SARS Virus
tgcttttttcacgaccaaaacgttt

SEQ ID NO: 237875 - DNA, 25 bp, SARS Virus
gcttttttcacggccaaaacgtttc

SEQ ID NO: 237876 - DNA, 25 bp, SARS Virus
gaaacgttttgggcgtgaaaaaagc

SEQ ID NO: 237877 - DNA, 25 bp, SARS Virus
aaacgttttggtggtgaaaaaagca

SEQ ID NO: 237878 - DNA, 25 bp, SARS Virus
aacgttttggtcgtgaaaaaagcaa

SEQ ID NO: 237879 - DNA, 25 bp, SARS Virus
acgttttggtcgggaaaaaagcaac

SEQ ID NO: 237880 - DNA, 25 bp, SARS Virus
cgttttggtcgtgaaaaaagcaaca

SEQ ID NO: 237881 - DNA, 25 bp, SARS Virus
gttttggtcgtggaaaaagcaacat

SEQ ID NO: 237882 - DNA, 25 bp, SARS Virus
ttttggtcgtgagaaaagcaacatt

SEQ ID NO: 237883 - DNA, 25 bp, SARS Virus
tttggtcgtgaagaaagcaacattt

SEQ ID NO: 237884 - DNA, 25 bp, SARS Virus
ttggtcgtgaaagaagcaacattta

SEQ ID NO: 237885 - DNA, 25 bp, SARS Virus
tggtcgtgaaaagagcaacatttat

SEQ ID NO: 237886 - DNA, 25 bp, SARS Virus
ggtcgtgaaaaaggcaacatttata

SEQ ID NO: 237887 - DNA, 25 bp, SARS Virus
cgaatgttttatgtcctcgagaaga

SEQ ID NO: 237888 - DNA, 25 bp, SARS Virus
gaatgttttatcgcctcgagaagat

SEQ ID NO: 237889 - DNA, 25 bp, SARS Virus
aatgttttatctgctcgagaagata

SEQ ID NO: 237890 - DNA, 25 bp, SARS Virus
atgttttatctcgtcgagaagataa

SEQ ID NO: 237891 - DNA, 25 bp, SARS Virus
tgttttatctccgcgagaagataag

SEQ ID NO: 237892 - DNA, 25 bp, SARS Virus
gttttatctcctggagaagataaga

SEQ ID NO: 237893 - DNA, 25 bp, SARS Virus
ttttatctcctcgagaagataagaa

SEQ ID NO: 237894 - DNA, 25 bp, SARS Virus
tttatctcctcgggaagataagaat

SEQ ID NO: 237895 - DNA, 25 bp, SARS Virus
ttatctcctcgagaagataagaata

SEQ ID NO: 237896 - DNA, 25 bp, SARS Virus
tatctcctcgaggagataagaatac

SEQ ID NO: 237897 - DNA, 25 bp, SARS Virus
gtattcttatctgctcgaggagata

SEQ ID NO: 237898 - DNA, 25 bp, SARS Virus
tattcttatcttgtcgaggagataa

SEQ ID NO: 237899 - DNA, 25 bp, SARS Virus
attcttatcttcgcgaggagataaa

SEQ ID NO: 237900 - DNA, 25 bp, SARS Virus
ttcttatcttctggaggagataaaa

SEQ ID NO: 237901 - DNA, 25 bp, SARS Virus
tcttatcttctcgaggagataaaac

SEQ ID NO: 237902 - DNA, 25 bp, SARS Virus
cttatcttctcggggagataaaaca

SEQ ID NO: 237903 - DNA, 25 bp, SARS Virus
ttatcttctcgaggagataaaacat

SEQ ID NO: 237904 - DNA, 25 bp, SARS Virus
tatcttctcgaggagataaaacatt

SEQ ID NO: 237905 - DNA, 25 bp, SARS Virus
atcttctcgaggggataaaacattc

SEQ ID NO: 237906 - DNA, 25 bp, SARS Virus
tcttctcgaggagataaaacattcg

SEQ ID NO: 237907 - DNA, 25 bp, SARS Virus
atctgtaaagtggaacgagaaaacc

SEQ ID NO: 237908 - DNA, 25 bp, SARS Virus
tctgtaaagtgggacgagaaaaccc

SEQ ID NO: 237909 - DNA, 25 bp, SARS Virus
ctgtaaagtggagcgagaaaacccc

SEQ ID NO: 237910 - DNA, 25 bp, SARS Virus
tgtaaagtggaaggagaaaaccccc

SEQ ID NO: 237911 - DNA, 25 bp, SARS Virus
gtaaagtggaacgagaaaaccccca

SEQ ID NO: 237912 - DNA, 25 bp, SARS Virus
taaagtggaacgggaaaacccccac

SEQ ID NO: 237913 - DNA, 25 bp, SARS Virus
aaagtggaacgagaaaacccccaca

SEQ ID NO: 237914 - DNA, 25 bp, SARS Virus
aagtggaacgaggaaacccccacat

SEQ ID NO: 237915 - DNA, 25 bp, SARS Virus
agtggaacgagagaacccccacatt

SEQ ID NO: 237916 - DNA, 25 bp, SARS Virus
gtggaacgagaagacccccacattc

SEQ ID NO: 237917 - DNA, 25 bp, SARS Virus
gaatgtgggggtgttctcgttccac

SEQ ID NO: 237918 - DNA, 25 bp, SARS Virus
aatgtgggggttgtctcgttccact

SEQ ID NO: 237919 - DNA, 25 bp, SARS Virus
atgtgggggtttgctcgttccactt

SEQ ID NO: 237920 - DNA, 25 bp, SARS Virus
tgtgggggttttgtcgttccacttt

SEQ ID NO: 237921 - DNA, 25 bp, SARS Virus
gtgggggttttcgcgttccacttta

SEQ ID NO: 237922 - DNA, 25 bp, SARS Virus
tgggggttttctggttccactttac

SEQ ID NO: 237923 - DNA, 25 bp, SARS Virus
gggggttttctcgttccactttaca

SEQ ID NO: 237924 - DNA, 25 bp, SARS Virus
ggggttttctcggtccactttacag

SEQ ID NO: 237925 - DNA, 25 bp, SARS Virus
gggttttctcgtgccactttacaga

SEQ ID NO: 237926 - DNA, 25 bp, SARS Virus
ggttttctcgttgcactttacagat

SEQ ID NO: 237927 - DNA, 25 bp, SARS Virus
ctctaaaaaatgggaacctagttaa

SEQ ID NO: 237928 - DNA, 25 bp, SARS Virus
tctaaaaaatgagaacctagttaat

SEQ ID NO: 237929 - DNA, 25 bp, SARS Virus
ctaaaaaatgaggacctagttaatg

SEQ ID NO: 237930 - DNA, 25 bp, SARS Virus
taaaaaatgagagcctagttaatga

SEQ ID NO: 237931 - DNA, 25 bp, SARS Virus
aaaaaatgagaagctagttaatgac

SEQ ID NO: 237932 - DNA, 25 bp, SARS Virus
aaaaatgagaacgtagttaatgacg

SEQ ID NO: 237933 - DNA, 25 bp, SARS Virus
aaaatgagaaccgagttaatgacgt

SEQ ID NO: 237934 - DNA, 25 bp, SARS Virus
aaatgagaacctggttaatgacgtg

SEQ ID NO: 237935 - DNA, 25 bp, SARS Virus
aatgagaacctagttaatgacgtgt

SEQ ID NO: 237936 - DNA, 25 bp, SARS Virus
acacgtcattaagtaggttctcatt

SEQ ID NO: 237937 - DNA, 25 bp, SARS Virus
cacgtcattaacgaggttctcattt

SEQ ID NO: 237938 - DNA, 25 bp, SARS Virus
acgtcattaactgggttctcatttt

SEQ ID NO: 237939 - DNA, 25 bp, SARS Virus
cgtcattaactaggttctcattttt

SEQ ID NO: 237940 - DNA, 25 bp, SARS Virus
gtcattaactaggttctcatttttt

SEQ ID NO: 237941 - DNA, 25 bp, SARS Virus
tcattaactagggtctcatttttta

SEQ ID NO: 237942 - DNA, 25 bp, SARS Virus
cattaactaggtgctcattttttag

SEQ ID NO: 237943 - DNA, 25 bp, SARS Virus
attaactaggttgtcattttttaga

SEQ ID NO: 237944 - DNA, 25 bp, SARS Virus
ttaactaggttcgcattttttagag

SEQ ID NO: 237945 - DNA, 25 bp, SARS Virus
aaagaacagttgttgtcattttaaa

SEQ ID NO: 237946 - DNA, 25 bp, SARS Virus
aagaacagttgctgtcattttaaat

SEQ ID NO: 237947 - DNA, 25 bp, SARS Virus
agaacagttgctttcattttaaata

SEQ ID NO: 237948 - DNA, 25 bp, SARS Virus
gaacagttgctgtcattttaaataa

SEQ ID NO: 237949 - DNA, 25 bp, SARS Virus
aacagttgctgttattttaaataat

SEQ ID NO: 237950 - DNA, 25 bp, SARS Virus
acagttgctgtctttttaaataata

SEQ ID NO: 237951 - DNA, 25 bp, SARS Virus
cagttgctgtcattttaaataataa

SEQ ID NO: 237952 - DNA, 25 bp, SARS Virus
agttgctgtcattttaaataataac

SEQ ID NO: 237953 - DNA, 25 bp, SARS Virus
gttgctgtcattttaaataataaca

SEQ ID NO: 237954 - DNA, 25 bp, SARS Virus
ttgctgtcattttaaataataacaa

SEQ ID NO: 237955 - DNA, 25 bp, SARS Virus
tgctgtcatttttaataataacaaa

SEQ ID NO: 237956 - DNA, 25 bp, SARS Virus
gctgtcattttatataataacaaat

SEQ ID NO: 237957 - DNA, 25 bp, SARS Virus
ctgtcattttaattaataacaaata

SEQ ID NO: 237958 - DNA, 25 bp, SARS Virus
tgtcattttaaataataacaaatat

SEQ ID NO: 237959 - DNA, 25 bp, SARS Virus
gtcattttaaattataacaaatatg

SEQ ID NO: 237960 - DNA, 25 bp, SARS Virus
tcattttaaatattaacaaatatga

SEQ ID NO: 237961 - DNA, 25 bp, SARS Virus
cattttaaataataacaaatatgac

SEQ ID NO: 237962 - DNA, 25 bp, SARS Virus
attttaaataattacaaatatgacg

SEQ ID NO: 237963 - DNA, 25 bp, SARS Virus
ttttaaataatatcaaatatgacgc

SEQ ID NO: 237964 - DNA, 25 bp, SARS Virus
tttaaataataataaatatgacgca

SEQ ID NO: 237965 - DNA, 25 bp, SARS Virus
ttaaataataactaatatgacgcat

SEQ ID NO: 237966 - DNA, 25 bp, SARS Virus
taaataataacatatatgacgcatc

SEQ ID NO: 237967 - DNA, 25 bp, SARS Virus
aaataataacaattatgacgcatcc

SEQ ID NO: 237968 - DNA, 25 bp, SARS Virus
aataataacaaatatgacgcatcca

SEQ ID NO: 237969 - DNA, 25 bp, SARS Virus
ataataacaaatttgacgcatccac

SEQ ID NO: 237970 - DNA, 25 bp, SARS Virus
taataacaaatatgacgcatccacg

SEQ ID NO: 237971 - DNA, 25 bp, SARS Virus
aataacaaatattacgcatccacgt

SEQ ID NO: 237972 - DNA, 25 bp, SARS Virus
ataacaaatatgtcgcatccacgtg

SEQ ID NO: 237973 - DNA, 25 bp, SARS Virus
taacaaatatgatgcatccacgtga

SEQ ID NO: 237974 - DNA, 25 bp, SARS Virus
aacaaatatgactcatccacgtgat

SEQ ID NO: 237975 - DNA, 25 bp, SARS Virus
acaaatatgacgtatccacgtgatc

SEQ ID NO: 237976 - DNA, 25 bp, SARS Virus
caaatatgacgcttccacgtgatcc

SEQ ID NO: 237977 - DNA, 25 bp, SARS Virus
aaatatgacgcatccacgtgatccg

SEQ ID NO: 237978 - DNA, 25 bp, SARS Virus
aatatgacgcattcacgtgatccgt

SEQ ID NO: 237979 - DNA, 25 bp, SARS Virus
atatgacgcatctacgtgatccgta

SEQ ID NO: 237980 - DNA, 25 bp, SARS Virus
tatgacgcatcctcgtgatccgtac

SEQ ID NO: 237981 - DNA, 25 bp, SARS Virus
atgacgcatccatgtgatccgtacg

SEQ ID NO: 237982 - DNA, 25 bp, SARS Virus
tgacgcatccacttgatccgtacgt

SEQ ID NO: 237983 - DNA, 25 bp, SARS Virus
gacgcatccacgtgatccgtacgtc

SEQ ID NO: 237984 - DNA, 25 bp, SARS Virus
acgcatccacgttatccgtacgtcg

SEQ ID NO: 237985 - DNA, 25 bp, SARS Virus
cgcatccacgtgttccgtacgtcgg

SEQ ID NO: 237986 - DNA, 25 bp, SARS Virus
gcatccacgtgatccgtacgtcggc

SEQ ID NO: 237987 - DNA, 25 bp, SARS Virus
catccacgtgattcgtacgtcggct

SEQ ID NO: 237988 - DNA, 25 bp, SARS Virus
atccacgtgatctgtacgtcggctc

SEQ ID NO: 237989 - DNA, 25 bp, SARS Virus
tccacgtgatccttacgtcggctcg

SEQ ID NO: 237990 - DNA, 25 bp, SARS Virus
ccacgtgatccgtacgtcggctcgc

SEQ ID NO: 237991 - DNA, 25 bp, SARS Virus
cacgtgatccgttcgtcggctcgct

SEQ ID NO: 237992 - DNA, 25 bp, SARS Virus
acgtgatccgtatgtcggctcgctg

SEQ ID NO: 237993 - DNA, 25 bp, SARS Virus
cgtgatccgtacttcggctcgctgt

SEQ ID NO: 237994 - DNA, 25 bp, SARS Virus
gtgatccgtacgtcggctcgctgtc

SEQ ID NO: 237995 - DNA, 25 bp, SARS Virus
tgatccgtacgttggctcgctgtcg

SEQ ID NO: 237996 - DNA, 25 bp, SARS Virus
gatccgtacgtctgctcgctgtcga

SEQ ID NO: 237997 - DNA, 25 bp, SARS Virus
atccgtacgtcgtctcgctgtcgat

SEQ ID NO: 237998 - DNA, 25 bp, SARS Virus
tccgtacgtcggttcgctgtcgatg

SEQ ID NO: 237999 - DNA, 25 bp, SARS Virus
ccgtacgtcggctcgctgtcgatgt

SEQ ID NO: 238000 - DNA, 25 bp, SARS Virus
cgtacgtcggcttgctgtcgatgtg

SEQ ID NO: 238001 - DNA, 25 bp, SARS Virus
gtacgtcggctctctgtcgatgtgt

SEQ ID NO: 238002 - DNA, 25 bp, SARS Virus
tacgtcggctcgttgtcgatgtgtc

SEQ ID NO: 238003 - DNA, 25 bp, SARS Virus
acgtcggctcgctgtcgatgtgtct

SEQ ID NO: 238004 - DNA, 25 bp, SARS Virus
cgtcggctcgctttcgatgtgtcta

SEQ ID NO: 238005 - DNA, 25 bp, SARS Virus
gtcggctcgctgtcgatgtgtctaa

SEQ ID NO: 238006 - DNA, 25 bp, SARS Virus
tcggctcgctgttgatgtgtctaaa

SEQ ID NO: 238007 - DNA, 25 bp, SARS Virus
cggctcgctgtctatgtgtctaaaa

SEQ ID NO: 238008 - DNA, 25 bp, SARS Virus
ggctcgctgtcgttgtgtctaaaat

SEQ ID NO: 238009 - DNA, 25 bp, SARS Virus
gctcgctgtcgatgtgtctaaaatt

SEQ ID NO: 238010 - DNA, 25 bp, SARS Virus
ctcgctgtcgatttgtctaaaattt

SEQ ID NO: 238011 - DNA, 25 bp, SARS Virus
tcgctgtcgatgtgtctaaaatttc

SEQ ID NO: 238012 - DNA, 25 bp, SARS Virus
cgctgtcgatgtttctaaaatttca

SEQ ID NO: 238013 - DNA, 25 bp, SARS Virus
gctgtcgatgtgtctaaaatttcaa

SEQ ID NO: 238014 - DNA, 25 bp, SARS Virus
ctgtcgatgtgtttaaaatttcaag

SEQ ID NO: 238015 - DNA, 25 bp, SARS Virus
tgtcgatgtgtctaaaatttcaagc

SEQ ID NO: 238016 - DNA, 25 bp, SARS Virus
gtcgatgtgtcttaaatttcaagca

SEQ ID NO: 238017 - DNA, 25 bp, SARS Virus
tcgatgtgtctataatttcaagcaa

SEQ ID NO: 238018 - DNA, 25 bp, SARS Virus
cgatgtgtctaatatttcaagcaaa

SEQ ID NO: 238019 - DNA, 25 bp, SARS Virus
gatgtgtctaaattttcaagcaaat

SEQ ID NO: 238020 - DNA, 25 bp, SARS Virus
atgtgtctaaaatttcaagcaaatc

SEQ ID NO: 238021 - DNA, 25 bp, SARS Virus
tgtgtctaaaatttcaagcaaatct

SEQ ID NO: 238022 - DNA, 25 bp, SARS Virus
gtgtctaaaatttcaagcaaatctc

SEQ ID NO: 238023 - DNA, 25 bp, SARS Virus
tgtctaaaattttaagcaaatctct

SEQ ID NO: 238024 - DNA, 25 bp, SARS Virus
gtctaaaatttctagcaaatctctt

SEQ ID NO: 238025 - DNA, 25 bp, SARS Virus
tctaaaatttcatgcaaatctcttg

SEQ ID NO: 238026 - DNA, 25 bp, SARS Virus
ctaaaatttcaatcaaatctcttgt

SEQ ID NO: 238027 - DNA, 25 bp, SARS Virus
taaaatttcaagtaaatctcttgtc

SEQ ID NO: 238028 - DNA, 25 bp, SARS Virus
aaaatttcaagctaatctcttgtct

SEQ ID NO: 238029 - DNA, 25 bp, SARS Virus
aaatttcaagcatatctcttgtcta

SEQ ID NO: 238030 - DNA, 25 bp, SARS Virus
aatttcaagcaattctcttgtctag

SEQ ID NO: 238031 - DNA, 25 bp, SARS Virus
atttcaagcaaatctcttgtctaga

SEQ ID NO: 238032 - DNA, 25 bp, SARS Virus
tttcaagcaaatttcttgtctagat

SEQ ID NO: 238033 - DNA, 25 bp, SARS Virus
ttcaagcaaatctcttgtctagatg

SEQ ID NO: 238034 - DNA, 25 bp, SARS Virus
tcaagcaaatcttttgtctagatgt

SEQ ID NO: 238035 - DNA, 25 bp, SARS Virus
caagcaaatctcttgtctagatgtt

SEQ ID NO: 238036 - DNA, 25 bp, SARS Virus
aagcaaatctcttgtctagatgttc

SEQ ID NO: 238037 - DNA, 25 bp, SARS Virus
agcaaatctcttttctagatgttct

SEQ ID NO: 238038 - DNA, 25 bp, SARS Virus
gcaaatctcttgtctagatgttctc

SEQ ID NO: 238039 - DNA, 25 bp, SARS Virus
caaatctcttgtttagatgttctct

SEQ ID NO: 238040 - DNA, 25 bp, SARS Virus
aaatctcttgtctagatgttctcta

SEQ ID NO: 238041 - DNA, 25 bp, SARS Virus
aatctcttgtcttgatgttctctag

SEQ ID NO: 238042 - DNA, 25 bp, SARS Virus
atctcttgtctatatgttctctagc

SEQ ID NO: 238043 - DNA, 25 bp, SARS Virus
tctcttgtctagttgttctctagct

SEQ ID NO: 238044 - DNA, 25 bp, SARS Virus
ctcttgtctagatgttctctagctc

SEQ ID NO: 238045 - DNA, 25 bp, SARS Virus
tcttgtctagattttctctagctcc

SEQ ID NO: 238046 - DNA, 25 bp, SARS Virus
cttgtctagatgttctctagctcca

SEQ ID NO: 238047 - DNA, 25 bp, SARS Virus
ttgtctagatgttctctagctccaa

SEQ ID NO: 238048 - DNA, 25 bp, SARS Virus
tgtctagatgttttctagctccaac

SEQ ID NO: 238049 - DNA, 25 bp, SARS Virus
gtctagatgttctctagctccaacc

SEQ ID NO: 238050 - DNA, 25 bp, SARS Virus
tctagatgttctttagctccaacca

SEQ ID NO: 238051 - DNA, 25 bp, SARS Virus
ctagatgttctctagctccaaccaa

SEQ ID NO: 238052 - DNA, 25 bp, SARS Virus
tagatgttctcttgctccaaccaac

SEQ ID NO: 238053 - DNA, 25 bp, SARS Virus
agatgttctctatctccaaccaacc

SEQ ID NO: 238054 - DNA, 25 bp, SARS Virus
gatgttctctagttccaaccaaccg

SEQ ID NO: 238055 - DNA, 25 bp, SARS Virus
atgttctctagctccaaccaaccga

SEQ ID NO: 238056 - DNA, 25 bp, SARS Virus
tgttctctagcttcaaccaaccgaa

SEQ ID NO: 238057 - DNA, 25 bp, SARS Virus
gttctctagctctaaccaaccgaaa

SEQ ID NO: 238058 - DNA, 25 bp, SARS Virus
ttctctagctcctaccaaccgaaaa

SEQ ID NO: 238059 - DNA, 25 bp, SARS Virus
tctctagctccatccaaccgaaaag

SEQ ID NO: 238060 - DNA, 25 bp, SARS Virus
ctctagctccaatcaaccgaaaagg

SEQ ID NO: 238061 - DNA, 25 bp, SARS Virus
tctagctccaactaaccgaaaagga

SEQ ID NO: 238062 - DNA, 25 bp, SARS Virus
ctagctccaacctaccgaaaaggac

SEQ ID NO: 238063 - DNA, 25 bp, SARS Virus
tagctccaaccatccgaaaaggacc

SEQ ID NO: 238064 - DNA, 25 bp, SARS Virus
agctccaaccaatcgaaaaggaccc

SEQ ID NO: 238065 - DNA, 25 bp, SARS Virus
gctccaaccaactgaaaaggaccca

SEQ ID NO: 238066 - DNA, 25 bp, SARS Virus
ctccaaccaacctaaaaggacccat

SEQ ID NO: 238067 - DNA, 25 bp, SARS Virus
tccaaccaaccgtaaaggacccatc

SEQ ID NO: 238068 - DNA, 25 bp, SARS Virus
ccaaccaaccgataaggacccatcc

SEQ ID NO: 238069 - DNA, 25 bp, SARS Virus
caaccaaccgaataggacccatcca

SEQ ID NO: 238070 - DNA, 25 bp, SARS Virus
aaccaaccgaaatggacccatccat

SEQ ID NO: 238071 - DNA, 25 bp, SARS Virus
accaaccgaaaatgacccatccatt

SEQ ID NO: 238072 - DNA, 25 bp, SARS Virus
ccaaccgaaaagtacccatccattt

SEQ ID NO: 238073 - DNA, 25 bp, SARS Virus
caaccgaaaaggtcccatccatttt

SEQ ID NO: 238074 - DNA, 25 bp, SARS Virus
aaccgaaaaggatccatccattttt

SEQ ID NO: 238075 - DNA, 25 bp, SARS Virus
accgaaaaggactcatccatttttg

SEQ ID NO: 238076 - DNA, 25 bp, SARS Virus
ccgaaaaggacctatccatttttgg

SEQ ID NO: 238077 - DNA, 25 bp, SARS Virus
cgaaaaggacccttccatttttgga

SEQ ID NO: 238078 - DNA, 25 bp, SARS Virus
gaaaaggacccatccatttttggat

SEQ ID NO: 238079 - DNA, 25 bp, SARS Virus
aaaaggacccattcatttttggatt

SEQ ID NO: 238080 - DNA, 25 bp, SARS Virus
aaaggacccatctatttttggatta

SEQ ID NO: 238081 - DNA, 25 bp, SARS Virus
aaggacccatccttttttggattat

SEQ ID NO: 238082 - DNA, 25 bp, SARS Virus
aggacccatccatttttggattatt

SEQ ID NO: 238083 - DNA, 25 bp, SARS Virus
ggacccatccatttttggattatta

SEQ ID NO: 238084 - DNA, 25 bp, SARS Virus
gacccatccatttttggattattaa

SEQ ID NO: 238085 - DNA, 25 bp, SARS Virus
acccatccatttttggattattaaa

SEQ ID NO: 238086 - DNA, 25 bp, SARS Virus
cccatccatttttggattattaaaa

SEQ ID NO: 238087 - DNA, 25 bp, SARS Virus
ccatccattttttgattattaaaaa

SEQ ID NO: 238088 - DNA, 25 bp, SARS Virus
catccatttttgtattattaaaaaa

SEQ ID NO: 238089 - DNA, 25 bp, SARS Virus
atccatttttggtttattaaaaaaa

SEQ ID NO: 238090 - DNA, 25 bp, SARS Virus
tccatttttggattattaaaaaaaa

SEQ ID NO: 238091 - DNA, 25 bp, SARS Virus
ccatttttggattattaaaaaaaaa

SEQ ID NO: 238092 - DNA, 25 bp, SARS Virus
catttttggatttttaaaaaaaaaa

SEQ ID NO: 238093 - DNA, 25 bp, SARS Virus
tggttcgagaacttagtttgcaacc

SEQ ID NO: 238094 - DNA, 25 bp, SARS Virus
ggttcgagaacatagtttgcaacct

SEQ ID NO: 238095 - DNA, 25 bp, SARS Virus
gttcgagaacattgtttgcaacctc

SEQ ID NO: 238096 - DNA, 25 bp, SARS Virus
ttcgagaacatattttgcaacctct

SEQ ID NO: 238097 - DNA, 25 bp, SARS Virus
tcgagaacatagtttgcaacctcta

SEQ ID NO: 238098 - DNA, 25 bp, SARS Virus
cgagaacatagtttgcaacctctat

SEQ ID NO: 238099 - DNA, 25 bp, SARS Virus
gagaacatagtttgcaacctctatc

SEQ ID NO: 238100 - DNA, 25 bp, SARS Virus
agaacatagttttcaacctctatca

SEQ ID NO: 238101 - DNA, 25 bp, SARS Virus
gaacatagtttgtaacctctatcat

SEQ ID NO: 238102 - DNA, 25 bp, SARS Virus
aacatagtttgctacctctatcatg

SEQ ID NO: 238103 - DNA, 25 bp, SARS Virus
catgatagaggttgcaaactatgtt

SEQ ID NO: 238104 - DNA, 25 bp, SARS Virus
atgatagaggtttcaaactatgttc

SEQ ID NO: 238105 - DNA, 25 bp, SARS Virus
tgatagaggttgtaaactatgttct

SEQ ID NO: 238106 - DNA, 25 bp, SARS Virus
gatagaggttgctaactatgttctc

SEQ ID NO: 238107 - DNA, 25 bp, SARS Virus
atagaggttgcatactatgttctcg

SEQ ID NO: 238108 - DNA, 25 bp, SARS Virus
tagaggttgcaatctatgttctcga

SEQ ID NO: 238109 - DNA, 25 bp, SARS Virus
agaggttgcaaattatgttctcgaa

SEQ ID NO: 238110 - DNA, 25 bp, SARS Virus
gaggttgcaaactatgttctcgaac

SEQ ID NO: 238111 - DNA, 25 bp, SARS Virus
aggttgcaaactttgttctcgaacc

SEQ ID NO: 238112 - DNA, 25 bp, SARS Virus
ggttgcaaactatgttctcgaacca

SEQ ID NO: 238113 - DNA, 25 bp, SARS Virus
tataaatgttgcttttttcacgacc

SEQ ID NO: 238114 - DNA, 25 bp, SARS Virus
ataaatgttgcttttttcacgacca

SEQ ID NO: 238115 - DNA, 25 bp, SARS Virus
taaatgttgcttttttcacgaccaa

SEQ ID NO: 238116 - DNA, 25 bp, SARS Virus
aaatgttgcttttttcacgaccaaa

SEQ ID NO: 238117 - DNA, 25 bp, SARS Virus
aatgttgcttttttcacgaccaaaa

SEQ ID NO: 238118 - DNA, 25 bp, SARS Virus
atgttgcttttttcacgaccaaaac

SEQ ID NO: 238119 - DNA, 25 bp, SARS Virus
tgttgctttttttacgaccaaaacg

SEQ ID NO: 238120 - DNA, 25 bp, SARS Virus
gttgcttttttctcgaccaaaacgt

SEQ ID NO: 238121 - DNA, 25 bp, SARS Virus
ttgcttttttcatgaccaaaacgtt

SEQ ID NO: 238122 - DNA, 25 bp, SARS Virus
tgcttttttcactaccaaaacgttt

SEQ ID NO: 238123 - DNA, 25 bp, SARS Virus
gcttttttcacgtccaaaacgtttc

SEQ ID NO: 238124 - DNA, 25 bp, SARS Virus
gaaacgttttggtcgtgaaaaaagc

SEQ ID NO: 238125 - DNA, 25 bp, SARS Virus
aaacgttttggttgtgaaaaaagca

SEQ ID NO: 238126 - DNA, 25 bp, SARS Virus
aacgttttggtcttgaaaaaagcaa

SEQ ID NO: 238127 - DNA, 25 bp, SARS Virus
acgttttggtcgtgaaaaaagcaac

SEQ ID NO: 238128 - DNA, 25 bp, SARS Virus
cgttttggtcgttaaaaaagcaaca

SEQ ID NO: 238129 - DNA, 25 bp, SARS Virus
gttttggtcgtgtaaaaagcaacat

SEQ ID NO: 238130 - DNA, 25 bp, SARS Virus
ttttggtcgtgataaaagcaacatt

SEQ ID NO: 238131 - DNA, 25 bp, SARS Virus
tttggtcgtgaataaagcaacattt

SEQ ID NO: 238132 - DNA, 25 bp, SARS Virus
ttggtcgtgaaataagcaacattta

SEQ ID NO: 238133 - DNA, 25 bp, SARS Virus
tggtcgtgaaaatagcaacatttat

SEQ ID NO: 238134 - DNA, 25 bp, SARS Virus
ggtcgtgaaaaatgcaacatttata

SEQ ID NO: 238135 - DNA, 25 bp, SARS Virus
cgaatgttttatttcctcgagaaga

SEQ ID NO: 238136 - DNA, 25 bp, SARS Virus
gaatgttttatctcctcgagaagat

SEQ ID NO: 238137 - DNA, 25 bp, SARS Virus
aatgttttatcttctcgagaagata

SEQ ID NO: 238138 - DNA, 25 bp, SARS Virus
atgttttatctcttcgagaagataa

SEQ ID NO: 238139 - DNA, 25 bp, SARS Virus
tgttttatctcctcgagaagataag

SEQ ID NO: 238140 - DNA, 25 bp, SARS Virus
gttttatctccttgagaagataaga

SEQ ID NO: 238141 - DNA, 25 bp, SARS Virus
ttttatctcctctagaagataagaa

SEQ ID NO: 238142 - DNA, 25 bp, SARS Virus
tttatctcctcgtgaagataagaat

SEQ ID NO: 238143 - DNA, 25 bp, SARS Virus
ttatctcctcgataagataagaata

SEQ ID NO: 238144 - DNA, 25 bp, SARS Virus
tatctcctcgagtagataagaatac

SEQ ID NO: 238145 - DNA, 25 bp, SARS Virus
gtattcttatcttctcgaggagata

SEQ ID NO: 238146 - DNA, 25 bp, SARS Virus
tattcttatcttttcgaggagataa

SEQ ID NO: 238147 - DNA, 25 bp, SARS Virus
attcttatcttctcgaggagataaa

SEQ ID NO: 238148 - DNA, 25 bp, SARS Virus
ttcttatcttcttgaggagataaaa

SEQ ID NO: 238149 - DNA, 25 bp, SARS Virus
tcttatcttctctaggagataaaac

SEQ ID NO: 238150 - DNA, 25 bp, SARS Virus
cttatcttctcgtggagataaaaca

SEQ ID NO: 238151 - DNA, 25 bp, SARS Virus
ttatcttctcgatgagataaaacat

SEQ ID NO: 238152 - DNA, 25 bp, SARS Virus
tatcttctcgagtagataaaacatt

SEQ ID NO: 238153 - DNA, 25 bp, SARS Virus
atcttctcgaggtgataaaacattc

SEQ ID NO: 238154 - DNA, 25 bp, SARS Virus
tcttctcgaggatataaaacattcg

SEQ ID NO: 238155 - DNA, 25 bp, SARS Virus
atctgtaaagtgtaacgagaaaacc

SEQ ID NO: 238156 - DNA, 25 bp, SARS Virus
tctgtaaagtggtacgagaaaaccc

SEQ ID NO: 238157 - DNA, 25 bp, SARS Virus
ctgtaaagtggatcgagaaaacccc

SEQ ID NO: 238158 - DNA, 25 bp, SARS Virus
tgtaaagtggaatgagaaaaccccc

SEQ ID NO: 238159 - DNA, 25 bp, SARS Virus
gtaaagtggaactagaaaaccccca

SEQ ID NO: 238160 - DNA, 25 bp, SARS Virus
taaagtggaacgtgaaaacccccac

SEQ ID NO: 238161 - DNA, 25 bp, SARS Virus
aaagtggaacgataaaacccccaca

SEQ ID NO: 238162 - DNA, 25 bp, SARS Virus
aagtggaacgagtaaacccccacat

SEQ ID NO: 238163 - DNA, 25 bp, SARS Virus
agtggaacgagataacccccacatt

SEQ ID NO: 238164 - DNA, 25 bp, SARS Virus
gtggaacgagaatacccccacattc

SEQ ID NO: 238165 - DNA, 25 bp, SARS Virus
gaatgtgggggttttctcgttccac

SEQ ID NO: 238166 - DNA, 25 bp, SARS Virus
aatgtgggggttttctcgttccact

SEQ ID NO: 238167 - DNA, 25 bp, SARS Virus
atgtgggggttttctcgttccactt

SEQ ID NO: 238168 - DNA, 25 bp, SARS Virus
tgtgggggttttttcgttccacttt

SEQ ID NO: 238169 - DNA, 25 bp, SARS Virus
gtgggggttttctcgttccacttta

SEQ ID NO: 238170 - DNA, 25 bp, SARS Virus
tgggggttttcttgttccactttac

SEQ ID NO: 238171 - DNA, 25 bp, SARS Virus
gggggttttctctttccactttaca

SEQ ID NO: 238172 - DNA, 25 bp, SARS Virus
ggggttttctcgttccactttacag

SEQ ID NO: 238173 - DNA, 25 bp, SARS Virus
gggttttctcgttccactttacaga

SEQ ID NO: 238174 - DNA, 25 bp, SARS Virus
ggttttctcgtttcactttacagat

SEQ ID NO: 238175 - DNA, 25 bp, SARS Virus
ctctaaaaaatgtgaacctagttaa

SEQ ID NO: 238176 - DNA, 25 bp, SARS Virus
tctaaaaaatgataacctagttaat

SEQ ID NO: 238177 - DNA, 25 bp, SARS Virus
ctaaaaaatgagtacctagttaatg

SEQ ID NO: 238178 - DNA, 25 bp, SARS Virus
taaaaaatgagatcctagttaatga

SEQ ID NO: 238179 - DNA, 25 bp, SARS Virus
aaaaaatgagaatctagttaatgac

SEQ ID NO: 238180 - DNA, 25 bp, SARS Virus
aaaaatgagaacttagttaatgacg

SEQ ID NO: 238181 - DNA, 25 bp, SARS Virus
aaaatgagaacctagttaatgacgt

SEQ ID NO: 238182 - DNA, 25 bp, SARS Virus
aaatgagaaccttgttaatgacgtg

SEQ ID NO: 238183 - DNA, 25 bp, SARS Virus
aatgagaacctatttaatgacgtgt

SEQ ID NO: 238184 - DNA, 25 bp, SARS Virus
acacgtcattaattaggttctcatt

SEQ ID NO: 238185 - DNA, 25 bp, SARS Virus
cacgtcattaactaggttctcattt

SEQ ID NO: 238186 - DNA, 25 bp, SARS Virus
acgtcattaacttggttctcatttt

SEQ ID NO: 238187 - DNA, 25 bp, SARS Virus
cgtcattaactatgttctcattttt

SEQ ID NO: 238188 - DNA, 25 bp, SARS Virus
gtcattaactagtttctcatttttt

SEQ ID NO: 238189 - DNA, 25 bp, SARS Virus
tcattaactaggttctcatttttta

SEQ ID NO: 238190 - DNA, 25 bp, SARS Virus
cattaactaggttctcattttttag

SEQ ID NO: 238191 - DNA, 25 bp, SARS Virus
attaactaggttttcattttttaga

SEQ ID NO: 238192 - DNA, 25 bp, SARS Virus
ttaactaggttctcattttttagag

SEQ ID NO: 238193 - DNA, 29736 bp, SARS Virus
ctacccaggaaaagccaaccaacctcgatctcttgtagatctgttctctaaacgaactttaaaatctgtgtagctgtcgctcggctgcatgcctagtgcacctacgcagtataaacaataataaattttactgtcgttgacaagaaacgagtaactcgtccctcttctgcagactgcttacggtttcgtccgtgttgcagtcgatcatcagcatacctaggtttcgtccgggtgtgaccgaaaggtaagatggagagccttgttcttggtgtcaacgagaaaacacacgtccaactcagtttgcctgtccttcaggttagagacgtgctagtgcgtggcttcggggactctgtggaagaggccctatcggaggcacgtgaacacctcaaaaatggcacttgtggtctagtagagctggaaaaaggcgtactgccccagcttgaacagccctatgtgttcattaaacgttctgatgccttaagcaccaatcacggccacaaggtcgttgagctggttgcagaaatggacggcattcagtacggtcgtagcggtataacactgggagtactcgtgccacatgtgggcgaaaccccaattgcataccgcaatgttcttcttcgtaagaacggtaataagggagccggtggtcatagctatggcatcgatctaaagtcttatgacttaggtgacgagcttggcactgatcccattgaagattatgaacaaaactggaacactaagcatggcagtggtgcactccgtgaactcactcgtgagctcaatggaggtgcagtcactcgctatgtcgacaacaatttctgtggcccagatgggtaccctcttgattgcatcaaagattttctcgcacgcgcgggcaagtcaatgtgcactctttccgaacaacttgattacatcgagtcgaagagaggtgtctactgctgccgtgaccatgagcatgaaattgcctggttcactgagcgctctgataagagctacgagcaccagacacccttcgaaattaagagtgccaagaaatttgacactttcaaaggggaatgcccaaagtttgtgtttcctcttaactcaaaagtcaaagtcattcaaccacgtgttgaaaagaaaaagactgagggtttcatggggcgtatacgctctgtgtaccctgttgcatctccacaggagtgtaacaatatgcacttgtctaccttgatgaaatgtaatcattgcgatgaagtttcatggcagacgtgcgactttctgaaagccacttgtgaacattgtggcactgaaaatttagttattgaaggacctactacatgtgggtacctacctactaatgctgtagtgaaaatgccatgtcctgcctgtcaagacccagagattggacctgagcatagtgttgcagattatcacaaccactcaaacattgaaactcgactccgcaagggaggtaggactagatgttttggaggctgtgtgtttgcctatgttggctgctataataagcgtgcctactgggttcctcgtgctagtgctgatattggctcaggccatactggcattactggtgacaatgtggagaccttgaatgaggatctccttgagatactgagtcgtgaacgtgttaacattaacattgttggcgattttcatttgaatgaagaggttgccatcattttggcatctttctctgcttctacaagtgcctttattgacactataaagagtcttgattacaagtctttcaaaaccattgttgagtcctgcggtaactataaagttaccaagggaaagcccgtaaaaggtgcttggaacattggacaacagagatcagttttaacaccactgtgtggttttccctcacaggctgctggtgttatcagatcaatttttgcgcgcacacttgatgcagcaaaccactcaattcctgatttgcaaagagcagctgtcaccatacttgatggtatttctgaacagtcattacgtcttgtcgacgccatggtttatacttcagacctgctcaccaacagtgtcattattatggcatatgtaactggtggtcttgtacaacagacttctcagtggttgtctaatcttttgggcactactgttgaaaaactcaggcctatctttgaatggattgaggcgaaacttagtgcaggagttgaatttctcaaggatgcttgggagattctcaaatttctcattacaggtgtttttgacatcgtcaagggtcaaatacaggttgcttcagataacatcaaggattgtgtaaaatgcttcattgatgttgttaacaaggcactcgaaatgtgcattgatcaagtcactatcgctggcgcaaagttgcgatcactcaacttaggtgaagtcttcatcgctcaaagcaagggactttaccgtcagtgtatacgtggcaaggagcagctgcaactactcatgcctcttaaggcaccaaaagaagtaacctttcttgaaggtgattcacatgacacagtacttacctctgaggaggttgttctcaagaacggtgaactcgaagcactcgagacgcccgttgatagcttcacaaatggagctatcgttggcacaccagtctgtgtaaatggcctcatgctcttagagattaaggacaaagaacaatactgcgcattgtctcctggtttactggctacaaacaatgtctttcgcttaaaagggggtgcaccaattaaaggtgtaacctttggagaagatactgtttgggaagttcaaggttacaagaatgtgagaatcacatttgagcttgatgaacgtgttgacaaagtgcttaatgaaaagtgctctgtctacactgttgaatccggtaccgaagttactgagtttgcatgtgttgtagcagaggctgttgtgaagactttacaaccagtttctgatctccttaccaacatgggtattgatcttgatgagtggagtgtagctacattctacttatttgatgatgctggtgaagaaaacttttcatcacgtatgtattgttccttttaccctccagatgaggaagaagaggacgatgcagagtgtgaggaagaagaaattgatgaaacctgtgaacatgagtacggtacagaggatgattatcaaggtctccctctggaatttggtgcctcagctgaaacagttcgagttgaggaagaagaagaggaagactggctggatgatactactgagcaatcagagattgagccagaaccagaacctacacctgaagaaccagttaatcagtttactggttatttaaaacttactgacaatgttgccattaaatgtgttgacatcgttaaggaggcacaaagtgctaatcctatggtgattgtaaatgctgctaacatacacctgaaacatggtggtggtgtagcaggtgcactcaacaaggcaaccaatggtgccatgcaaaaggagagtgatgattacattaagctaaatggccctcttacagtaggagggtcttgtttgctttctggacataatcttgctaagaagtgtctgcatgttgttggacctaacctaaatgcaggtgaggacatccagcttcttaaggcagcatatgaaaatttcaattcacaggacatcttacttgcaccattgttgtcagcaggcatatttggtgctaaaccacttcagtctttacaagtgtgcgtgcagacggttcgtacacaggtttatattgcagtcaatgacaaagctctttatgagcaggttgtcatggattatcttgataacctgaagcctagagtggaagcacctaaacaagaggagccaccaaacacagaagattccaaaactgaggagaaatctgtcgtacagaagcctgtcgatgtgaagccaaaaattaaggcctgcattgatgaggttaccacaacactggaagaaactaagtttcttaccaataagttactcttgtttgctgatatcaatggtaagctttaccatgattctcagaacatgcttagaggtgaagatatgtctttccttgagaaggatgcaccttacatggtaggtgatgttatcactagtggtgatatcacttgtgttgtaataccctccaaaaaggctggtggcactactgagatgctctcaagagctttgaagaaagtgccagttgatgagtatataaccacgtaccctggacaaggatgtgctggttatacacttgaggaagctaagactgctcttaagaaatgcaaatctgcattttatgtactaccttcagaagcacctaatgctaaggaagagattctaggaactgtatcctggaatttgagagaaatgcttgctcatgctgaagagacaagaaaattaatgcctatatgcatggatgttagagccataatggcaaccatccaacgtaagtataaaggaattaaaattcaagagggcatcgttgactatggtgtccgattcttcttttatactagtaaagagcctgtagcttctattattacgaagctgaactctctaaatgagccgcttgtcacaatgccaattggttatgtgacacatggttttaatcttgaagaggctgcgcgctgtatgcgttctcttaaagctcctgccgtagtgtcagtatcatcaccagatgctgttactacatataatggatacctcacttcgtcatcaaagacatctgaggagcactttgtagaaacagtttctttggctggctcttacagagattggtcctattcaggacagcgtacagagttaggtgttgaatttcttaagcgtggtgacaaaattgtgtaccacactctggagagccccgtcgagtttcatcttgacggtgaggttctttcacttgacaaactaaagagtctcttatccctgcgggaggttaagactataaaagtgttcacaactgtggacaacactaatctccacacacagcttgtggatatgtctatgacatatggacagcagtttggtccaacatacttggatggtgctgatgttacaaaaattaaacctcatgtaaatcatgagggtaagactttctttgtactacctagtgatgacacactacgtagtgaagctttcgagtactaccatactcttgatgagagttttcttggtaggtacatgtctgctttaaaccacacaaagaaatggaaatttcctcaagttggtggtttaacttcaattaaatgggctgataacaattgttatttgtctagtgttttattagcacttcaacagcttgaagtcaaattcaatgcaccagcacttcaagaggcttattatagagcccgtgctggtgatgctgctaacttttgtgcactcatactcgcttacagtaataaaactgttggcgagcttggtgatgtcagagaaactatgacccatcttctacagcatgctaatttggaatctgcaaagcgagttcttaatgtggtgtgtaaacattgtggtcagaaaactactaccttaacgggtgtagaagctgtgatgtatatgggtactctatcttatgataatcttaagacaggtgtttccattccatgtgtgtgtggtcgtgatgctacacaatatctagtacaacaagagtcttcttttgttatgatgtctgcaccacctgctgagtataaattacagcaaggtacattcttatgtgcgaatgagtacactggtaactatcagtgtggtcattacactcatataactgctaaggagaccctctatcgtattgacggagctcaccttacaaagatgtcagagtacaaaggaccagtgactgatgttttctacaaggaaacatcttacactacaaccatcaagcctgtgtcgtataaactcgatggagttacttacacagagattgaaccaaaattggatgggtattataaaaaggataatgcttactatacagagcagcctatagaccttgtaccaactcaaccattaccaaatgcgagttttgataatttcaaactcacatgttctaacacaaaatttgctgatgatttaaatcaaatgacaggcttcacaaagccagcttcacgagagctatctgtcacattcttcccagacttgaatggcgatgtagtggctattgactatagacactattcagcgagtttcaagaaaggtgctaaattactgcataagccaattgtttggcacattaaccaggctacaaccaagacaacgttcaaaccaaacacttggtgtttacgttgtctttggagtacaaagccagtagatacttcaaattcatttgaagttctggcagtagaagacacacaaggaatggacaatcttgcttgtgaaagtcaacaacccacctctgaagaagtagtggaaaatcctaccatacagaaggaagtcatagagtgtgacgtgaaaactaccgaagttgtaggcaatgtcatacttaaaccatcagatgaaggtgttaaagtaacacaagagttaggtcatgaggatcttatggctgcttatgtggaaaacacaagcattaccattaagaaacctaatgagctttcactagccttaggtttaaaaacaattgccactcatggtattgctgcaattaatagtgttccttggagtaaaattttggcttatgtcaaaccattcttaggacaagcagcaattacaacatcaaattgcgctaagagattagcacaacgtgtgtttaacaattatatgccttatgtgtttacattattgttccaattgtgtacttttactaaaagtaccaattctagaattagagcttcactacctacaactattgctaaaaatagtgttaagagtgttgctaaattatgtttggatgccggcattaattatgtgaagtcacccaaattttctaaattgttcacaatcgctatgtggctattgttgttaagtatttgcttaggttctctaatctgtgtaactgctgcttttggtgtactcttatctaattttggtgctccttcttattgtaatggcgttagagaattgtatcttaattcgtctaacgttactactatggatttctgtgaaggttcttttccttgcagcatttgtttaagtggattagactcccttgattcttatccagctcttgaaaccattcaggtgacgatttcatcgtacaagctagacttgacaattttaggtctggccgctgagtgggttttggcatatatgttgttcacaaaattcttttatttattaggtctttcagctataatgcaggtgttctttggctattttgctagtcatttcatcagcaattcttggctcatgtggtttatcattagtattgtacaaatggcacccgtttctgcaatggttaggatgtacatcttctttgcttctttctactacatatggaagagctatgttcatatcatggatggttgcacctcttcgacttgcatgatgtgctataagcgcaatcgtgccacacgcgttgagtgtacaactattgttaatggcatgaagagatctttctatgtctatgcaaatggaggccgtggcttctgcaagactcacaattggaattgtctcaattgtgacacattttgcactggtagtacattcattagtgatgaagttgctcgtgatttgtcactccagtttaaaagaccaatcaaccctactgaccagtcatcgtatattgttgatagtgttgctgtgaaaaatggcgcgcttcacctctactttgacaaggctggtcaaaagacctatgagagacatcctctctcccattttgtcaatttagacaatttgagagctaacaacactaaaggttcactgcctattaatgtcatagtttttgatggcaagtccaaatgcgacgagtctgcttctaagtctgcttctgtgtactacagtcagctgatgtgccaacctattctgttgcttgaccaagctcttgtatcagacgttggagatagtactgaagtttccgttaagatgtttgatgcttatgtcgacaccttttcagcaacttttagtgttcctatggaaaaacttaaggcacttgttgctacagctcacagcgagttagcaaagggtgtagctttagatggtgtcctttctacattcgtgtcagctgcccgacaaggtgttgttgataccgatgttgacacaaaggatgttattgaatgtctcaaactttcacatcactctgacttagaagtgacaggtgacagttgtaacaatttcatgctcacctataataaggttgaaaacatgacgcccagagatcttggcgcatgtattgactgtaatgcaaggcatatcaatgcccaagtagcaaaaagtcacaatgtttcactcatctggaatgtaaaagactacatgtctttatctgaacagctgcgtaaacaaattcgtagtgctgccaagaagaacaacataccttttagactaacttgtgctacaactagacaggttgtcaatgtcataactactaaaatctcactcaagggtggtaagattgttagtacttgttttaaacttatgcttaaggccacattattgtgcgttcttgctgcattggtttgttatatcgttatgccagtacatacattgtcaatccatgatggttacacaaatgaaatcattggttacaaagccattcaggatggtgtcactcgtgacatcatttctactgatgattgttttgcaaataaacatgctggttttgacgcatggtttagccagcgtggtggttcatacaaaaatgacaaaagctgccctgtagtagctgctatcattacaagagagattggtttcatagtgcctggcttaccgggtactgtgctgagagcaatcaatggtgacttcttgcattttctacctcgtgtttttagtgctgttggcaacatttgctacacaccttccaaactcattgagtatagtgattttgctacctctgcttgcgttcttgctgctgagtgtacaatttttaaggatgctatgggcaaacctgtgccatattgttatgacactaatttgctagagggttctatttcttatagtgagcttcgtccagacactcgttatgtgcttatggatggttccatcatacagtttcctaacacttacctggagggttctgttagagtagtaacaacttttgatgctgagtactgtagacatggtacatgcgaaaggtcagaagtaggtatttgcctatctaccagtggtagatgggttcttaataatgagcattacagagctctatcaggagttttctgtggtgttgatgcgatgaatctcatagctaacatctttactcctcttgtgcaacctgtgggtgctttagatgtgtctgcttcagtagtggctggtggtattattgccatattggtgacttgtgctgcctactactttatgaaattcagacgtgcttttggtgagtacaaccatgttgttgctgctaatgcacttttgtttttgatgtctttcactatactctgtctggcaccagcttacagctttctgccgggagtctactcagtcttttacttgtacttgacattctatttcaccaatgatgtttcattcttggctcaccttcaatggtttgccatgttttctcctattgtgcctttttggataacagcaatctatgtattctgtatttctctgaagcactgccattggttctttaacaactatcttaggaaaagagtcatgtttaatggagttacatttagtaccttcgaggaggctgctttgtgtacctttttgctcaacaaggaaatgtacctaaaattgcgtagcgagacactgttgccacttacacagtataacaggtatcttgctctatataacaagtacaagtatttcagtggagccttagatactaccagctatcgtgaagcagcttgctgccacttagcaaaggctctaaatgactttagcaactcaggtgctgatgttctctaccaaccaccacagacatcaatcacttctgctgttctgcagagtggttttaggaaaatggcattcccgtcaggcaaagttgaagggtgcatggtacaagtaacctgtggaactacaactcttaatggattgtggttggatgacacagtatactgtccaagacatgtcatttgcacagcagaagacatgcttaatcctaactatgaagatctgctcattcgcaaatccaaccatagctttcttgttcaggctggcaatgttcaacttcgtgttattggccattctatgcaaaattgtctgcttaggcttaaagttgatacttctaaccctaagacacccaagtataaatttgtccgtatccaacctggtcaaacattttcagttctagcatgctacaatggttcaccatctggtgtttatcagtgtgccatgagacctaatcataccattaaaggttctttccttaatggatcatgtggtagtgttggttttaacattgattatgattgcgtgtctttctgctatatgcatcatatggagcttccaacaggagtacacgctggtactgacttagaaggtaaattctatggtccatttgttgacagacaaactgcacaggctgcaggtacagacacaaccataacattaaatgttttggcatggctgtatgctgctgttatcaatggtgataggtggtttcttaatagattcaccactactttgaatgactttaaccttgtggcaatgaagtacaactatgaacctttgacacaagatcatgttgacatattgggacctctttctgctcaaacaggaattgccgtcttagatatgtgtgctgctttgaaagagctgctgcagaatggtatgaatggtcgtactatccttggtagcactattttagaagatgagtttacaccatttgatgttgttagacaatgctctggtgttaccttccaaggtaagttcaagaaaattgttaagggcactcatcattggatgcttttaactttcttgacatcactattgattcttgttcaaagtacacagtggtcactgtttttctttgtttacgagaatgctttcttgccatttactcttggtattatggcaattgctgcatgtgctatgctgcttgttaagcataagcacgcattcttgtgcttgtttctgttaccttctcttgcaacagttgcttactttaatatggtctacatgcctgctagctgggtgatgcgtatcatgacatggcttgaattggctgacactagcttgtctggttataggcttaaggattgtgttatgtatgcttcagctttagttttgcttattctcatgacagctcgcactgtttatgatgatgctgctagacgtgtttggacactgatgaatgtcattacacttgtttacaaagtctactatggtaatgctttagatcaagctatttccatgtgggccttagttatttctgtaacctctaactattctggtgtcgttacgactatcatgtttttagctagagctatagtgtttgtgtgtgttgagtattacccattgttatttattactggcaacaccttacagtgtatcatgcttgtttattgtttcttaggctattgttgctgctgctactttggccttttctgtttactcaaccgttacttcaggcttactcttggtgtttatgactacttggtctctacacaagaatttaggtatatgaactcccaggggcttttgcctcctaagagtagtattgatgctttcaagcttaacattaagttgttgggtattggaggtaaaccatgtatcaaggttgctactgtacagtctaaaatgtctgacgtaaagtgcacatctgtggtactgctctcggttcttcaacaacttagagtagagtcatcttctaaattgtgggcacaatgtgtacaactccacaatgatattcttcttgcaaaagacacaactgaagctttcgagaagatggtttctcttttgtctgttttgctatccatgcagggtgctgtagacattaataggttgtgcgaggaaatgctcgataaccgtgctactcttcaggctattgcttcagaatttagttctttaccatcatatgccgcttatgccactgcccaggaggcctatgagcaggctgtagctaatggtgattctgaagtcgttctcaaaaagttaaagaaatctttgaatgtggctaaatctgagtttgaccgtgatgctgccatgcaacgcaagttggaaaagatggcagatcaggctatgacccaaatgtacaaacaggcaagatctgaggacaagagggcaaaagtaactagtgctatgcaaacaatgctcttcactatgcttaggaagcttgataatgatgcacttaacaacattatcaacaatgcgcgtgatggttgtgttccactcaacatcataccattgactacagcagccaaactcatggttgttgtccctgattatggtacctacaagaacacttgtgatggtaacacctttacatatgcatctgcactctgggaaatccagcaagttgttgatgcggatagcaagattgttcaacttagtgaaattaacatggacaattcaccaaatttggcttggcctcttattgttacagctctaagagccaactcagctgttaaactacagaataatgaactgagtccagtagcactacgacagatgtcctgtgcggctggtaccacacaaacagcttgtactgatgacaatgcacttgcctactataacaattcgaagggaggtaggtttgtgctggcattactatcagaccaccaagatctcaaatgggctagattccctaagagtgatggtacaggtacaatttacacagaactggaaccaccttgtaggtttgttacagacacaccaaaagggcctaaagtgaaatacttgtacttcatcaaaggcttaaacaacctaaatagaggtatggtgctgggcagtttagctgctacagtacgtcttcaggctggaaatgctacagaagtacctgccaattcaactgtgctttccttctgtgcttttgcagtagaccctgctaaagcatataaggattacctagcaagtggaggacaaccaatcaccaactgtgtgaagatgttgtgtacacacactggtacaggacaggcaattactgtaacaccagaagctaacatggaccaagagtcctttggtggtgcttcatgttgtctgtattgtagatgccacattgaccatccaaatcctaaaggattctgtgacttgaaaggtaagtacgtccaaatacctaccacttgtgctaatgacccagtgggttttacacttagaaacacagtctgtaccgtctgcggaatgtggaaaggttatggctgtagttgtgaccaactccgcgaacccttgatgcagtctgcggatgcatcaacgtttttaaacgggtttgcggtgtaagtgcagcccgtcttacaccgtgcggcacaggcactagtactgatgtcgtctacagggcttttgatatttacaacgaaaaagttgctggttttgcaaagttcctaaaaactaattgctgtcgcttccaggagaaggatgaggaaggcaatttattagactcttactttgtagttaagaggcatactatgtctaactaccaacatgaagagactatttataacttggttaaagattgtccagcggttgctgtccatgactttttcaagtttagagtagatggtgacatggtaccacatatatcacgtcagcgtctaactaaatacacaatggctgatttagtctatgctctacgtcattttgatgagggtaattgtgatacattaaaagaaatactcgtcacatacaattgctgtgatgatgattatttcaataagaaggattggtatgacttcgtagagaatcctgacatcttacgcgtatatgctaacttaggtgagcgtgtacgccaatcattattaaagactgtacaattctgcgatgctatgcgtgatgcaggcattgtaggcgtactgacattagataatcaggatcttaatgggaactggtacgatttcggtgatttcgtacaagtagcaccaggctgcggagttcctattgtggattcatattactcattgctgatgcccatcctcactttgactagggcattggctgctgagtcccatatggatgctgatctcgcaaaaccacttattaagtgggatttgctgaaatatgattttacggaagagagactttgtctcttcgaccgttattttaaatattgggaccagacataccatcccaattgtattaactgtttggatgataggtgtatccttcattgtgcaaactttaatgtgttattttctactgtgtttccacctacaagttttggaccactagtaagaaaaatatttgtagatggtgttccttttgttgtttcaactggataccattttcgtgagttaggagtcgtacataatcaggatgtaaacttacatagctcgcgtctcagtttcaaggaacttttagtgtatgctgctgatccagctatgcatgcagcttctggcaatttattgctagataaacgcactacatgcttttcagtagctgcactaacaaacaatgttgcttttcaaactgtcaaacccggtaattttaataaagacttttatgactttgctgtgtctaaaggtttctttaaggaaggaagttctgttgaactaaaacacttcttctttgctcaggatggcaacgctgctatcagtgattatgactattatcgttataatctgccaacaatgtgtgatatcagacaactcctattcgtagttgaagttgttgataaatactttgattgttacgatggtggctgtattaatgccaaccaagtaatcgttaacaatctggataaatcagctggtttcccatttaataaatggggtaaggctagactttattatgactcaatgagttatgaggatcaagatgcacttttcgcgtatactaagcgtaatgtcatccctactataactcaaatgaatcttaagtatgccattagtgcaaagaatagagctcgcaccgtagctggtgtctctatctgtagtactatgacaaatagacagtttcatcagaaattattgaagtcaatagccgccactagaggagctactgtggtaattggaacaagcaagttttacggtggctggcataatatgttaaaaactgtttacagtgatgtagaaactccacaccttatgggttgggattatccaaaatgtgacagagccatgcctaacatgcttaggataatggcctctcttgttcttgctcgcaaacataacacttgctgtaacttatcacaccgtttctacaggttagctaacgagtgtgcgcaagtattaagtgagatggtcatgtgtggcggctcactatatgttaaaccaggtggaacatcatccggtgatgctacaactgcttatgctaatagtgtctttaacatttgtcaagctgttacagccaatgtaaatgcacttctttcaactgatggtaataagatagctgacaagtatgtccgcaatctacaacacaggctctatgagtgtctctatagaaatagggatgttgatcatgaattcgtggatgagttttacgcttacctgcgtaaacatttctccatgatgattctttctgatgatgccgttgtgtgctataacagtaactatgcggctcaaggtttagtagctagcattaagaactttaaggcagttctttattatcaaaataatgtgttcatgtctgaggcaaaatgttggactgagactgaccttactaaaggacctcacgaattttgctcacagcatacaatgctagttaaacaaggagatgattacgtgtacctgccttacccagatccatcaagaatattaggcgcaggctgttttgtcgatgatattgtcaaaacagatggtacacttatgattgaaaggttcgtgtcactggctattgatgcttacccacttacaaaacatcctaatcaggagtatgctgatgtctttcacttgtatttacaatacattagaaagttacatgatgagcttactggccacatgttggacatgtattccgtaatgctaactaatgataacacctcacggtactgggaacctgagttttatgaggctatgtacacaccacatacagtcttgcaggctgtaggtgcttgtgtattgtgcaattcacagacttcacttcgttgcggtgcctgtattaggagaccattcctatgttgcaagtgctgctatgaccatgtcatttcaacatcacacaaattagtgttgtctgttaatccctatgtttgcaatgccccaggttgtgatgtcactgatgtgacacaactgtatctaggaggtatgagctattattgcaagtcacataagcctcccattagttttccattatgtgctaatggtcaggtttttggtttatacaaaaacacatgtgtaggcagtgacaatgtcactgacttcaatgcgatagcaacatgtgattggactaatgctggcgattacatacttgccaacacttgtactgagagactcaagcttttcgcagcagaaacgctcaaagccactgaggaaacatttaagctgtcatatggtattgccactgtacgcgaagtactctctgacagagaattgcatctttcatgggaggttggaaaacctagaccaccattgaacagaaactatgtctttactggttaccgtgtaactaaaaatagtaaagtacagattggagagtacacctttgaaaaaggtgactatggtgatgctgttgtgtacagaggtactacgacatacaagttgaatgttggtgattactttgtgttgacatctcacactgtaatgccacttagtgcacctactctagtgccacaagagcactatgtgagaattactggcttgtacccaacactcaacatctcagatgagttttctagcaatgttgcaaattatcaaaaggtcggcatgcaaaagtactctacactccaaggaccacctggtactggtaagagtcattttgccatcggacttgctctctattacccatctgctcgcatagtgtatacggcatgctctcatgcagctgttgatgccctatgtgaaaaggcattaaaatatttgcccatagataaatgtagtagaatcatacctgcgcgtgcgcgcgtagagtgttttgataaattcaaagtgaattcaacactagaacagtatgttttctgcactgtaaatgcattgccagaaacaactgctgacattgtagtctttgatgaaatctctatggctactaattatgacttgagtgttgtcaatgctagacttcgtgcaaaacactacgtctatattggcgatcctgctcaattaccagccccccgcacattgctgactaaaggcacactagaaccagaatattttaattcagtgtgcagacttatgaaaacaataggtccagacatgttccttggaacttgtcgccgttgtcctgctgaaattgttgacactgtgagtgctttagtttatgacaataagctaaaagcacacaaggagaagtcagctcaatgcttcaaaatgttctacaaaggtgttattacacatgatgtttcatctgcaatcaacagacctcaaataggcgttgtaagagaatttcttacacgcaatcctgcttggagaaaagctgtttttatctcaccttataattcacagaacgctgtagcttcaaaaatcttaggattgcctacgcagactgttgattcatcacagggttctgaatatgactatgtcatattcacacaaactactgaaacagcacactcttgtaatgtcaaccgtttcaatgtggctatcacaagggcaaaaattggcattttgtgcataatgtctgatagagatctttatgacaaactgcaatttacaagtctagaaataccacgtcgcaatgtggctacattacaagcagaaaatgtaactggactttttaaggactgtagtaagatcattactggtcttcatcctacacaggcacctacacacctcagcgttgatataaagttcaagactgaaggattatgtgttgacataccaggcataccaaaggacatgacctaccgtagactcatctctatgatgggtttcaaaatgaattaccaagtcaatggttaccctaatatgtttatcacccgcgaagaagctattcgtcacgttcgtgcgtggattggctttgatgtagagggctgtcatgcaactagagatgctgtgggtactaacctacctctccagctaggattttctacaggtgttaacttagtagctgtaccgactggttatgttgacactgaaaataacacagaattcaccagagttaatgcaaaacctccaccaggtgaccagtttaaacatcttataccactcatgtataaaggcttgccctggaatgtagtgcgtattaagatagtacaaatgctcagtgatacactgaaaggattgtcagacagagtcgtgttcgtcctttgggcgcatggctttgagcttacatcaatgaagtactttgtcaagattggacctgaaagaacgtgttgtctgtgtgacaaacgtgcaacttgcttttctacttcatcagatacttatgcctgctggaatcattctgtgggttttgactatgtctataacccatttatgattgatgttcagcagtggggctttacgggtaaccttcagagtaaccatgaccaacattgccaggtacatggaaatgcacatgtggctagttgtgatgctatcatgactagatgtttagcagtccatgagtgctttgttaagcgcgttgattggtctgttgaataccctattataggagatgaactgagggttaattctgcttgcagaaaagtacaacacatggttgtgaagtctgcattgcttgctgataagtttccagttcttcatgacattggaaatccaaaggctatcaagtgtgtgcctcaggctgaagtagaatggaagttctacgatgctcagccatgtagtgacaaagcttacaaaatagaggagctcttctattcttatgctacacatcacgataaattcactgatggtgtttgtttgttttggaattgtaacgttgatcgttacccagccaatgcaattgtgtgtaggtttgacacaagagtcttgtcaaacttgaacttaccaggctgtgatggtggtagtttgtatgtgaataagcatgcattccacactccagctttcgataaaagtgcatttactaatttaaagcaattgcctttcttttactattctgatagtccttgtgagtctcatggcaaacaagtagtgtcggatattgattatgttccactcaaatctgctacgtgtattacacgatgcaatttaggtggtgctgtttgcagacaccatgcaaatgagtaccgacagtacttggatgcatataatatgatgatttctgctggatttagcctatggatttacaaacaatttgatacttataacctgtggaatacatttaccaggttacagagtttagaaaatgtggcttataatgttgttaataaaggacactttgatggacacgccggcgaagcacctgtttccatcattaataatgctgtttacacaaaggtagatggtattgatgtggagatctttgaaaataagacaacacttcctgttaatgttgcatttgagctttgggctaagcgtaacattaaaccagtgccagagattaagatactcaataatttgggtgttgatatcgctgctaatactgtaatctgggactacaaaagagaagccccagcacatgtatctacaataggtgtctgcacaatgactgacattgccaagaaacctactgagagtgcttgttcttcacttactgtcttgtttgatggtagagtggaaggacaggtagacctttttagaaacgcccgtaatggtgttttaataacagaaggttcagtcaaaggtctaacaccttcaaagggaccagcacaagctagcgtcaatggagtcacattaattggagaatcagtaaaaacacagtttaactactttaagaaagtagacggcattattcaacagttgcctgaaacctactttactcagagcagagacttagaggattttaagcccagatcacaaatggaaactgactttctcgagctcgctatggatgaattcatacagcgatataagctcgagggctatgccttcgaacacatcgtttatggagatttcagtcatggacaacttggcggtcttcatttaatgataggcttagccaagcgctcacaagattcaccacttaaattagaggattttatccctatggacagcacagtgaaaaattacttcataacagatgcgcaaacaggttcatcaaaatgtgtgtgttctgtgattgatcttttacttgatgactttgtcgagataataaagtcacaagatttgtcagtgatttcaaaagtggtcaaggttacaattgactatgctgaaatttcattcatgctttggtgtaaggatggacatgttgaaaccttctacccaaaactacaagcaagtcaagcgtggcaaccaggtgttgcgatgcctaacttgtacaagatgcaaagaatgcttcttgaaaagtgtgaccttcagaattatggtgaaaatgctgttataccaaaaggaataatgatgaatgtcgcaaagtatactcaactgtgtcaatacttaaatacacttactttagctgtaccctacaacatgagagttattcactttggtgctggctctgataaaggagttgcaccaggtacagctgtgctcagacaatggttgccaactggcacactacttgtcgattcagatcttaatgacttcgtctccgacgcagattctactttaattggagactgtgcaacagtacatacggctaataaatgggaccttattattagcgatatgtatgaccctaggaccaaacatgtgacaaaagagaatgactctaaagaagggtttttcacttatctgtgtggatttataaagcaaaaactagccctgggtggttctatagctgtaaagataacagagcattcttggaatgctgacctttacaagcttatgggccatttctcatggtggacagcttttgttacaaatgtaaatgcatcatcatcggaagcatttttaattggggctaactatcttggcaagccgaaggaacaaattgatggctataccatgcatgctaactacattttctggaggaacacaaatcctatccagttgtcttcctattcactctttgacatgagcaaatttcctcttaaattaagaggaactgctgtaatgtctcttaaggagaatcaaatcaatgatatgatttattctcttctggaaaaaggtaggcttatcattagagaaaacaacagagttgtggtttcaagtgatattcttgttaacaactaaacgaacatgtttattttcttattatttcttactctcactagtggtagtgaccttgaccggtgcaccacttttgatgatgttcaagctcctaattacactcaacatacttcatctatgaggggggtttactatcctgatgaaatttttagatcagacactctttatttaactcaggatttatttcttccattttattctaatgttacagggtttcatactattaatcatacgtttgacaaccctgtcataccttttaaggatggtatttattttgctgccacagagaaatcaaatgttgtccgtggttgggtttttggttctaccatgaacaacaagtcacagtcggtgattattattaacaattctactaatgttgttatacgagcatgtaactttgaattgtgtgacaaccctttctttgctgtttctaaacccatgggtacacagacacatactatgatattcgataatgcatttaattgcactttcgagtacatatctgatgccttttcgcttgatgtttcagaaaagtcaggtaattttaaacacttacgagagtttgtgtttaaaaataaagatgggtttctctatgtttataagggctatcaacctatagatgtagttcgtgatctaccttctggttttaacactttgaaacctatttttaagttgcctcttggtattaacattacaaattttagagccattcttacagccttttcacctgctcaagacacttggggcacgtcagctgcagcctattttgttggctatttaaagccaactacatttatgctcaagtatgatgaaaatggtacaatcacagatgctgttgattgttctcaaaatccacttgctgaactcaaatgctctgttaagagctttgagattgacaaaggaatttaccagacctctaatttcagggttgttccctcaggagatgttgtgagattccctaatattacaaacttgtgtccttttggagaggtttttaatgctactaaattcccttctgtctatgcatgggagagaaaaaaaatttctaattgtgttgctgattactctgtgctctacaactcaacatttttttcaacctttaagtgctatggcgtttctgccactaagttgaatgatctttgcttctccaatgtctatgcagattcttttgtagtcaagggagatgatgtaagacaaatagcgccaggacaaactggtgttattgctgattataattataaattgccagatgatttcatgggttgtgtccttgcttggaatactaggaacattgatgctacttcaactggtaattataattataaatataggtatcttagacatggcaagcttaggccctttgagagagacatatctaatgtgcctttctcccctgatggcaaaccttgcaccccacctgctcttaattgttattggccattaaatgattatggtttttacaccactactggcattggctaccaaccttacagagttgtagtactttcttttgaacttttaaatgcaccggccacggtttgtggaccaaaattatccactgaccttattaagaaccagtgtgtcaattttaattttaatggactcactggtactggtgtgttaactccttcttcaaagagatttcaaccatttcaacaatttggccgtgatgtttctgatttcactgattccgttcgagatcctaaaacatctgaaatattagacatttcaccttgctcttttgggggtgtaagtgtaattacacctggaacaaatgcttcatctgaagttgctgttctatatcaagatgttaactgcactgatgtttctacagcaattcatgcagatcaactcacaccagcttggcgcatatattctactggaaacaatgtattccagactcaagcaggctgtcttataggagctgagcatgtcgacacttcttatgagtgcgacattcctattggagctggcatttgtgctagttaccatacagtttctttattacgtagtactagccaaaaatctattgtggcttatactatgtctttaggtgctgatagttcaattgcttactctaataacaccattgctatacctactaacttttcaattagcattactacagaagtaatgcctgtttctatggctaaaacctccgtagattgtaatatgtacatctgcggagattctactgaatgtgctaatttgcttctccaatatggtagcttttgcacacaactaaatcgtgcactctcaggtattgctgctgaacaggatcgcaacacacgtgaagtgttcgctcaagtcaaacaaatgtacaaaaccccaactttgaaatattttggtggttttaatttttcacaaatattacctgaccctctaaagccaactaagaggtcttttattgaggacttgctctttaataaggtgacactcgctgatgctggcttcatgaagcaatatggcgaatgcctaggtgatattaatgctagagatctcatttgtgcgcagaagttcaatggacttacagtgttgccacctctgctcactgatgatatgattgctgcctacactgctgctctagttagtggtactgccactgctggatggacatttggtgctggcgctgctcttcaaataccttttgctatgcaaatggcatataggttcaatggcattggagttacccaaaatgttctctatgagaaccaaaaacaaatcgccaaccaatttaacaaggcgattagtcaaattcaagaatcacttacaacaacatcaactgcattgggcaagctgcaagacgttgttaaccagaatgctcaagcattaaacacacttgttaaacaacttagctctaattttggtgcaatttcaagtgtgctaaatgatatcctttcgcgacttgataaagtcgaggcggaggtacaaattgacaggttaattacaggcagacttcaaagccttcaaacctatgtaacacaacaactaatcagggctgctgaaatcagggcttctgctaatcttgctgctactaaaatgtctgagtgtgttcttggacaatcaaaaagagttgacttttgtggaaagggctaccaccttatgtccttcccacaagcagccccgcatggtgttgtcttcctacatgtcacgtatgtgccatcccaggagaggaacttcaccacagcgccagcaatttgtcatgaaggcaaagcatacttccctcgtgaaggtgtttttgtgtttaatggcacttcttggtttattacacagaggaacttcttttctccacaaataattactacagacaatacatttgtctcaggaaattgtgatgtcgttattggcatcattaacaacacagtttatgatcctctgcaacctgagcttgactcattcaaagaagagctggacaagtacttcaaaaatcatacatcaccagatgttgatcttggcgacatttcaggcattaacgcttctgtcgtcaacattcaaaaagaaattgaccgcctcaatgaggtcgctaaaaatttaaatgaatcactcattgaccttcaagaattgggaaaatatgagcaatatattaaatggccttggtatgtttggctcggcttcattgctggactaattgccatcgtcatggttacaatcttgctttgttgcatgactagttgttgcagttgcctcaagggtgcatgctcttgtggttcttgctgcaagtttgatgaggatgactctgagccagttctcaagggtgtcaaattacattacacataaacgaacttatggatttgtttatgagattttttactcttggatcaattactgcacagccagtaaaaattgacaatgcttctcctgcaagtactgttcatgctacagcaacgataccgctacaagcctcactccctttcggatggcttgttattggcgttgcatttcttgctgtttttcagagcgctaccaaaataattgcgctcaataaaagatggcagctagccctttataagggcttccagttcatttgcaatttactgctgctatttgttaccatctattcacatcttttgcttgtcgctgcaggtatggaggcgcaatttttgtacctctatgccttgatatattttctacaatgcatcaacgcatgtagaattattatgagatgttggctttgttggaagtgcaaatccaagaacccattactttatgatgccaactactttgtttgctggcacacacataactatgactactgtataccatataacagtgtcacagatacaattgtcgttactgaaggtgacggcatttcaacaccaaaactcaaagaagactaccaaattggtggttattctgaggataggcactcaggtgttaaagactatgtcgttgtacatggctatttcaccgaagtttactaccagcttgagtctacacaaattactacagacactggtattgaaaatgctacattcttcatctttaacaagcttgttaaagacccaccgaatgtgcaaatacacacaatcgacggctcttcaggagttgctaatccagcaatggatccaatttatgatgagccgacgacgactactagcgtgcctttgtaagcacaagaaagtgagtacgaacttatgtactcattcgtttcggaagaaacaggtacgttaatagttaatagcgtacttctttttcttgctttcgtggtattcttgctagtcacactagccatccttactgcgcttcgattgtgtgcgtactgctgcaatattgttaacgtgagtttagtaaaaccaacggtttacgtctactcgcgtgttaaaaatctgaactcttctgaaggagttcctgatcttctggtctaaacgaactaactattattattattctgtttggaactttaacattgcttatcatggcagacaacggtactattaccgttgaggagcttaaacaactcctggaacaatggaacctagtaataggtttcctattcctagcctggattatgttactacaatttgcctattctaatcggaacaggtttttgtacataataaagcttgttttcctctggctcttgtggccagtaacacttgcttgttttgtgcttgctgctgtctacagaattaattgggtgactggcgggattgcgattgcaatggcttgtattgtaggcttgatgtggcttagctacttcgttgcttccttcaggctgtttgctcgtacccgctcaatgtggtcattcaacccagaaacaaacattcttctcaatgtgcctctccgggggacaattgtgaccagaccgctcatggaaagtgaacttgtcattggtgctgtgatcattcgtggtcacttgcgaatggccggacactccctagggcgctgtgacattaaggacctgccaaaagagatcactgtggctacatcacgaacgctttcttattacaaattaggagcgtcgcagcgtgtaggcactgattcaggttttgctgcatacaaccgctaccgtattggaaactataaattaaatacagaccacgccggtagcaacgacaatattgctttgctagtacagtaagtgacaacagatgtttcatcttgttgacttccaggttacaatagcagagatattgattatcattatgaggactttcaggattgctatttggaatcttgacgttataataagttcaatagtgagacaattatttaagcctctaactaagaagaattattcggagttagatgatgaagaacctatggagttagattatccataaaacgaacatgaaaattattctcttcctgacattgattgtatttacatcttgcgagctatatcactatcaggagtgtgttagaggtacgactgtactactaaaagaaccttgcccatcaggaacatacgagggcaattcaccatttcaccctcttgctgacaataaatttgcactaacttgcactagcacacactttgcttttgcttgtgctgacggtactcgacatacctatcagctgcgtgcaagatcagtttcaccaaaacttttcatcagacaagaggaggttcaacaagagctctactcgccactttttctcattgttgctgctctagtatttttaatactttgcttcaccattaagagaaagacagaatgaatgagctcactttaattgacttctatttgtgctttttagcctttctgctattccttgttttaataatgcttattatattttggttttcactcgaaatccaggatctagaagaaccttgtaccaaagtctaaacgaacatgaaacttctcattgttttgacttgtatttctctatgcagttgcatacgcactgtagtacagcgctgtgcatctaataaacctcatgtgcttgaagatccttgtaaggtacaacactaggggtaatacttatagcactgcttggctttgtgctctaggaaaggttttaccttttcatagatggcacactatggttcaaacatgcacacctaatgttactatcaactgtcaagatccagctggtggtgcgcttatagctaggtgttggtaccttcatgaaggtcaccaaactgctgcatttagagacgtacttgttgttttaaataaacgaacaaattaaaatgtctgataatggaccccaatcaaaccaacgtagtgccccccgcattacatttggtggacccacagattcaactgacaataaccagaatggaggacgcaatggggcaaggccaaaacagcgccgaccccaaggtttacccaataatactgcgtcttggttcacagctctcactcagcatggcaaggaggaacttagattccctcgaggccagggcgttccaatcaacaccaatagtggtccagatgaccaaattggctactaccgaagagctacccgacgagttcgtggtggtgacggcaaaatgaaagagctcagccccagatggtacttctattacctaggaactggcccagaagcttcacttccctacggcgctaacaaagaaggcatcgtatgggttgcaactgagggagccttgaatacacccaaagaccacattggcacccgcaatcctaataacaatgctgccaccgtgctacaacttcctcaaggaacaacattgccaaaaggcttctacgcagagggaagcagaggcggcagtcaagcctcttctcgctcctcatcacgtagtcgcggtaattcaagaaattcaactcctggcagcagtaggggaaattctcctgctcgaatggctagcggaggtggtgaaactgccctcgcgctattgctgctagacagattgaaccagcttgagagcaaagtttctggtaaaggccaacaacaacaaggccaaactgtcactaagaaatctgctgctgaggcatctaaaaagcctcgccaaaaacgtactgccacaaaacagtacaacgtcactcaagcatttgggagacgtggtccagaacaaacccaaggaaatttcggggaccaagacctaatcagacaaggaactgattacaaacattggccgcaaattgcacaatttgctccaagtgcctctgcattctttggaatgtcacgcattggcatggaagtcacaccttcgggaacatggctgacttatcatggagccattaaattggatgacaaagatccacaattcaaagacaacgtcatactgctgaacaagcacattgacgcatacaaaacattcccaccaacagagcctaaaaaggacaaaaagaaaaagactgatgaagctcagcctttgccgcagagacaaaagaagcagcccactgtgactcttcttcctgcggctgacatggatgatttctccagacaacttcaaaattccatgagtggagcttctgctgattcaactcaggcataaacactcatgatgaccacacaaggcagatgggctatgtaaacgttttcgcaattccgtttacgatacatagtctactcttgtgcagaatgaattctcgtaactaaacagcacaagtaggtttagttaactttaatctcacatagcaatctttaatcaatgtgtaacattagggaggacttgaaagagccaccacattttcatcgaggccacgcggagtacgatcgagggtacagtgaataatgctagggagagctgcctatatggaagagccctaatgtgtaaaattaattttagtagtgctatccccatgtgattttaatagcttcttaggagaatgacaaaaaaaaaaaaaaaaaaaaaaaa
